United States Patent Application Publication US 2020/0377945 A1 - sequence listing, part 10

SEQ ID NO: 1722 - DNA, 76600 bp, Unknown
  gut microbiota DNA sequence
catcttttctttcatcatggtttccacgaccagcttcttgaattccggcgtgtatcgtttgtttggtactccctttggcattataatcaccccacctgttagacattatatcatactgtctaacaaatggggtgcagttcacataagcgctaagctactttatcaacggtgtttaatttttactttcagcaaaactctacggtttttcctgtaaaactgtcatggcttttgatcgtcgcccaacatggaatggaattcaactgaaacggatattccacgccgtcgataattgcaattcctctttctgctacaggtaggaattcataatccctgtcaagaacaagtacgcgaatgtccgtaggaccggcttgaaagtcatcaatgattttgtattcttttttcattctttttgaccctccttaccgttaagacgttctttcaatcgttcttcataatttattagccccggcattttgactttatctcttccgtctgtggacatttttaaatcgcccatgaggcaggcgtaagagatggcacttttgccaaagcgaccacgaatctcctccacagcatcctgcattttctccattgccatgcggtgctggacattatcaaacagcgtgagctgctcgacgctgcctttgggcgagagttcaatggaacggacggtgaccgctctgaccttcgtgttccaagaataccgctctttaaagctccgaaatgcggcagcggcgatctccgagggaagctgtgtcttgagcggtacttacattgatactgtgagccgaacaggtcattgccccggacatggacttggacggtagattgctaccaaacagaatttgtgaatgcaaacctcaaagtagtttgcttcctgcacgctttctatcctgcggcctgtgtcagcacacatgctgttgtgctttgcaacatgaacggcagacaaacgccgctctcacctgcgccgaccagcagctccgtgccgctcgggctgatcaggaggggatacctctcacacagatacaccgggccgtccgtgacaccatagctgttaccgcccacaagcgacaaactgagcgtcacatagctcggcccgtccggaatcgtttgaatcgcccagaaaccgctccacatctcctcaatgtcgtcgctgtcttcgtatgtccactccagatcgactgtaccccccgtctcatcctcgagatagaagcgcagcgagaaataggcatagcggccggtttcctctaccatggtttctgtgatccagcccatgcctgtattctgcgatccggcaaggccaagcgcggtcacgcctgtccagccgtcagaaagccaaccggcaaattcggatgggatgtcataccaggcatattccgtaaaatcgaacgaaagataatcaccggcttccgatgtacacggtgcaagatggctcatcgcatcaagcgagggataccattcacaggtgttcccgttgttgtcggtgataaagacctgggtgtcggcctcatgcgcaatgccgtcaagattcgcaaagagcagcaccggttcgccgctctctgaccggtagagaacctctgtgacctcatcggtctgtgttttttcgttccattgcacacggttgattgcaaccgtcgcgttctcgtcgaccggcacaatgcagtacagatgccccgcgctgccgatgatgtgctcatcattgatctctgcgataaaggggtattcgaggagcattgcctcattggtttcctgcagccacgcagggaaacccgcctcgaaaccctcatcaaacagaccgccgacatagccgagatacgccgcgccaaacattgtcgtcggaaaatcaatcctgtcgcgcaagcatccaagcgatgtctctgcctcctgtgaaaacgcgtattgcaccggcggcgtgtccacggttttatcctgtgatacaaaatcgttcccgttgctctgtaatacagcttcctcctgttggctttccggagtttttttgtgggcagtatttattttgggttcgtcaggctccgtttgcgtcttctgcgtacaggcgcaaagcaacaataacagaaccagtgccagcaatagcgcgaacacgcgtctgggtgttgttttcatagccactcctttcagaattttccgcttcggccggaaccgcctccgccggattcgctgtggctgctcccgctgtcggaagagctgcgctcaatcttccggctggaggtcgtcttatgggtaaaatgatctgtttgctctgtaagctgaagtcccgcggaaacataggcgttagcagttgcttttttcgatacattttccattttctgccatatcacagcgacgatcacggctgctgccagtagggaaagaccgatcacaataaggatcggaaaaaacaaactcgctcgaaccggctttcctgaggctgctttttccagatagacgctgcattctttgatgtaatcctcaaagccgccgtaccagtcgttttcaccgaagttatcaaggaataccttttccagtttctgttgaccatagctgttgaacgcatactcgcagtgtgggccgtagcagaacatcgcccagtcgcgatcatccatgctgagcaggagcatgatcccgtcgcggtccggtccttcgcccatcgtgtattcgtgatagatggtataggtcgccttatagacacctccagaatggaagtcacgataatcctccacggttacgatatatacaccgatgccgtatttttgggagacggtttccgccatcttttccagcatcgtattttcgttttcgctgagaagtccggcctcatccgtcacataataaagctgtgcacctgtctgctcggttgcggatacattcacgcagaatacaagcgcgattataaacgtcagcaggagacagcgtattctctctttcatttttccgccctccctagtgtgccaaaagcagcagcgcagtcacgccgatggcaatgagcggcgccgcgattgctgcaaacaaaccgacaacccgcttcgtgctgacaggaaggttgcctaccaacttacctgtctgaccattcatggcaaaaaggaaatcttttccttcccactttgtatttaggatccagacgggaagcaacgcgtaatgcactttgccgcgcttcaaacggatgtctcggctcgtttcattgcaggtggtgtaattcgaaaccgtgctttccagcgcagacaccagcgaacccgcgcagcgcttgtctgcccgctcccggctgttttcaacgctcacatcatatttgtctgccagaaatccgggcagatatgccgtggaaaacggctttaagtctgtatagtcatacggttcgatggaatccatgtagtcgtccggcattttgcttgacgcgtccaccgggattttctcaaagccaatagaaccggcgcggcgcacatcgtagtggcttgtctccgtgatttcataatctcccgaggtgtacttatgtacagtggtagcatggaactgcacgcttccgctggccgcaccgtcatacatccagaagggtacatacacgcctttgacctcctcaagatggttggacttggagaacgttgacggcaacagcggctttttgcgatagtgtttcttcagcgccttgatggcatcctccttgctcagcttaaaaggaagcacaaaatcaggtttcaaaacgccggcgaactgacccggaagcaccgacggatttccgcagtatgggcaggacgtagccgcagtcgttgcgtcgcagagcagctccgcaccgcacgacgggcagctgtaagccttcatgtcagccgcgtccgtgccccagtcctcgttcaggccggaagtgtcccagtcagagccgcctgcggcggccttttgtttttccgcttcggcagttttttgagccgcttctgtttcttcctgcttctgcgccgcttccgctgcttttgtttctttttccgcgtagagcgcttcaatttctgcgacatcgaagcttgagccgcagtaatcgcactccagcctgccggattctcctacaaaatggagtggtcccgtgcaggcgggacattgataatttgtgatttgtgttgccatctaagttcctcacttcccagttggcgttacagcccgcaagcgcagtccgtagtgccaaacacagttataaccgcattttccggatatgtcccgcaaactcactgtttgtgataaattgcatccgtgtcctttatgacgttttcttccgaatcgtacatgatgcgcatatcagccgctgtatggtcactgttgacaagtataatggtaatcagcttttcggccttttctgcaatttcgtcgtaaacgcagtctgcatcgcaaccaaagtcaaagctctttgtccggaacgcggactcggcaaaaatgctccagctgtaccattcttgtgtctcgttgttccaccacatagtacaacagttcataccgcttttgtccccatttgcgacaaactcatatttttgcaggccgtcctccgtaacccacgtgccttccagcaacgcaaagacctcctgtgcttccttttggctttcggcttttctgtcagcttccgcttgcagctcggccgcactgtaatacgcttcgcggtctcccgtttcgctccagccttcatcgtaccaaaacacgtctgccagccatgcaaactgcggggagtccagataacgcagacgatagatgatatcgtgcgccctgtcctcgattgtcagcccgctgatcttttcggcaaaatccgcctgaacggtcagaacgccgtttcggaacgtatggtcaaactgatcgcccaaatcttcaaaattcgcgtcgtagcagcggatgggattgtccttgaactgcacgccgcgataatagagcctcatcgtcccttggctgtacatggtttttgtaatgtggaaatcgtcaaaaaggaccgatgtttccgggtactgataggtgcatccgtcgacctgaccgcaggaggtcagaccgagcaggctcatacccagacctgctgcgatgaggagcgctttgaacttcaccgcatcacccccgtttttcgcgaataaccggattctcccgctccaagttggagcgggagccgttttttattggaacgtcatattgttgagaatgatatccggcatcgtgcccgggacgcagtccatatcccgaaggccgatggaaagggcgcggttgtcgtcaagctgcgcgatatactgaatccattcgtagccgatgtacttataggtgcggccatggaaggtgatgccgccgatcacgcggtcttcgatatcctgatagttttcgaatttgtccttgtaggaatcaaatttttcaacgttctctcttatctcaaactgaatggcgcccgcaccaaacgctgtgggatcgtcgttttccaccagacagcgcccactatcatcgaacgaccagccggataccgagatcttcgtcatgattttgaccttaacatcgtcttttgcaaactgggagatctccacggagaagtccttcatctcggcgtttgcggatgctgccttgttcgcctcggcggcctcggccttcacgatgtccagatacctttctatggcttctgtgccggagaagccgctggtgttgtacgcactcaccgtataaacgcccggagtcttttcacggaagttaacgtagatgaaatgcgagctgtcttcgctcgaaatccacttgtagtagcggtagttcgactgcatgtggtcgctgtactcttccttgacaaactcgccttctacaccgaagtaggcaacaatatcctcgtaagtagcatcaaaaatattattattgacctcgttcatccaaacgtagcccttttgcacctgctcctcggtcacgatgccgtttccgccgggagctgccgcattcgtctggttggtcggagcattcccctccgaaacaccttctccgatggcatccggcatagacttgcctgcgtcaatcagaggcagataccagtcggtataccggtagggatacgcatcttcctccatgtctttccaataaagaccccacgggcgcagataaatgtcatagtggaattcgtcatcgccgtcttcatagtcgccgctgatacagatcatatcatcgtagtccaaaagaccggggtcaacgatccaatcggcatgctccagtgttacgtttgtaaaccagccaccctcggacatcaccgtaccgtgctcgccggttccggcttcactcagactgacctgcgcggaagccatagggtcggatctcgtgtagtcctcatcccaaagctcgattgtgcctgtgtagtctgtgtttaaatcgatgacgccgcagacatcccaccagtcgccttccatgctttcataatagccgtagcaaccgctcatcttccaccagccgtaccattcgccgttccaccaatcgagcaatgtgtcaccggtcgtaccggtggtctccggtttcgtatcggagaccgtttcccggctgagcgtagccgggtcaacggtgattgtaccttttttgctgccgagaaattcctcaaaggtcgctttgacttcactggtcgtgtcttttagcacgaaggctgtccgcacttccagcgttgcacccggcgcaacatccgtaaactgatcgctcactacggtttcaaggttctcatagtccgtgataatagatgcaggttccagctctacaccgttttgcataaccgtctcatcgacactccagagatatgaggcgttttccttgctgttgtttgtgaagtccagtgtcagaacgattgcgtcgtttccgtccgaatcttccatgatgcatgcgcccttgtagagcagctcatagtcaccgagcttgattaaattggagtctttcccctccttatcctttccgcaggcggtgaggccgctgagcagcatcagtgccgtaagaatcaggcatagaagcttggtcttcgtctgtttcataatttcctcccaatattcttcagggttgcacaaatctgccaattagcagaaaacaacgtataatcccggcaaaaagcagccgtgcctacctgagacattttttcttatttcttttcgcgccggataaggtttccgtccttgtcggtaaacttaccgcagagaatcttgataaagtcgacaaggtatccgatgccgaacagaccggccgtcagcgtgtagagaatgcctgtgccaatcttaccgacatagtagcggtggacaccaagaccgccaaggaagaagcaaagcaagaatgttgtcatccagtccttcgtttcgaccggaacctccggcgcaacatagtcctctactgcctcaccgttcaaaatcttcttcacggtttccgttacggtgtcgatataggcgccacgctccgttgcaagaccgaccgtcgcacccttgagacccttgcgcagtgcgctgttcttatcaacgcgcataccgccaaccgacatcttggcctccgtaatgaccggctgaatccggatgtgtgtgtcatccttgaggtaaagccagaggccaacgtccacatttggttctttctcaaacgagatgcgctgtccgggaacgccgcctttgatctggaatggcatctggaacgctgctctgcgcgcattgagtttctgcatgatttcttccagtgtggtagaatagggaagatcaaattcacggggactggtagcgaatgcaacgtctttcatgctgcctgtaaggttattcatcgttttttctcctttctaagaggtcagagggcggatagtgttaatggtaagctacacggctatttttttgtaaaggtgccgctgatgccgtagccggaattctcattcatggtaaggctgtttccatctacggagaatgtataagtagatggatcactccatgcctccagtgtcaccgtaagctgatcaccttcaatggtgtacgtaccgtcctgtttcatataagcattttccatggtgcatttgccgcttccgttgaaggtccatgtgatcgtaccgtctgcgccaagttcggcggaccatgttccggctaacgcatccttgctaccacaggcagaaagtgttagaagcgtaaccacaatcagaagcaatgctacaaactttttcatcttttttgtccttctttctttaattatcatttgatggatatttatcctcttaccgcgccaccgcaatattcacaacagccgttcacgtccggtgtggtcgttgcgccgcagtagggacaggtgactgccgttttgggtgcggcctcctgttcaatctgctggcgcacatccttgcggacctgcgtcagaacctgccgaatttcctcgccgagctttttgcaattgcggtactcaacgttagtttccggattgcatcgggtcgtcatccccggtcgcattgcgggaggcggtgtaatatctacggaaccggaattgatcttgaagcgtatttcgtcaaagtaatcgttgttgacgaatatggtgatgtagaaatcataggagtattcataccgcgggggattgtagctaatctctctaccgtccttatcctcatgcttaagctccgtgcggctctcgtcaatgtcgagattacagccggtcacgtctgcaaaatccaaaacatccgggttggcttccacaagatttctggcacgtgtcaccatgaattttcccgcgtcctcgtcaagaagcaccttggtgtccgcgccgagcgttctggttgtgtggaatgccgcgacctttttctggttttcttccctgtaatcaagctgtgccttgatttcctcaacagtgctgttgcgtcgatcagagaaccaaggggaaagcttttgggcgcagtttttgcagagattgccgttttcaagcttgcggttgccaagtaaccctattttttctccgcaaatatcgcaatattttttatcaaacagtcccatatatgtatcaaactcctttgtgtatgctacttgaattatacggttactgcgtgtctgccttggaattgagtaccgcaccgtagatatacaaggccggaatagctattcctgtcaggatgcttacgacattaaactcgccgccgttgaccagactcatcacaatgctcaatacgctgaatacggccacaatcacgccccacacgatgagctttcctgctttttcgctgcgcttactgtgcttaatgcctttgattccggcaatcatctggcaaattcctccgaccagcgtcaggaacagcgccgcccaatatggaaatgtcagaccggattccgcaccgagtcccgccgccaatacacccagtccaccgacaagaacacccgcaatgatggaaaatactgcggcaatgatcatcaaaattccggtaaccttcaaaaatttatgtcctttcatggtaaatcctcctgttacaataaatcgtatggtttgtttttattctttcgcagggcgtttggccccgcattctgcgcaaaatgtacgactgccgtttggcatatctcgcattactccgtttcaaggtttgacgtggcataagcttcttcggcaatacgcagcaccaaggtctccagcgcttctgcatggctgccgctgagcttttgaatctcgttcccgtcatcggtgcgccaaatgacccggatttcgctgtcggtttcgtcctggacatttggagacagctttcggtacgcgggcagatccgactctgccagcatattctgaagttcaaaccattgcacccacgtaagctgccaagggattgggttggaaaacgcatccgtttcgctttctctcatctcgtcgccggatcggtccggaaaccggccggtcagcagaggcatatccttctcccggtagaatttcagtgaaaagcagctgtaaaaattcctgtggttctgtcgccactcaaattccaccagatcttttcctgttctgtatgtatccgggttttccatcctacctccatcttgaatccggctatcgatataataccgatacagcgatacgcccgccagtgcgataaacacaaccgccgacgcgatggtcagagcgattatggatgcttttctcacttcaaatccccgtcgtcaaacggatcgccgcattccgggcagaacttgggcgggtgtgtcgggtcagccggctcccagccgcatttgtcgcatttgtactgcggaacaccggccggtttcggcttgccgcattcagcgcaaaactttcctttgttcaccgcaccgcagctacacgtccagccgtctgcctgcgattccggctttttggtgccgcattccgggcagaattttccgcttgccgtcgcgccgcactgcggacatttccagctttcggcagcaggctttggttccggttttttactgccacagttcgggcagaattttccggtgataccgctctgtccacacgaacagttccatccttcagcagctgccggagccggagcaggctgcgctgcttgctgctgtgcgcccatctgatagagattctgcgcgttcatgccgcccgcctgacctgccatgttcatgcccataaacgccattgcagggcctgcactctgattcgacgccgcagattgcatcgcggaagcctgtgcaccgacaagataggctgccgctctcgtcggatccataaacgccgcattacgctgcagctccttaatcatctgctcatcctcttcgctcgccttgaccgacgaaacgccaaaggaaacgatctcaagtccacgcaggtagcgccattttccggataaaacttcattcaatgcctcggccagttccattgtatgaccgggtagcgcggaatagcggattcccatgtcggaaatcttcgcaaacgcgggctgaagcgccgtcaaaagctcggttttcagctgaccgtccagacggtcgcgggtatagtcttcactgacgttgccgcatacgttcgtgtagaacagaatcgggtcactgattcggtaactgtactcgccgaagcaacgaatggcgatgtcaatgtcaatgcccgcacgctggtcgacaacacggaacggcaccggagagggcgtgccgtacttattgccaatgagctctttcgtgttaaaatagtagacacgctgatctttgggcggctcgccgccgaaagtaaagcgtttgccgatattcttgaacgtgtctaagatgctggttcccaactcaccggagaagatcgtcggctccgtcgagctgtcatagacaaactcacccggcacggcgcaaagctccgcaaccttgccctgatcaacaatgatcatacactgtccgtccgccaccgcaacgacggaaccgttcgagatgatgttttcgcttccctttgtgttgctgctgcgtccggaaacgcgccgctgtcccttgactgccataacgttttccggaattgattcacagtaaaaatactctttccattggtcggccattacgccgccggccgcacccaatgctgctttaatgagtcccattttctgtactccctttctttacttattatgcccacggatcttccgccgcgggaatacggataccgctgagaatactggaatattcccagaggaaccattcgccggtcgaagccttctgccgcaatttcatgggacgcggtgaatccgcgccggacgttttaagaaacacgcgcatatagcccggctctatatcctgaggtctggggtctgccagcacgttcagcgtgtatggcacgcacggctgatacccattttccggcgttgcgccttcaaaatatgcaagcggcagatagaccttgccgcgcagtcggtcgcgcagaaactgacagtcatacggtgtcatgggcttaggaccgcgcagaaggttcatcgcggcaacgcctgcatctttgtccctgtcaaacagcgccagtgcacacagaaacagtgcgcagatatgttccggctgccgccctttagcagcaagaatttcaaactcctgcaaattttccggaattttctgaattacaacctgcaacataaccactcctttctaaatgtatatcaatcacacctgtgaaatagatctgtaatcccagcgtgtaatagaattatcaatctgccaatctttcatgaacggtcgctcattggcgggacgcgctgtacgaggagctaacctcttcactatccggaaagaatgtccgttaaacctgtctttttttctttctccaaacgagtagaaaaacgacgacggcaacaatcaaaagcgttggcacaagtgtgaatacaaggatttttcccacggagaagctgcgttctgccgcctgcacattgttcttttcgttcttttgaggaacatctttaccgacagcgttctcaccaaatccgttcttttcgcccctatcgccattctttccgtcgctatccgctgtccccgaaattgatgcgccgggtgaagccgtaggcgaaatacccggcgaggccgaggcagctgcattaggcgacgccgtgggcgaggctgtggcggatgtgtgtggtgaagccgtaggcgtaacctttggcgtaggcgtaacctttggcgtaggcgtaactttcggtgtaggcgtaaccttcggtgtagctgtggcggatgtgcgtggtgaagccgtgggcgccggagtcggtgttgtgcgcggagccgcagtcgttcccggcttgagcttggaaattggatttgtgcgtatcgcgccgcacatattgcacatccattgcataactccctcttggcttgttgtcggttgtgcgaccactttcccggcgtcccaattgtgatccgtcttggcaatcgattttgtctccgtcacactgcattgcgtacactcccgcttttggatgccggtctccatgcaggtgggctgcgtcgtagtaaaccatgcgccgaatttatgtcccgtcttggggatcccgcggctctccgtcgcaccgcaggttgcgcactcccgcttctgcatgccttcctccgtgcaggtggcctgcgtcgtggtaaaccacgcgccgaagctgtgccccttggcgggcgtcgtggtggtccccccatccgcgccgcagtcgtcgcagacaaattcggtatatcccggcgtggtgcatgtagcaaatactcgcttccagacgacccagaagtgacccgtggcaggttctgtggagcgcccctggctcgcagggcaattccggcagtaggtgtagtattctcctgccgtggtgcaggtaggctcttttgtatagtacttataccagctgtggcccgttgccggcgcgagctctggataccacttgttgcatgtactgcaataggctcgcttctcgccggcttttgtgcaggtgggctctttgcccggaacgatctcccacggcccgaattcgtggggcacgatgtcgccgatggaaaaggcgcagctccacctgcagacggtacattccagtacgtagtatcctccctccaggcaggttggctttttctcctcggtctgtataacgttttcatggtgttccggattattgtcgtccggcgagcacgcaagcgcggtaatcgcggacagcgccgccatgagcgcaaataccagaaatattagaatcaatcgcagtagttttttcatttctcacccatcctttcaaagcgtgtcaattacgcccgcgaggtaagtcggcgatactgatgcataaataaagttatcgaccagctgatcctttaccgcctgccgcacttcggaggcaagcagtttgtccgcgtcctcatccaccaaaagcagaaccttacacgtccaaccgagttgctttacggcactgcagatcttgagtctttcactcagcttccagattccctgtcggatgacctccatcaccaacacattggcacggcaggtccggcacaacgccagcgtttcttccggctttgaagaacggtagataaggaaatccgggtcgcatcccgaaagtgattgcatgaccgcctccgacagaagtccgcccttcatatccaatacaattcttcgcatttgtgcttttccaccgcctttctcttccttcgaatccttcatctacattttagccgttatcttccatttccgcccccgccaattggataggatttgtaattattttccgttgcaaagccaaattttgtcacagttctctgtataaagaggacaaaacgtgttgccttttgtctatccgcatgatatactatccatataaatatactaatttttgggggcatgcggcatgagcagaacgacgaaaagaagccttttgtacgccttgggcttgctggtgctcattgcgtttgccatgtggctccgatatgcaagccggtattattttcattctccggctgccagctacctgcgaagcgcaatctatttgtttttgttcagcgtgtggtgctactctctttgggcgcgcatcgtacaggtgcaggtgcggcactacatgctggcgatttcggcgctgatggtgctgtggattctgctgcgctcaatcaagttttccattgataacacggatgtagaacgcctgctgtggtattcctattatttcccgatgctgtttatccccatgctgtcggtcttcgtttcccagtctctgggcaagggagaggattttcgtctgccgcgatggacaaaacttctgtatcttccgacattgctgctgcttttgctcgttctgaccaatgatctgcatcagaaggtattttctttcccgtccggcattttatcggaccgggagtatcggtatgaggtcggttttttcttcgtgctgggctgggaagttctgtgcgcagggtttgcgtttctttcgatggtgaaaaactgtcgtatcccgcatagcaggaaaattcgctggttgccgttggttccgtttgcgctttcgctggtatatgtttatgcgtatgccaaaaatgtctattgggtctgggtgctcgcgggcgatatgaccgtgtcacagtgcctgattattgcaagcatccttgaatgctgcattcaaagcggactgattcattccaacctcggatacgatgagctctttgaagcgacaagcctgcctgttcagattaccgaccaagcgttctgctccaaatatgtatctgccgccatgcaggggactttgccgcaaagtgagctaaggcatatacagcaggataccgtctatctggatgacgatacacttttgaaacggcataagttgcgccgcggctgggtattctggaaggaggacatctcagcgctgagtcaggttcagaagaaactggaattgacacgagatgagttgcatgacaccggcgacgttttggcggcggagaatgcacagcatgcaagatggttgaagctgacggagcaaaaccgcttgtatgatatgatggaggcacagattgatcggcagatcgcgatgctgtgggatctgctggctgaattgcagaaaacggaggaccaaaaccgggccaggcgtttgctcgggcaggtcatcattatcggaacctacatcaaacgcagaagcaatctgatttttgtcggcgcacagcgcggtgcgatcagtgtgcaggagcttcggttgtgcctcaatgaatcttccgagaatatctgtgtctatggcgccgactgtaaggcaattgtcaagggggatgaccagcttaccctcgaacaggcgacgcagatctacgacctgttcgaggccgtcgtggaaacggaactggaatcccttcgtgcaatgctgatctccatagatgtcggtgcgcaggtagaagtatctttttgcgtttcagcggcagagccactctgcgggctgcgcgcgcattttcaaggtttggaatgggagcaggatgaggacgggctgcaatacgtgacgcggaaactggaaagatcgaggaggtaaaggcgcatggataggatcaaggaaagttttgacagtctccccatcgcggcctgctttttcgataaaaacggcgtggtgcggctcatcaaccgccggatgcttgccattacgaactggcttcaaaaaggcggtatacagtcgctggcagagatgcaaagcgctctgcaggcaccgccggcaagtgtgtgctgtctggatccgcaccttcgaatttaccgctttccggacggaacagcgctgcgctttgcacaggagcagatcacaacaaaagcaggtgcccgatatacacaaatcactgccgcagacgttacggagctgattcagaagcagaaccagttaaaagcggaaaatgcgaagctggagaaaacaaacaagcggcttaggcggctgcttgcgcagatgccggagatcatccgggaagaagagacgctggccatgaagctgcgcgtgcacgatgacattggacacagcatcctcgcgacgcggcgcgtgctgctccaaaacacagaccagaaggaaattcgtgcaaccgcagcgttgtgggagcagtccatttcagtgctttaccgctccagtcagatgagagcgcaatccgaaccgttggaagccgcaaaagaacgagcggaaaagcttggcgtcagagttctgctggcaggagatgagccgcgaacgcagcgtatgcgcgcactgattgcactggcaatcagcgaatgtgcatcgaactgcgtccgtcacgcggacggaacagagctgtatgtgtgcttttggcaaaagccggactgcatagcggtctccctaaccaacaacggtgcggcaccaaagggaaaaatcacagaaggcggaggtctttctatgctgcgtcaacgcatagaagaatccggcggcaaaatggagattcagagcgtccctcgctttaagctgatgctcagtttgcaggaaaaggaggaagcagcatatgaaggtgatgatcgttgaagaccagaccatgattcgcagtctgttggaaagctattttcgcgccgaagacggataccggatcacggcgtccattccaggcgcgaaacaagcagtcgagatgtgcaggacaaattctgtcgatctgattttgatggatgtgcaaacagagaaccgtgagaacgggttgattgctgttcgccagattaaagccatacagccgaagagtaaaattattgttgtgacttcgctgatcgacggcgccgttctggatgaggcaaagaaggccggggccgacagcctgtggtacaaggactcgacgcagaagcgcttgatggatgtcgtccggcaaacgctggcgggtgaacatatttttccggatgcacccccgacagttgagatcggcatggcaaaaagcacggaatttacaaagacggaactgaaggttctgcggcatctgctgcggggactgtcttacacgcgcattgcggcagagatgggctgcgagatgtcaacggtcaaattccatgtgtcaaatatgctgcaaaaaaccgggctggaaaacaagcttcagcttgcgctggccgtcagcgacgtcaagttgattgccgatcttgcggaagaatgatgggatttgattttctgcgattacccggctgtttaacgattacgacggaacagaacgccacaatcctcgcaaaaaaacacgaaccccgccgcagaattgctctgcagcggggttcgcttatgtgccgaaacagccgaaaagccttgttttaagcggttttcgggcatagaaaaagtccaccgtaattctatcaaaattacggtggacttttggcggagaagatgggatttgaacccatgcgccggttacccgacctactcccttagcaggggagccccttcaccacttgggtacttctccatggtgaatataaaagaaaaatgtggcggagaggaagagattcgaactcttggtcccttacgagatcactagttttcaagactagctccttaaaccactcggacacctctccatttcagaacaagtggtattataacacacagagcatgctttgtcaagcacattttttgtgcattttacagagccgacttgactgttattaattatacaaaaaccgagtaggtttgtcaagcccataatggaattttgaccgtttttttccaaaaacaataaaacagccaaagaaaagcgcttgcaatgcgaagaaaaataccgtatactgtttatgaaaaacaaaaggagtcgttgtgaaaatgagcaaggttgaatttgattgcggtaaatggctgcaggaagccgaagaatttgcactgccgaattggagcgccctaccctctattcccctttatatggatcaggtgatgatgtttacaggtgaagcgctgtctctttttgaacgcgatgaaaagcagagtttattgacgaacagtatgatcaataattacgtgaaaagcggcgttgtggatcatcccgtgcacaaaaagtacagcaaggagcatctttctaagctgatgatggtgggcttgctgaagcaggtgctttccattcaggatattgccgtgctgttttccggcgacgaagacgcggagcagctttataaagactttgcggcggcgcagagcggcgctttgcacgagacggcagcgggcgtgcacccggaaagtgacgcagcggccttgcgtgcagcggcgttgaagcttgcagcggaagctacggcgcgacaagcggttgcccagcgcattttaatggcgctgtccgacgaaaaaaaagctaagaaataatcaaatttgtaacgaacaaaagcctgcatggcgcatagaatgttctattcgaaaaaaggatgggatatgatgtgcgatttgcaggcttttcctatgcgttccggcgaccgattgctataaagtgcagctgttgctctaaaaatacggaatgtcctcctcttccacgcgctgtacttcggcagtgacgtgaaaggtaatttcggcgtttgagagcttttctgcgcggctttcccccatttcacgccacacatttggcgcggtgcggaaaataacttcgctgagacctgcggcatcggctccgtttgcgtttttgagataagcggcgaggcgtccctcaatgcagttggcaagggcagtctcaaagcgcggaaatgcttcgttccctacgtgctttgcggtatttgtgacggcagaaacttcggcgataacatgaattctggcggtaaacttgggctgttctgctgtgcctgtgaaaataatgttgctgtttgtgctgcggactttaagcgataccgtgccgaaagcttcgtcttttacggtgaattcgccaccagaaagtgtaccctgcaaggcactaagcccctgtgcttccgccggcgtgagcacagtgcacaggcggtagctttgcagaacggctgtgccgacgagcgtgggcaaatcatcggcgcgcagaacgggcagcgcggcagtggtgtttatgccgtaaagaccgtttacaagctgcagcaaattcacgtctgccgcggccccgctgtattttgcgccgtttgaaagctgcatgaagcgttcggcggtgagatccgtctgtaacaggacgctttcggcggtatcttctgcgaggaaaactttggcggtcgggcgggaatcgtagtggcggataaagaaatccagttgttcggcgataccgctttctgcgcattgcataccgaaaaggatggcggcgttgtgcgaatacagcggcgtgcggccgctttcgagcgcgattcgactgagcgcttcggggacggtatcgccctcaccggaaaaggtgctctgccctccgtcctccgtcgtttcggaagtgagcaccgtcacgcggcagccggttgccgtgcggtctacgccgattgcgctgatgagcaagcgctcgtaaagctccggtgcgcagcccgaagcggtgagcgtcaaaatgagcgaaagtaaaacggatgtgagtgcttttttcatgcggcgcgtctcctcttctttttgatgcagtcgaaaaaccaaagcaaactcggcagcatagcgccggtcaaaacggaaaacggcagcagatacgcggtgcggaacacggccccgacgcgtgcggcggagtctgtgagccatagggacagaactgctgtcagcgcggctatgagtgccgtcagccacgcgcgcgggcgtgtcgggataggggtcatgcacacggcgatgcagaataatccgcaggcaatacgcacgatgagcgccatcatgctgatgccgatgaaaagcgcgtccagccgctgaatgccggcaatctccgcgatggaagcgagcgagtatgcggggaaaacttgcagcgcggcgtactcgccgagacacgagacgatgaaaaacagaagcacacccaaaaacacggtgatgccgccgttccaaacgacaaagccgagcacgcggtggctttcaccgctttttgtatccgtatttgtgagaaacggcatcaaaacggcaaactcggcaagcgaagaacagcgcgctgtgaagacgagaaacccctgtacggtttggtctgtgccgtcatagaaaagcggcatgagataatgcggcgtgacgttcggcgagacggcgagaaaaatcatccccataccgagcatgaacagcgtgaaaatgcataccgaggcgcgcgagacggtttctataccgcgaatggcaccataaagtgcgatgccgagcacgacaaggacgatggaaaaacgcgaagcgacggggtctgtagtgttgacgagcagcgtcagaaaaagcgaaagactgaaaatgttcatcactataaaataaagcgcgtaaattgcggacatcggtacagaaacaccgcggccgcagttcttctctgcgatttgcagaagcgatgcttccgggtggcttttgtgcagcacgaaaagcggcagagaaaacaccgtaaggtacaaaaacagcccgagcgaagagaaaatactttcaatcaaattgctgccgccgacggtttgcacattgattgtgatgctgacgataacgcgtgaaagaaacagcataaggtaaagctgcaaagcactgatcttggttttcacaggtgcttttccccctttcccgcgccgggcatgtgttgtacggaggcgttatgacgcactaatcgtttccatcccgcgcgtacaagcacatcccgcatggcggaaagccgaaatggtgcgaccggggccaaaaacggcacggaaaagcttgttttgccgcaaagctcgaataataaaaacgtaaagcctgcaagcacgccccacacaccccatataccgcccaccaaaataaaagtaagacgcagtacagccatgggctcgtataatttcggaaccgtgtacccggtaatgaccgtgacggcgatgacgacgagcgacggtgcgctgacgagccctgcggaaacggcggtctcgccgatgacaagaccgcccacgatgccgacagagctgccgagcggtttcggtacgcgcagtccggcttcgcgcatcagttcatacataaagtaaagcaaaatcgcttctaacatgacgggaaacggcgtactgcgctctgcctgtgcaatggtaacgagcagtgtttccggcagtagctccgggtcgtgtgcggcgatgccgacatacagccccggcagaaaaatcgcgaggaaaaacgcgatgtatttcagccagcgcgtgaacgtggcgtaaaacggacggtttgcgtaatcgtcggcggtttgaaagttttcaacgaagagatacggcgcgtaaagcgctgtgggcgtgccgtctataagcagcccgatgcgcccctcatgcagtttgccgcataaggtatcggggcgctcggtaaagcctacgcggtcaaaaatcgcgggacgctccaagtaacccgccaaatatcctgctgcgagcacgtcttttagattacatgcggaaagccgctttttaagtgtgtcaatgatcttcgggtccgcgatgttttttaaatagcacagcgcagccggtgtttggctctcttcgccaaccgtcaccttttcaaatttgagctcagtcgttttgaggcggcgtcgtaaaagcgaaatgtttgtctggtaggtttccacaaagccttcgcgggagccgcgctgcataacttccgtatcgggctcatccaccccgcgcgcagcaaagccctgcgtgccgaacgcgagcgctgtcggacagttatcgagcagcagcaccgcaaagccgttcatcatgcgttcgagcacttcgctgacggtggaaagctcggcttgctctacggcgcacagcacgttttcttcgataaacaaaagcgtttctttaccgttttctgtcggaattttcgcgcgcatcaacggatttaaaatgctcaaagtaatgtgctgcttgctgacgagcccgtccatggtgagcagcgcggccggtaccgtgccgaccataaattcgcgctcgatataatccatggcgttttcaaataacccatttatatatgttacgttttcctttaagtgttcagataagttttccattagcagtttcctttccgcatggttctcctgtgtagattttacagaaaggccgtattttatacgctcgaagacgcataatagcgacgaagacatacggaaaggaaaacgccatgtttatttcgtttgtgcgcacgatcatcttgtattttacgattattttggctgttcgcgttatgggcaaacggcagatcaaccaactgcaaacgagtgaattggtcgtgacgctgctcatctccgaccttgcggtgatcccgatgcaggacagcggccagccgcttttcagcgggctcatccccattttggtgctcattgcgcttgaggtgctcgtttcggtttttatgcttaaaagcagccgttttcaccgtttggtgtgcggcaagccggtcgtcatcatcaaagatgggcgtatcattcaggaaaacatgcaggagctgcgcatgagcgtagaagacctttttgagcaactgcggcaaaaggatgtttttgtgctttcggatgtggcatatgccattgtagagacgaatggcacgctgagtgtcgttaaaaaagccgccgtcgattacctgcgtccgagcgatatgggcgtgaaagtgaaagacgagggccttgaagtcgttgtggtgagcgacggagacctttctgtgggctctatgcacttgtgcggcaaaaatgaagagtggatacacagcatattaaaaagcgaagctgtaccgcttcccgaagtgtttattctaacggtaaacacagccggacattatactctcattcggcgggacggcagcctaaaaaagggagtgaaaaaatgaagcgcatggccttttcaatcgttttggcggtatttgctgtggcggtgtgtatctttggttactgcaacacggcaagatctgcgaatacactgattgtgtccgcggaaaatatcgaccggctgctttccgacggcgaagcggaaaaagccttggaggaaagccgaaaattgcaggcagactgggagaaaatacacgataaactgtgcgttttcctgccgcacgagcatttggagccgctggaaaacattttcgccgtgctgccctattatattgagcaggaggaggtgtccttagcgcgcgccgaatgccagatggtgaaaaacacggcggagcacattcaaaaaacagagcgcatcgcatttgaaaatgtgttttaaagcaaaaaacagcagccccatatcgcgttgggactgctgctacataatctgaatttatcggttgcgctcggccttgatcttattgagctcgtccatgaacgtattgatgtctttgaattcacggtaaacggaagcaaagcgaacataggcgacttcatcgaccttcttgagcttatccatggcataagtgccgatgagcgtggacggcacttcacggtcgagcgagttttgcaggagcgtttcaatctcgtctacgatgcgctccagtgtttcaagcggtacggggcgtttttcgcaggcgcgcagaaggccgttcaacagcttgttgcggtcaaaagcctcgcgggatttatctttttttacaacgaccaccggcacagtctcaatgacttcataggtcgtaaagcgttttgcgcagtttaagcactcacggcggcggcgaatgcgctccccctcatcggttggcctggaatcgatgaccttactttcactgtatccgcaatagggacatttcatggaaaaccctccaaagttctaacacaccaaatctgtctcttaaagtagtgttattatacaacagttttcggggaaaaatcaagcgaaaccgtatacttttttctattttgaccttaaaatcggaaagaaatgtcaaatctctgcgattttcgcccgcagggcgtgattttgtcccgttttttgcttgatttgaaggctatctttcggtataataaaacggaatatgaaccgaggagaacaactatggcaatacttacggtgaacaacataaaaaagatgttcggcaccgatgtgatcattcaggatattacatttgaagtgcagaaaggcgaccgtattggccttgtgggcattaacggctccggaaagacgacgcttttcaaggtactgaacggagaatatacggcggacgaaggcacctttaccccggcgcgcgaaacgtccatcggctacatggagcagcatgtttgccacgatatgaaaaaaccggcgtttgacgaagtgatgacggtgttcgcgccgctgctcaaaatggaagcagagatagaagtgctcacgacgaaaatttcggaaatgccggaaaaccttaacgagcttatcgaaaagcaggcggagctaaacgatcgtttcatcgcagacggcggcctcacctgccgcaaccgtgcaaaaagcacactcatcggcctcggctttgcgccggagcagatctatgctcctatcggtgttttgagcggcggacagaaagcgaaaattcaactcgcaaaaatgctgctcggcgaatcgaatttgctgttgctggacgagccgacgaaccaccttgatattccgtctgttgaatggctggaggattttctgaagaattacaacggctcgtacatcgttatttcgcacgaccgttatttcctcgatgctgtgacgaaccgcacatttgagattgaaaacacgcatttgacagaatataagggcaattatacgaaatatttgcagctgaaagaagagaaccgccttgcgatgcagcgcgtctacgataacacccagcgcgagatcaagcgcattgagggcatcattgagcagcagaagcggttcaatcaggagcgcaactatgtgacgattgcgagcaagcagaagtccattgaccgtttgcaggcgacgcttgaaaagccggaggatgatccggataccatcaaatttcagtttaaggcgagccagcgcggcggcaatgatgttctggaagcggaagagcttgccctctcattcggcgaccacaggctctttaaaaatgtgaatctcgatatcaaacgcggcgaaaaggtgttcctcatcggcccgaacggctgcggaaaaacgtctttgctgaaagtgctgttgcacatttataagcaaaccttcggcgatttccgctttggcgcgaatatcgacatcggctactacgatcaggcgcaaggcaatttagatgagagtaagacggtcatcgatgagatctgggatctgcacccctacatgacgcagacgcaggtgcgtagcgcattggcggtgttcctttttaaaggcgaagacgtgtataagcccgtgaaagggctttccggcggcgagcgtgcgcgcgtgctgcttttaaagctgatgctttccaaagcgaaccttttgatcctcgacgaaccgacgaaccacctcgatatcggctcctgcgaggcgcttgaaaacgcacttttgggctacgatggcacgctgttcgtcgtttcgcatgaccgttatcttatcaacaagcttgcggataaaatctactatctcaccccttccggcacaacgctgtacctcggcaactacgacgcatatcttgaggcccgtcaaaagcaggaagccgcaaaagccgctgccgaagcggaaaatgaaaacgctgtgccgaaagccaatacagtctataaacaaaagaaagagcgtgcctctgaaattcggaagcgccgtgccgcactttcgaaatgcgagcgcgagatcgaagcggcggaagcgaaaattgacacgctgaacgagcagctttccaaccccgagacggcgagcgattacgaaaaaatgatggaaatcacgaataagatcactgagcaaaaggcgcttgcggacagcctgatgaacgactggacggagttgacgctttggctggaagaaaacgacgtgtgacgaaaggaaattaaaatatatgatgaaagcaaaggtcatcaccctcggctgcaaggtgaaccagtatgaatcggaagcgatgctctcttcccttttgcagcacggctttgccgcagcgaaggacaaggaaacggcggacgtcgtaatcctcaactcttgcacggtcacggccgaaagtgaccgcaaggtgcggcagatttttcgccgcgcgaaaaaagataacccggatgccgttatggtgctgacgggctgcatggcacaggcgttcccggaggacgcaaggcgactggaggaagccgatattatcctcggcacctcgaaccgcaagcgtctggtgccggatctgctggcgtttctttctgcacgccagcgcatcatcgacattgcgccgcacacgaacgacgaaaaatttgagaatctcaatgtggagaactttacagggcgcacgcgtgcatttgtgaagattgaagacgggtgtaaccgcttttgctcatactgtatcattccctatgcccgcggccgtgtgcgctcgaagccgcttgaagacctcaaagcggagcttgcggggcttggcgcgaacggctacaaagaagtggtgctgacgggcatcaacctttcggcatacggacaggagttcggtctgcatctgtgtgacgccattgaagcggcctgcgctacgccgggtattgagcgtgtgcgcctcggctccttggagccggagcagctttcggaagacgtgatccggcgcatggcaaagcagaaaaagctgtgcccgcagttccacctctccttgcaaagcggctgcgatgcgactttaaagcgcatgaaccgccactacaccgcagacgaataccgcaccatcgtgcgcaacctgcgcgcagcgtttgaaaatgctgccatcacgacggacatcatggtcggcttcgcgggcgaaacggatgaagaatttgcggaatctttggcgtttgcagaagagatcgcatttgcgaaagtacacgtgtttgcctattcccgccgccccggcacccgtgcctatgacatgggcgatcagctgacgaatgccgtaaaggaagcgcgcagccacgagatgatccgcgtgacgaccgcaacgcagcaggcgttttttaaagcgcaaatcggtcgcacggaggaagtgcttttcgagcgcgagattcaaaaaggcatttgggagggatactccatgaactatacacctgttgcggtggcaagcggtacgtcccttgcgggcgagatccgctctgtgcgcattgagagctgcaccgatacgcactgcatgggtgtcgtgttgtaaaattcacctcgaaaggaggcgaaaaacggagatttataaggatattcagccgtttttagatgaaaacggtcggctgacgagctttccgacgaaaaagcgcaagcagcggacggcagccgataccgtaagcatgagggaattccctctctatcggaatttatcgagaaatacatgtaaacaaaaacgaccgaaagcgcggtgcaaaggctttcggtcgtttttgcatatatttaagtttagaaaatcaaatttacgagcatgccggtcacgacggagcaggcgtacagcgtaccgacgatggcaagattctcttttacgcggtggtttgtgcggaacagcacgacgagacccacgcccgcaccggcgcataagcccgccacgcaggagccgaattgcaggctgcccagcgtgaacagctccgttaagatcacggatgccgcacagttcggaatgagtccaatgagcgccgtcaggaacggctgaaagacgctgccgtttaaaagtaagccggaaatgcggtcttccccgataaaataaatggcatagccgagcacgaggtttacgacgaggataaagagaaaaatgctgattgtgtggtgcaaggcggagtgcaacaggctgtggtggtcgcagtcgcagtccgcgcacagctcctcaaacggcttctcttttttagggtggaaaaagcgctgtaaaatgaggtcggccagaaagccgaacacgatgccggaggcgactttgatgagcagcatcggcaaaatgtactgcatctgctccgggtgtgagaacagaatcggcagggcttcatcgcttgtggaaaggaacacggcgagcagtgtgccgactgtgatgatgcgtccggcgtagaaatttgctgccgccacggagaagccgcactgcggcacaacgccgaggagcgcgccgccgatggggccgaatttgccgagcttttgcagaccgcgttccattttgctgcttgcacggtgctctaaatactcaatgagaaagtacgcggcaaacagaaacggcagtgtttttaacgaatcgatgagtgcgtcgagaaagacatccagcataaataaatcctttcaaggtagaggtagcccgtcgaaacgacgggattgcgatgcccgaaaacacaaaaagtggtatacaggcttcgagccagtataccacaattttgacggattgacaagtaaaaatcaggaccaatttttaccagacttctgcgctttttgcgcaatgttggcgcacttttgctgcccgtacctctacaaagcagccgcacagcgcacacatgccgttgactaagtggtcgcatgatgtgcatttttgcaaacggtctttgtaaagtgcatccggggttttctgctccgggggaatgttttcgatatattcgtagatcgagtgaaaataatctgtgtcgctgaggtctttcagcaaacaccgcctgcagggaatgcgttccatcaggaaattgtgatttccatgacggcgcacgccggaatattgaagtgcaggttgttgttttcaagcgtcagcgcgtcgaaatccgtaatcttgacgtcttcgggatggtcgaagtcgttgtatgcgccgatggagtttgtcaaaatgcgtgcagatgccgtattgtacttcttgccggtcaacgcacagtcgatcgggtacgcggtgtcggcggaaatgttcgcgagcgtgatatgcacgacgccgttttcgtcttccgaggcggaaaccgtgaggttcggtacgtcggcgtagaccccctccgtttcgaggtggctattcaaaagcgttgcatcgtgatggtgcttataaagatcgaatacatgatatgtcggcgtaagcaccattttctctccctcggtgaggatgacggactgcaaaacgtttacaagctgtgcgatgtttgccatgacgacgcggtcactgtgtgcattgaaaatgttcagcgttacagcggcgacaatggcgtcgcgcatggtattctgctgatacaggaagcccgggttcgtgcccggttccacatcgtaccatgtaccccactcgtctacgaccaggccgactttgtgctcgggatcgtaatggctcataatctccgtgtggcgcgtgataagctcgtccatgtacagtgccttgcgaatagtctcgtaatacgtgttggtatcaaagcctgttgcagctgtttttttctcaaatgtgcccggcacggtgtaatagtgcaggctgaggccgttcatgtagttgcccgcaatgcgcatgacctcttctgtccagttgtaatcgtcggcgatgcccgggccgcaggcaatgcggaacacgtggttgtcgccgtaatcgcggacgtaggtctggaagcggcggtagaggtcggcataataggacgggcgcatattgccgccgcagccccagttttcgttgccgacaccgaagtatttcactttccacggctcggcatgaccgtttttggcgcgcaggtccgccatgggcgaaatgccatcaaacgtcatgtactccatccactcactcatttcctgcacggtgccggagcccacgttgccgttgatgtacggctcgcagccgacctggcggcagaactctaagaattcgtgcgtgccgaaggtgttatcctccacaacaccgccccagtgcgtgttgaccatctttttgcgtgtctccttggggccgatgccgtctttccagtggtattcatccgcaaaacagccgcccggccagcgcagcaccggcagcttaatagctttcagcgcttccacaatatcggtgcgcatgccgtttacgttcgggatatcactgttttcgccaacataaatgccgttataaatgcagcgtccgaggtgctcggaaaaattaccgtagatattgcggctaatcttgcttttcttttcgtcagtatgaatggaaagttttgccatttcaaaattcctccacttaaaatcggcgataagcatcgccttgtgtatgttcaatatagcatacgagagtacgaatgtcaagagttgtacgtacaaatatttatcggcgcgcgtcgaccgtccaatgctctgtgatgacatggttttccgcgacgagcacttcgctgtacaacgccgtcgttgggcagatgtgcgtcgggatcacgtagaaaacgtcaccgatcttcggacgctcgttttcaaagccgggcttcatgcgccatgtccagtgctcttcgctttgaaacatcggctcggcgttttcaaggccgacaactttgccgcgcacaccgggcgggtcgcttgcaatgcccttgcagccgaggtcaaatgtgaacacgccgggcgccgggtgactgatgacacgcgtgcaaacagctgcggcggggatgtacggcaggtcaggataattttctttgtagctgctgtcccacaaaaacacggtaccgggcgacaaaaagatatccgggtttgcggcgtgacatgggaacgacggactgccgcccgcgatgatcatcggcacctcaatgccgtcttcgctgagtgcatcgagcacatcggcaatgctttccaccatgtccgttacctcggcttcgcgatccatgaggtcggtggtgtgcacgtggccgtcatagcaatgcaggccgctgaatggaacattttcggacggattttcgagtgctgctttgatgaattcgtaaagatgcgccgtttccacgccggtacggttcatacccatgttgacatccgcaaaccagccgagcacagcattttgcttttcggcttcggcttgaagcgcatgcaggcagcttaaatcatcttccagcgcgtagaaatgcgttttggggaattcttttacgagcgagataaacgctttgatattcggcccgacaggcgggtaggcgagcaaaatgtgctctgccccgcattcggcaaccattttgacttccgccaaagtcgcgcacttgaagcgatgaatgcccatggccatctgcatttcgaccatctttttcattttgtgcgacttcacgtgcggccacagtcgctctgccccgccggcgatttcgattgtcttgcgggtattttcgaaaatttcgtctttatagtagatcaaagcgggcgttaaaatgttctctacgccttgtatcgtatagagctcagtctgcatttgtgcagtcctcctcaatttttttattatattcagtatacgctggtaaaattgccctgtcaagccttgataagttctgcatgcagctgtaaaattatgctgatttcctatgattgggaggtatgcgttatgattttgtttcgtcatgcgcagatttatgacggcacgggccaaaagccgtttttaggcgatgttttggtaagaaacgaccgcactgcggaagttgggcaaaatttggaggtgccggaagatacaaaaattttggaggcagacggcaagctgctctgccccggctttatcgatattcaccgccacgccgatgtgcaaacgcggatttttccggcagaagcgaatttgctgtaaaggatgatgctcttacgagcgctgtctccggcgagtttttacacgccggaacagggtcaggttttcgcacgcgatgcgattacgattagccggtagtcgcaaacggcgcgacgaagccgctcggcgaagagatcggcatgaacgtgctgccgggcaacctgcccatcgagattgaagcgatttttgagctgtacgaataattaaaaatcgcataaaaacaggtctgcacacaaagaagctgatccgtttttctgtacgaaatagggcttaaacctgcacatctgccggttccggcacatcgtcgttgatgatggacttcttcttccaacggcccatgcggaacgcgatggaggtaagcacggcacccatgacccagcttgtgagcagggagatgaacagcgcatctgcagagtgcatcagtgctgcgaggccgtatgcgatcggcacacggataacgacggtcgtgatgagggagatccacattggggtcatcgtatcgcccgcgccgcgcataacgccggaaaggatctgcgtgacggccattgcaatgtaaccgatggcgagaatgcgcatcatgtgcatgccggtatcaatgacttccggcgtgctcgtaaacatttccatgagataacggccgaagaacagaatcagcgcaacaagtaccacggaaacggaaaggccgagctttaagccgtcctttgtgcccttttccacgcgatccaaacgacctgcgccgatgttctggccggtgaaggtcgtcgttgccgtgccgaaagtgaagttcggcatcatggcaaagccgtccacgcgcataacaacggtggaaaccgcgatgatcgtggtaccgaagctgtttgtaagggactgtacgaccagcatggcgagcgagaacaccgcctgtgtgagaccactgggcagacccaaacggatgagctggaacaaaagcgcttttgtcggccacagggtgcgccacgtgatgtgcaacacgtcacgcattaagagcagacgcacaagacacaggatgccggagactgcctgcgagatgatagttgcccacgcagcgcccgcaacgcccattttaaagcccgcgacaaaccagatatccagaccaatgttcatgccgcatgccacgagcaggaaaatgagcggcatgacggaatcgccgaggccgcgcagaatgccggaaataatgttgtaatatgcgctgccgagaataccgaggaaaatgatgatgagataatcacacgacatggtgtaaatatcctgcggtgtttgtagtgcagacatgatcgggtgtgtaatgagcgggcccacgaccatgatgaagatggaaaccacaaaggttgccgtgatcgccgtacctacagaatgcgaaagtcgctttttgtctttcgcaccgaaatactgcgacgccatgatgctggcaccgaccgatacgcccatgaacagtacgagcagcaggttgatgatcgggccgctggcaccgatggcggccaacgcgctgtcacccacataattgccgaccacgatggagtccaccgtgctgtacagctgctgcgccaagttgccgatgagaagcggtgtggaaaaccgaatgagattcgtcgccggattgcccaccgtcatatcctgcgctccgaaaaatgcagagagctttcctgccataataaaaaatatcctcctcgccctgagatatactcgaaatttggtgattttgcaagcatatagtcttacaaaatcacttgtgttttattgcttccgaatattctccaaaaaaatttaatgcttaacagtatatcaaaaaaggcgaaagaggtcaattaaatacaaagaagataattaaattttggtgttttgccgaatttaatggttgatttatagcgaaattagcagacaatttcgtcagagattcataacgcggaacggtgtgtgaaaatgcgcttctcccctattttgcggcgaatgtattggctttttgcagaacggtcattgccgttctgcgccagatgacgaaaagaacgcggcgggcatcacaatccagcgcagagccgagcacggtaaacagcaaaaggctgaatatgcaaaatacggcggctgataggagcagcgctggatatgagttgagtggaagcggcagagcttttgcggaaaaccacagcaaaacaaacaacgttccgctgcataagaattttcggtaggtgtgccgtgcgggtgcatgcagcagcttgtgggatgcgtagaaaatcatatcattcgtgcgatacaaaagcgctacgattgtcccgatgagcacgccgtacatgccaagcggcaccacaagcaaaagcgatatgagaagattaatgacggattcgatgacggaacggttctgcgttttttgaaaatgcccggcgtattcgatgacgcgctgcgcggctgcacgtccgtttgaaagcaggtacgtgcagacaaaaagatgcggcaaaacgggatcgagatacgaaatatccgtcacaccggcggtgtagagcttcaaaaacggcagaatgaacacatccgccgtgagatacagtgcaaatgtgagcgccatattgtatgtttcaaatgcgcggtaaagccgcaaaaaatgcgcgcggtcggtgtgataggtttgccccaggacgaacgacacgctgccgtttatggcggagaccgccgtgccgaccatgccgaaaagcatcacgtacatggagtagacgctcgttgttttcagtccgcagacgacagagagcagtaaaacatcggtgttttgaaagatgagtccggagatctggtgtacgagcacggcacggtgctgcgcggtggcggttgtatcgggcggcacggcgcggtcaagccagctatactgttttttggcgtagagtgtgagcagtgcggtttgcagtaagccgcacaaaaagcagagcagctgtacggcgatgagcgaaagtccgcaaattagcagtatgattttgccgatgctgatggaaacagttaaaagcaggttggcgttgatgagcacgtatcctctgccctctgcctgcaaaagcacgcggtattttgcctgaaacagaaagcgcacggcttgtcccatgccgccgagcaaaaccgtgagcaatacggtgaaaaacggcagatcggttttgatgaaaaacggaaacagcactgaaagcccgcaaacgagtgcggcgtaagcgatgccgactttggcatattcccggcgaatcgcattgaagataccgctgacggcggctctgtcctgttcggcggcgggtttataaagtgcctgcagtgctgccgtgccgataccgctttcaagtaggtcaagatacacgagcgcctgctgtgtagcggagagtaggccgttggcttcggaaccgagctgtacgagcacgagccgcggaatgataacgccgagtgcgacggaaacaaactggctgaaaagcccggaaaaggcattgaaaaagcaccttttggcacgcatggctactttacaaacacgtcgcatagcgtgcggatgatacgctgatcccgccagcgcagatagcggcagcccgcgtgccagatggtgcgcaaagcgggcaagatgacgctgccgttctccggcaggtccttgagcagctgcggcgaaacggcggcgtttgcctcgagtaatagtgcgagcagctccgggtcttccgttttcaaaaagcgctgggcgtaaaaatccgcttcacgcatcaggcggtcgcagcacagcgtgtgaatttccggcaagtcttttttctttgagagcttcagctcagcgatgagcccgcgcagataatctttggtgcaggcgagcgtgatacgtttattggaatgcgtgcctttgtagcggtaaaccacgtcgggaacggcgtagtattctttggcttttaaaagcgtgcagagaagaaaaatgggatcttcatagacacgcagcggcggaaattgcagcttgttttcaagcaaaaaattgcgattataaataaagcgggcgaaaaaacggtcgagcggctcatcgcaggcgttatgaaagccttcttccgtgaaaacaaacatggggtgcacatcgttccccttggctttttcaatagagccgccgcagaccatggcaccgcttttttcggcggcagccaaaagcgtttcgagcgcatacgggcccggatagagatcatcggcatcgagaaatgcaatgtactccccttttgcctccgctatgcccttattgcgcgccatgcctgcgccggcgttttcctgcgtaaggcaccgcacgcggccgtctctgcgctgggcgctcgttagaacgtctgcggaatggtctgtggagccgtcgttgatgcagagaatttctatatctgtgagcgtctgcatgaaaacgctgctaagtgccgtttcgagggtgtcttccgcgttataaacgggcacgatcaccgaaattttgcacatagttcttccctccttcataaaacttaaagcacagcttgtgcagcacagtgcggtttcgtcgatagagctttttaatatcgcgcgtgacggcaccgtattttttcaaaatggcatattgttcctgcaaaagcactttgttccgaaaatcgattgccgtgtaaaagcgctgcaaggcgtatcgctttttgatctcgtctaaacacttttggtactcggcttccggcattttgatctgcttagcggtttgaagcaagatcgtctcgtactctgcgatgcggcgcagcttgtcggtttcggttatatctcccgcagacatgccgttttgatattttatatagccgtaaagcggttcgtctaaaaaagcgtgcggaaatttgtaacacaccggcaacatgagctgataattctgcccgcgccgcgcggggtagatcatgcggttcggcacggcttcatcaaaacagcgcatgcggatcatgtggcagccggcgcacaccatgccttcgccgcgcagaagataccaaaactgcatgagttcaaaacggtgcgaaaaccgcgcagcctcgcggtagagcggcattttgaggtcgctctcgtcaaaaacgaaggcgtcactgctcaccgcgccgcacgccgggtgctgcagcaggtacgtagcgcgtttttcaacagagcccggtaataaaaaatcatccggatctgcccagcagagaaaatcaccgtgcgcgtggagtagccccgtctgtatcgcgccgccaagccctatgttttcctgcgtcaacacagtgtactgcacgccgctttctttcaaaatcgtctcgaagtttttcagcagctttgccgtatcgtctgtcgaaccgtcatcaatgcagatgagctccaacgggcggtaagattcgcttattacggagcgcatgaagcggtcaagtgttttttcacagttatagcacggcagaagcagcgttacgagcggtttttccatcttttccctcctgcaaagtgcggcgaaacgcttttaaagcgtcttcatatgcggccgttttggcacgcagcgtttcggtgatctccggcgcatggctgcgtaggcgtatccacctgcgcgtgacggcagtttcatccgcaatgttttcaatgggcagcacatagggcgtatcgacaccgaaaatgtcttctgcaaggcctttggcttttacagaatacccgagtgcgagcgtgggtacgccggaagaatacgccgcgatgacggcatgtgtgcgcgcgccgatgaacgacgagcacagcgcaataatcgatttaagctgcgacgcgctttggtctttgatgaggcatacgcggccgctgccttgaaaggcagcgtataattctttaagcggatcacggtcatcattgccgttttgcacggcgtgcgggatgagcgccacggcactgtctgttgtgcgcaggattgtgccaatcagcgcgatgaggttacccaaaataagctttgcgtttcgtgcacggcgcagtaaaagcgggcttacattgatgccgacggtgttgtgcggctgaaacacttccggaatctccgcactgcgcggctccagcaagaaagcggaatccgggcaaaaggagacgtttcgcagcccggcgctttgcagcgcgtgcagcgtttgtgtctcgcgcgctgtgatgcggtcaaatgcggtgaggtcacgtagcagagccttactgcgaagaagtttcggttcaatcgaacagccgagcagtatgctgccgcctgcatagcgccgtgcgaggttgtgcagccgaatgtgcttttgcatatcttcgtagcagtacacatcgccgccgatagagacgagaatatcgtcgcgcgtgagcgtttgcagcgcggcacggtacggcaagacatcgagcggtgtgtaatcgtttaaaagctttaagcgcagataggcgctccaaaatgcgggcgagcttttgcggatcacatcgcttcgcgcggggcgcacatcctgcacaacgagcgggcgcgctacgccgtatctggcatcttcctccggcgcttcggaaagcagcaccgtgcggccggggcctaaaagcttagaaacggtgcgcacaagcgcttcgcacccgtggtttgcgctgccgatgtggtcatgcagaatgtaacgcacgcgtattctcccctttcaaaatcgattttgcgtgttttgcggcgcggtatgcggcaagatgtagctgcaatgcgggcagattttgctgctttaagcagtgcacgatgcatcgaaaaatgccgtgaagctccgcttcggaaagcagtgcgcaaagcgcttcatcttccatgatctctttggctttcgcgatgggatcaagcccgatatccggcgcgtaaaaaacggagaatgccgtgtatgcgctgagttttttgcgaaaaaacggcttaaattccgtgtgcttttgctctgtgatgacccagtgcgcaatctctttttgcaaaaggagctgcttaaagtggtctgcttcccggcgcagcgggtgcgcggcgtattgcatggcacagtgtggcgtgaggagtacgcggctgtttgcgcggtaaagctgtactaaaaattgcagatcctcagcaagcgtcatggattcatcaaatacagcgttgacggaaagaattttctcgcgacgcagaagcttgttccaaagatagccaaaatacccggtttcgtactgtgcttgcatgaagcaaacgggaagcgtttcagaatctatgagaccgtattttggtagtgttatgcgggtaatctcaccgtttaaatccatttttaggtagctgcccatgagaatgtctgcgtcgtttgactgcggctcatgcagggctttttcgagaaagttcaaaagcggcaggtcgtcgctgtctacaaaccacacccactttccggtggcggtttctaaagcgaggttacgtgcgcgggaaacgccgccatggtgttgcgcgagtatcgtgatacgcgcgtctgcagctgcaaagcgttctaaaatgcggcgacttttatcggtggagccatcgtctacggcaagcagctcaaaatcgcgaaacgtttgggtacacagcgtggaaagcgttttttgcagatgcctttcctcattatagacgggcagaatgatgctgacttcaggcatagcgctctctcctttgcagccacaggcacataagcggcgtgcagcggtattgcatgcacaaaagctgtatggcaagtttaaacggaatatgtcgcgcgggtcggttttgcagcgcacgtttcagcgcttcgtcgtttaaaatgcggtcgatttccgatttttgttcgacctttggcaaagcacagactccgccgagtgcggcgcaggcataatgaatgatgtgtaggtcgagttgacggctaaaatcgtattccgggcagttttgaaacagtgcgcacagcttttgatgcatacgtttgtagctttcccacgcatctgctttgtacgttgtggtgatgctgccggggttgcggtggtactcgtaaagcccttggcccttaagataaaagaacgaagcggcgcggtatcccgcacatgcgctgaatagattatcttcggaatatcgcacggtttcgtcgaaccgcaggtcgtgttcttttaaaaacgatgtacggtataaacaaacgcacacggataaaagcgggccgtattcgagatcatcgcgcatgatgagctgcggaaatacgcagcgtttgattttgcgtttgtcgtaatacccgccgtggagcgatgcagagcgcagcgtgggcggcttgccggattctatgcgtatgaggtcgcagaacacaaaatcacagtgatactgctcaatcttctgcaaaagcgtttcaaaaaatgtcggcgatacggtgtcatcggcatcgacaaagccgatgaatgccccgcttgccgcaagcagacccgcgtttcgcgcactgctgaggccgccgtttggcttatgcaaaatgcgtatgcggctgtcctcttttttgagccgcgcgcacagtatggagcttgcatcggtagagccgtcatcgataagtaagatttcaatgtcgtgaaaggtctgtgcgatgaggcttttaacgcaccgctcgagatatttttcggcgttgtagatcggcacaatgacgctgatcttcggcataactttcccttccttctgcaaatctcaggattttctccgcttctttatactgtgtgaaatcggtgctgcgacaggcggctttgagtgcttcttgtttttcgttgtcttggatcagcgcggcgagagcatctgtaaaaccgtcaaaatcaagcggcgcgatcatgccgtctgtgccgtctcgcagctggctgtgcgcggtggaaaaatccgtgatgatgacaggcttcccgagcagctgcgcttcccgcacggcgacgcatttgccctcataaacggacggctgcacgtaaatgtcgcacatacgcatgtaggggtacgggttctcctttttgccgagcagcacgacgaaatcttccatatgcacagcttgaatggcttcgcgaatttgggcttcccggtcgccgtagcctaaaatgtaccacttaacggaaaggccgcgctttaaaagcactgtgcagattttcggaatggcttcaaagtttttcgcttcacaaaaccgaccgacggaaagtaacacggtctcgcctgcttcgcgatacatgccggcagccggcagcagcgatttgcgctcgatgagctcgcgcgcaaggcagttttcgaccgtgacggctttttgtgaaaacgcaggatacatgcgccgaaaagcttccgtgcagctttcggaaacactgacaacatagtctacgttcgtatacacacggcggtcaagctttggatttgggtgttgtgtggcgtaatccgtgtggttccacgcgactttgtacttggcgtttaccttgtgcacaagcgtatcggcgacgccgaggtactgcgcggcaagatcatactcgcccgggatattcggcaaaaacggctgcaaaaatgcagagatatactgcaagtgcgtccacgtgccggtgggttttcgcatgaaagtaccgtacaaaaaaagcgcgagctttgcgagtaatcgtgcggctgcaaatcgcagtctgccatgttttacaagcgacaagatcggctctgtataggcgtggtatgcagggatttccggcagcagacgcacatattgcggcaggtcttttatgaattctccctcgcggcggtacagaaaaacggagacctgcacgcttttgttttcgagcgcttccaacagtccgataaggctgcgctctgccccgccgatctccaaagacggcaaaataaaaagcagttttttcggttccgttttaaacgccgcctttcactttttctttgatacgcggatggtcggcgagcaggcgatgcagcgggcgcgtgagcttgctgcgcagtacggtgcggcggttcatccagcttttggcgtaccagtgcacggcgtaggtgcagtctgtgatataaagccgccccgtggcatcctcgtaggggttaaaatacgctttgggaaagacggctgcgccttgcacggtttgtcgcttgccgtttggctttaagccgcattttaaaagcgcctgtgtattgagctgcgggcagccgatgacgccgtgcttgccatcgagcaggggtgcatattgctccagcatgaagtgcacgagcggatggtgtttttctgcgccgaagccgaggccggtcgcaatcatacggtcggtctcaaaggcaaaaaacgcgtgctcgctgcaaagcgggtccaaactgcgcacgagctcgacatctacgtcaaagtaaaagccgccctcgttttcgatgatctgcaagcgggcgtaatcggcgagaaacgcgtactttttctctttacagcacatttcggtataaccgttttggtgaatgtcgaagttatcttcgttccattccaaaatcgtatagttcgggcagtgcttgcgccaactttctatgcactttttggctttgtccggcagtggtgcgcgaccaaaccagcagtaatggatgattttcgggatcatacagcctccttttgcgctttgcgttcggtgcgcgcggccatcaggcggatcaaaacggaaagtcctgcgccaagcggtgtgcacagcattgtaagcacctttttcggtgagcggagcatccgtgcaggctctttcgcgagaaaacacgcggcatcgtaatggatgctgtcgagcaccgtgcgcgttgcagcagccgggtacgtaaggcaaagctgccgccaatatagaaagccacgcggattttttgcgtattgcttccacatggtgtgcgaggaaccgtcttctaaatacgtcacgtggcacagcacgcggcttaaaacggcgagtttgtaatcgcggtcgatcagccggtattttgcggcgagcgccacgtatttttcatttggaaactccgggtacggcgggtattttcggatgatgtcggtacggtacacgagctttttgtcgcctttgccgccgcccgcatagtaaccgctgagcgtcgtttcggtgaggcccggcggaaagccggtgccaataagcttgccgtttccgtcgtcatcaagcccgatgagcccggcgtaattcttgctttttatctgtgcccagcgcttttcaatttgctctacggcatcctttgccaaacggtcgtcggaatcaaggcaaaggttcagctcggtctcgatgtgcgcataagcggtgttgtgtgcagcgtgcatgccgccgtttggacggtataggtaacggatggaaaatgctttctccgcctgcatccaggcggagaccaacgcggcggtgcggtcggtggaaccgtcatctacgatgagccataggaagtttttagatgtttgcgcttttaatgagcaatatgcttccggcagcgtgtgtgcgcggttatacgtcggcgtaaatacggtcagcagaaccatgtgcggcttccctccttctttgggcatccttttgcagataatacgcagtgagcatacgtgcgttttcacgaatatcaaagctttgtagtacaggcggcgcggcgctgagcaccttactttccgccaaaataacctccgcccacttagaaggcggtgcggaaagcggaagctgccgtgcacgcggcgtttgaagacaatccttcggtacaccgttggagacaaggcacggtagccctgcggcctgcgcttccaaaacggcgagcggcatgccttcgtacagagacggcatacaaaatatatccattacatgcaaaagtgccggaacatcttcccgcacgcctaaaaacagcacatacggtgtaagaccgagtgcggcggcgcggttttgtacggctgcccgcttttcaccgtcgccaacaaacagcagcttcgattttgtaccgcatgcgcgcagactgtgcaggacatccaagaggaaagcttggtttttctctttgcgaaactgccccacatgcccgatgagaagttcttcttttgtgataccgagtgtgcgccgcatgtcttcgcgcatgtttttatcaaagcggaatttttctgtatcgatggcgaccggcagcaccaaaaacggcgcagtgccgaacatccaacgcccggcatcttctccgcaggcaagcagatcggtcgcggtacgtggaatgatgcgcttatacagatcttttattggatacttgaagtcgcgcatctgatttgtggtgtgtgcgtgagcaatgcgtacaggcacgccgtgctgcttggcgcaaccgagtacaacgccggaaagacaatcaagatgggcgtgcacaacagtatacgccggatgggcggagaaaaatttgtgcagtgcatggcggtatgcggggctgaacgggttttgccgcggcacggtgaaaactttgccgccgagagagtaaatctctttatcgtacgcgccttcccgtgcgcggtgcgtcagaaaatcgaactgcacgcgtgtgcggtctatgtgacggtagtaattcatcagcatcgtttccagtccgccgcggtccatgcaggtgacagcctgcaaaacacgaagcataacggattcccccttttataaaaggctgaaggtcttcagcccgtagaaatagaaaaacagataaaaaatgagcatcatcacggttaaaatgcgcacggagcgttttgaaaacatgtggtgcagctcccatggcagcaaaatgtagttataaagtgaaaagtatatgggcagccgcccgacaaaaatgccgcttgtaaatgctgagaggatgtaaatgccggtcgatacaatggacatgttgacgcaaaggtcgatgagtgggtcattttctgcacggataaaccgtaaaccgatcaaagaaagcaacgtcggcacagcgtagaccagtacgcgcagcaggtttgtaccgttgtcctcaaagcctttccaatcgctgacgacatttttgtactgcgtttcctgcaaaagcagctccaaaatgttagtgaagcggtcgatgaaaagcacgaccaaaacagtgagcagaagaaacaaaagcgtttttcggttccatgcttttccgcgtgtgagaaaaacaaacggtagtgcgaacagtgccgaggcatgcagtgtggcggcaagtagaatgatgagcgtggcttgtccgtatctcttgcgcagcaaaagcggacagcaggcgaatacgagcaccgccgccaaaaattgccgcatgccgttcatcatccaggatatgtaatccgtggaagcaatgaacaaaaacagactgatgcagtagctttccgaataaagccgatagtttttaacgagcggccagagctgaagcgcggcgagaatgcaaaaccaaacgcgcacctgcccgccgcacaaaagcttgatgagtgcggaaagcaggaaaaagccgtgatctttctgtaaagactggatgtaatcgggcagcgcgctgaatgtgctcggcatttcggaaaacgcgtgcatgtagttataggtatcgccgatatcaccgcgcagcgtacagaagatgagcagcggcagcacgccgagtgttgcccagagcttcgtgaaccgcactgtctgcacgccgcagacagtttcgctttgctgtacttccaacacggcggagagcgccgtgtaaatcagaagccaaaggagcatccaaatataaccggacatgtgttctcctctatgccgtgacgcgccggggctgcggtgccgctttttcggcggtgacgatgcgcagtgtttctgcaacaacgctcactttatcgaattcacgctccattttgcggcggccgttttgcccaagggctgctttttgctctgcggaaagcgccaaaaacgcgcgcatggcaacatataggctgtccgcgtcttttgcgcggcacaaaaggccggttttgctgtgctctacggcttccctgcacccgggaatatcggacgcgatgatgggcctgccgacggcggcagcttctagcagcacgttgctcatgccctcatggtagcttggcagcactacgcagtcgcagttttggtaaaacggcagcggttctttttgaaagccgaaaaattctgtcatgccgccggaaatcaggcggtctacctcttgcctgtactgctcctcaaaaaagccgagcagctgcaaatgcacgtgaaagccctctgtccacagcctgcgcacggcgcaaaacagctcctctacccccttttcgcgcatcaaacggccgacgaacaggaatcgcggcggatcgtgagcggtgtacggcgtgtagatatagcggttcaggtctacacctgcaccatgcagaacgacctctttttcgggtgacaggatgtgtctgcggcaaaattctaccgcattggactgattttcaaagaatacgttctgtacacgcagaaacgaaagcttgtaaaggaatgtggcagcgcagctgagccacgggcgctgaaaagcgctgccgagtccctgtacggtggcgtaaaacggaatgcggtagcacgtgcagagaaaacccatgtatacattcggcttaatggcgtatgtaagcacgagatccggcttttccagacaaagaacacgtttgtacgcctgtaaaagacgcaattcagaaagcacctgcacgcgccgccgctgcattttcgtttccgtgcagcgtatgcccatgctttcaaacacttcttcaccggtttgaaacggcgctgcaacgattacctcataccgggattgcagctcttcaatcagctcccgtcgaaagcggtacagcatataaaaatgatttgccgcaatcaatacttttttgcgcctgtattcggaaaagtcttcgcttatcgcggaattttcacgtttttttgacacaaatttgctgaacaaggtcaaatgcagcagatgtgccgaaaagcgcggtgttttgcttttacacattctaaacctccgtatagcaagatgaaatgtatctgtaccggtgctgataccgttattgtacaatgcgagaaaaaagaaagtggtcgaattctttgtgaaagcagacatttatttttgctttttcattgtgtccgtcaagcgaagacgttttactattactgcgggggctttgaatataaaaaagctccctttacgggaaaccgtgcggatgcacacagttcctgtaaagggagcaaaattgcttttatgcggttttaaagcggaagcctgcggaaaagcttactttgcgagcttttctctgatgacctctgcaatatgctctgcagaaaggccgaattccttcagcagatccacagccgggccggagtggccatacacatcgttgacaccgatgcgcgtgacaggcgtcgggcaatgctcggaaagtgcggtggagaccgcttcgccgagaccgccgatgatgttgtgctcttcaaccgtgatgacacggccggtcttctttgcggaagcaataacaagctcttcatcgagcggcttgatggtatggatattgatgacttcaacgctgatgccttcttctttcagtgcatcggcagccttaacggcttcctgtaccatgagaccggtcgcaacaacggtgatgtccgtgccctcgcgcagcgtgatgcccttgccaagttcgaacttgtaatcatcgttgttgttgatgctttccacagccagacggccgaggcggatatagcacggacccttgtgctcaacagcagcgcgaaccgcggcctgcatttcgtaatgatcgcaggggttcagaatgaccatgcccgggatggtgcgcatgagcgcgatgtcctcgcagcactgatgtgtagcgccgtcttcaccgacagagatgccggcgtgggagccgacgatcttgacattcagcttcggataaccaacggagttgcggacctgctcaaacgctctgcctgcggagaacatggcaaaggacgccgcaaacggaattttaccgcaggtggccagaccggcagcaacgccgaccatgttgcactctgcgatgccgcagtcaaagaagcgttccgggtatgcttttttgaagatgcccgtcttggtggcagcagcaaggtctgcatccagaacgacgatctccgggtattcagcggcgagcgcggtaacggtctcgccaaagctttctcttgttgcctttttaaccatttcagccatatcagcagccctccagttcatgcagtgcagcggtgagctcctgcatagcggtctcatactgttccttgttcggcgcggtaccgtgccagccgacctgattttccatataggaaacgcccttgccctttacggtcttggcaatgatgacgctcggcttgcccttaacggtctttgcacgtgcaaaagccgcttcgatggcgtcgaaatcgtgtccgtcgatggtctgtacgtcaaagccgaaagcctcgaacttcttgtcgatcggttccgggccggcaacttcactgaccgggccgtcaatctgcaggccgttgaagtcgacaatcaggcagagattatcgaggttgttgtgggatgcaaacatagcagcttcccaaacctgaccctcttcaatctcgccatcgccgagcagagagtaaacacggtagtctttgttatcaatcttgccggcaagcgccatgcctgccgcagcggaaatgccctgaccgagagagccggagctcatatcgatgccggggatgcccttcatatccgggtgaccctgcagcatagcgccgatgtggcggagctttttcagctcatccacagagaaatagccgcgctgtgccagtgcagcgtaaagacccggtgcgcagtggcctttggaaaggacaaaacggtctctgtccggatccttcgggttctgcgggtcaatgtgcagttctttgaaatagagataggtgaaaatatccgcagcggaaagggaaccgcccggatggccggatttggcgttgtaaacgccttcgatgattccaagtctgactttggcagctgtgatcttaagctgctgcttatcgcatgaattcatggaagcctcctgtgtttttagcgcccggcacgggcaatcccgtaaaaaccgcagcgcgagtcattatggtcttattatagcgcatttcggtggcctttgcaacgctccacgccaaaatttcgcccgttttttcgtgctttttgcatattcaccgtatgtggagagacaataggcacagcggcgcttataaaagccttaatcggtacgtacagcttttggctgcgccggaaaaacggaaaggacaaaacaaaattacaaacggaaaggaacatcgttttatgtctcagaggatcggcaacctgcctgccaatatcaacattatgaaccctgtaccgaacaaggatgcgaagaccatcatgaagctgatccgcacgaatggcaagatctccggctaccagctttcggatggcacggtgctttccaaggcggacggcgtggcgcttgcaaagcaaggcggcatccgcggcgtggcgattgcgagtcgcaacggcagtgagtatctgcgcagcataccggacggcaaggagagcaacaatttaggtgacctcccaagcaccggcctgcgcggtctttcctaaagaaaagggagcctgtacgttttgaaacgcaggctcccctatttttgtttattttgtgttttcgagcgcttcacggtaaatttgtacggcgtgttcggcaacggcgacgctgtcaaacggctttgccgcagcacgaattttggcctcatccagtgtgtccgaccgtgcagccatgcgcaaaattgcatcttccatatctttcgggtcatgcacattgcagaactcggcgcagtcatcgttcaaaaagctctccgggcctttgcaccgtgtagaaatcaccggcacgccggctgcgagtgcttctacggcaggaatgccgaacgtctcaatatccgaagccatcaaaagggcgtcggtctggcttaaaatctccgcaatttcactttcggtcttgcgcccgacaaaggatacaatgtcgttcagcccgagttcagatgcggtctttttataaaacgcttcttcctgcccgtcgccgacaatcgtatacaaaaacgatttttccgggtattgctcccgcaagagcttcaaggcctgcaaagcgtcttctacgcatttgccggggcgcagtgcggaaaccgtcgtcaggcgaaaatgtgccgggtctttcggtttttttgcgccgtaaaatgccttggtgttgacgatgttcggcagaacttcggcaggtatattgtgtttttcttttaaaatgaccgtcatatagccgctgacgcaggtcatcacgctgtgccgtgcagcatagagtccgtattttgcagtgctaccctcaaagaagcgctcaaaatatgaggagtgctccgtgatgacgaccggaatatgatatttttctccgagctttgcagcggcgtatccggcgggcacggtgacatgtgcgtgcagaatgtccggcttgccgtgctgcttcacgtaggctttgtaaagcttttcaacggtgcggcagtaagcgctgagctgtgcatctgcgctgaatttggagatgtccagcatacggcggcagtatgtcatatagccggtgttcgattcttcgtagagcttctgcatcgtggggtacttcggcagtgaagacaacccctgtcggtctacatagagcatgttggtttttacgccgtattccgcaagtgccgtgcagaacagcttgtggtaaacgccgatcagtttatcctcaccgtttgggtaccatgtgggaatgaccaaaacgtgaagcggagaatttttctgcatgagtcttttggttccgatagcgcgcggtgcgcagtctatcgaaaaatcctttcattcgtagtatggaaaaagctatttaattcctgcgcacgaatgcctttttcggcattttgcagaccgggcacacccagttgtccggcagttcttcaaagctgaagttcgggtcgctgtacacatagccgcacacggagcagacaaagctttcaccgctgctcttatcaaacgtgctttccggcggcacataggtcggcgagccgaccggcgacagaccgtgcatttcactgcggtagaaatcatacgtcatcggcgtgccgatggcgctgtcgctgcccgctatgatctcggcggcgaagaccatctcctgtcctacgtccatgccggagatgaccttgcataaaaaccagcagcaggtgttctcctttacgacgggcacgccttcaatgagcaccttgtggcgaatgtttttcagcttgtctgcatttttaccgctgacaagaccgagtgcgccgatgacgctggcaggtgtatctgtggagagtacagaaatggtaaaaataccgttttcgcggattgcggtacagctgtgcgtatcttttgtcagcgcaatgagcactttttcggggtcgctgctggaaatttggatgaccgagtttgccacacaggcgttcgggcggccgttatattttgtgccgatgacgtacatgccgtatgacaaatttttaaggactgccgggttcatggcggtgcacttccttccgttatgttaatagagtttatgagctgtgctttcgttttatgttttcccaatacgctttaaacgcctgctcgtttttgttgtctccgtagtgatagtacgaagcgccgagcaaggcatccggaagatactgctggtcgagccaatgatccgggtaatcgtgcggatagcggtaaaactggccttttttagcgacatctgaaccgtcataatgcacgttttgcagcgtgcgcgggatcacaccgagtttgccggccttcacgtcgcgcatggcggcatctatggcagattcaccgctgttcgatttcggcgccgtcgccgttaaaatgacggcatccgcaagcgggatgcgcgcttccggcagaccgaccatcatggcggcgtctacggccgctttcacgatggggatgatctgtggccacgcaaggcccacgtcttcgcaggcgcacaccatcaagcggcggcatgcagaggcgaggtcacccgcttccaaaagccgtgcaagataatgcagcgccgcgtcggggtcggagccgcgcatggatttttgaaacgccgaaagaatatcgtaatgcgcgtcgccgtctcggtcataccgcatggcactgcgctgtgtaagctgctctgcaagttctatggtgatgcgcggctcgtcctcgcttcgtacggcagccgtgcaaagctctgccgcgttcattgctttgcgtacatcgccgccgcaagcggaagcgatatacgaggtcacgccgttttcgagccggatttcttcgccgaggtcttccgacaaaatgcggaatgcgcggtctacggcgcgggcgacctcctctttttcaacgggcttgaactcaaacactgtggagcggctcaaaatggcgttatatacgtaaaaataggggttttccgttgtggaagcgatcagcgtgatgctgccgttttcgatgaactccaagagcgtttgctgctgctttttgttgaaatactggatctcatcaaggtacagcaaaacgccgtttaccgcttgcagcgtgtttacctgcgccaccacgtcgcgaatatcggcggtggaggccgtggtgccgtttaacttgcacaggtgcatgtggctttgctttgcaatgatggacgccacggtggttttccctacgccggacggcccgtaaaacaccatattcgggatagtgccggattcgatgatgcgccgcagtaccttattggggccgagaatatgctgttgtcccaccacatcatcgagcgttttcgggcgaatgcggtctgcaagcggtgcgttcatcgcgttctccttttagtcgttataaagcggatatttgctcaaaagctctgtgacttttgcgcggatggcgtcggctttgttgtcgaaatcggtcgcacacaggtggatgcactccgcgatgacgtccatatcggcttccttcaggccgcgcgtggtaacggccggtgtgccaaggcgcacgccgcttgtgacgaacgggcttctctgctcgttcgggatcgtgttcttgtttgcagtgatatacacttcgtcgaggcggcgctccagctctttgccggtcagctcgccgtcggaaagatcgagcagcatcagatggttgtccgtgccgccggaaacgagcttcatgccgcgttttgtaaggccttcggcaagcgctttagcgttttttacggtctgctcggcgtaggtcttaaactccggcttcagcgcttcgccgaggcacacggcttttgcggcgataatgtgcatcagcgggccgccctgcgtgcccgggaaaatggctttgtcgatttttttcgcgtactcctcacggcagaggatcatgccaccgcgcgggccgcggagcgttttatgcgttgttgtggtgacgacatcagcatacggcaccgggttcatgtggcagccgcccgcaacaagacccgcaatgtgcgccatatcgaccatgaggtacgcgccgcatgcatcggcaatctcgcggaatttcttaaaatcgatcgcgcgcgggtatgcacttgcgccggcgacgatgagcttcggtttaagttcgcacgcctgctccatgagcttatcgtaatcgatgcggtgcgtaacggggtcaacgccgtaagccgcaaaattatagtaggcgccggacatgttgacaggagaaccgtgggtcagatggccgccctctgcaaggttcatgccgagtacggtatcgcccggctgaagcagcgcgaaatatacggcaaggttcgcctgtgcgccggagtgcggctgcacgttggcatgctctgcgccgaacagacggcaagcacgctcacgggcgatgttttccacaatgtctacatctgcacagccgccgtaatagcggtgacccgggtagccctcagcatatttatttgtgagtaccgtgcccatcgcagccataacggcaggagacacaatgttttcggaagcaatcagctccagattgcggcgctggcgtttgagttccagctccatcgcttcgccgacctcggggtctgcggtttcaacaaaaccgatcgtgttcaaaagatcaccgtacatacttcatctttcccttctaaaaataatatgctctgcggtttatgtgccgcagtacttcactaaattataccctattccatttaaaatggcaatagatgatttgcaagcacataatggatggcgtaaagcaataacatatgtgccggatagctgatgtagaaaaaatatttgagcgaaagcgcgccgcgcttgccgttatagagcagcacggggatcgcggcggcgatggcatacagctgtgtcgtgttgccgtcctgtgtatattgcccgtaggtcagcgccgcaaacgccacggcatcaataccgcggtacttctggaacaaatagaaacaaattaccgttaaaacaccgtaaacaccatagctgaaatgcaggaaatacggcaggattgtcaagatcactgcgccgatgaacatgaaaatattgcggcttttcgcggaagcatctaaaagtttcatcacaaaaagcgccgttaaaaacgtgaacaggatattttgccgctgaaactcaagccatgtaccctgaaataaaaggtcatacggcacttcggagagcaaagcaaaaatacccatacgcagtgcgtagcggttaaaattgcgtgtgtgcatgtagccctgcacgagcaaaaacgcgtagatcggcatggaaagccgcccgatatagcgcagccagataaactgcgggaagaaaatcgccccgacatggtcgatgatcatggtgacgagtgcgatgagctttaaggtaaacgcagacattctttttcccctttacggttatttgtcggtctttcaataaaaataaatttaccacccttttccggtattgtcaaccgaatgaaaaagttgtagaataaacgtaaagcattcagacgggcttgcccgccgctttttcggaggtttgtatgacaaaaaaggaacgtgcgcttcttgctgtggaagcgctgaaaaaagaatatcccggcgcggtatgttcgcttgaatatcaggatccgctgcaattacttattgcaacgcgactttccgcacagtgtacggatgcccgtgtgaacctcgttacaccggcgctttttgcccgcttccctacgctggaagccttctgcgagggcagcgaggaagaaattgcggagctcatccgctcctgcgggttatataaaacaaaggctcgtgatatttttgctatgtgccatgtgctgcgcgattcgtataacggcgtgattccggacacggtggatgagctgacaaagctgcccggtgtgggacgcaaaaccgcaaatctcgttgtgggcgacatttacaaaaaacctgccgttgtgacggatacgcactgcatccgtatcacgggacgactcggtctgaccgaaagcaacgtgccgctcaaagtcgaaaaagacctgcgcgcagttttgccgccggaggaaagcaacgacttttgtcaccgtaccgttttacacggcagagcggtctgtacggcgcgtaacccgaaatgtgctttgtgctgcatgaattcgttctgcaaaaatcccgtgaacccgatagagtaaataaagctaaacaacgcagcacttttccgttgcgttgttcttgataaaagaaaggaagctactttttatgttcaaattttgtaagacccagctttgggagtgctcccgcacgctttccgatgttgcaatgggcagaaagcccgcagagacggtcattcgcaatgcgcgtctcgtaaacgtctgcacgcatgaaatcctcgacaacatcgatgttgcaatttcctgcggccgtatcgcacttgtcggcgacgccgcacactgcatcggtgaaagcacaaaggtcatcgatgccgagggtcagcttatcgccccgggtttccttgacggtcacatccacattgagtcttccatgatgacgccgatcgaatatgcaaaggccgttattccccatggcaccgtcgggatttattatgacccgcacgaagtctgcaatgtgcttggcctcaaaggcgttgacctgatggcggaagaggcggaaaagacgccgctgaaggctatgctgacgaccccctcctgcgttccggctgttccgggatttgaggattccggcgcggagatcaccgccgcagatattgcctcggaaatgaagcacgattataccgttggtttaggtgaaatgatgaacttcccgggcatcaccgcttccgcggagccgacgcacaacatcaccggcgaaacgttgaaagccggcaaaatcatcacagggcactattccatcccggagacgggttgcggcctcaatgcatatattgcaagcggcgtgcgctgctgtcatgaatccacccgtgcggaggacgcactcgcaaaaatgcgtcttggcatgtatgccatgctgcgcgagggctccgcttggcacgatctgcaggaggtctccaaggccatcacggagcacaaagtggacagccgatttgcgaccatgatttccgacgatacccacccgcatacgctggttgcaaacggtcatctcgatcacatcgtgcgtcgtgccgtctccttcggtatcgattttgttacggccatccagatggtcacgctcaactgcgcacaatgcttccagatggatcacgagctcggctccatcaccccgggcaagtgcgcggacatcgtatttattgataacgaaaaagacatccgtgtcacccgcgtactcatcgacggcgacgttgttgcagaaaacggcaagctgacgattgatctgccgaagtctgagcttcccgcatgggcgctcgacacgatgcacgtcggcgagacgatcaccccggaaacctttaaggtgcataccgataaggttggcacggcaaccgtccgtgcgatcgagattatcccggtacatgtcggcgactatgagcgtcacgttgaactcaaggttgaaaacggcgaattaaagagcgatgtggagcaggatgttttgaagacattcgtcttcgagcgccacaataagaccggcaagcacggcgttggctttgtcaagggattccacgtcaagtgcggcgcaatggcttccaccgttgcacacgatgcacacaacctgctcgttgtcggcacgaatgacgaagatatggcacttgctgcaaatacactcattcaatgcggcggcggtgagtgtattgtgcagaacggcaaggtgctcggctgcgttccgctgccgtttgcaggccttatgaatacaaagtccgctgaagaaatggacgagctcgtcgagaacctcggcaaagcttgggaaacgatcggctgcgacattcagtctccgtttatgacgatggctttaatccccctcgcctgcctgccggaactgcgcctgaccgaccgcggtcttgtagactgcaccaccttctcttttgcagaccttgaggttgaataagaccgtttgaaagtagattgccttattttagaatgggaggaattaccaatgatccatgattttgaaacgctggtttccagaaaaaacaccggctccggcaaatgggacgagatgacgaaagaacatccgaacctgccggaaaacgttgcaccgctttccattgcggatatggagctgaaaaacccgccggagatcgtagagggtctgaaaaagtacatcgatacgcatatcctcggctataccggccccacagaggaatacttcgatgcggtatgcggctggatgaagcgtcgcaacgactgggatattaagaaagaagaaattgtttctacacacggcgtcgtaacggttctggctgtttcggttctggcctataccgatcccggcgacggcgttatcactatgccgccggtttattatccgttcagaatgaccattgagcacaataacagaaaaaacgtggagtgcccgctcatcaacacgaacgagacatacacgattgactttgacctctttgagaagctgtgcgcagaagaaaaaaacaagatgtttatcttctgcaatccgcacaacccggttggccgcgtttggacggaagacgaaatcgcaaagctcggtgcgatctgcgcaaagcacaacgtcatcgtggtcagcgacgagatccactccgacctcatcatgccgggtcataagcacgtggcatttgcaaacgcctgcaaggatgcactgccgaagtatcttgtttgcaccgcgccgagcaagacgtttaaccttgcgacgctccagacctcgaatattgttattcccgatgaagaactgagaacaaaattccagagtattttacagcaacacttcacgccgtccgccggtgcgctcggccttgaggcctgccgtctcggctacacggagtgcgaaggttggcttgcagaagtcatcgaccttatctataaaaactacaagaacttctgcaagtttatcgacgtaaactgcccgggcgttacatacagcgatctgcagggcacgtacctcatgtggatcgactgcacgacgttcggtctcgatgatgaagcgctcgataagctcctgcgcaagcatgatcttttctgcgacgccggcacgctgttctcgcagggcggcaccatgcatacacgtgtaaacctcgcaggtcccgaaaagatgctcaacgccgcgatgcagcgctttaaggacgcgtacgacgaagcgaaaaacgcgtaagcttgctcctgaaattccgtaatgtataacaaaaggtgaactgcacaactccgtgcagctcgcctttttgctatgttgttttactgaatgccgagcgcgtctttcgctaaacggtcggcgaggtcgttgtatttgtcgccggagtgccccttgactttcacaaagcggaaacggatgtgctttgcggctgcggcgcagaattcgcggtacgcaatggtgccgggcttttttgctttccattctcccgttgcccattttgctacaccctcgtaatcatggtagattgtcacggagggcacatcatgctcgatgcagtagtgcagaacagtttcggagcccttgatctcccctgccacgttgcgcatttcggcaaggtcggggtcggtgaatctttcggaaaaatgcagctcttcgccgtttaaaaacagcacagcaccgcaggaaaactcctttgtgccgatgtggtagctaccgtctacgtaagccacggcgccgtcttcttcaggcgctgcggtcgagctttctgccggagtggctttcgtcagatcgttttcaccacgcatataggcttcggcttctgcaagcgttggaaagcttttgaacgacgcgcctttaaagccggtcgtctgcgcacggcattcgtcccacgtttcaaaaatgccggtttttcgcccggcgcggacggcgtagtatttttttgccataaaatgaaattccttttcgtttattcaaagatcggggtggaaaaataacgatcgccgctgtcgggcagaagcgccacgagcgttttttctgcattttcgggcatgcgcagcaggcgcacggctgcggcaagcgccgcgccagacgtgatgccgacgaggatgccctcggtgcgtgccaataattttgccattttgtacgcttcttcatccgtgacggtcagcacttcgtccacaacggaagcatcgtagtttttcgggatgaagtttgcgccgatgccctgtaagccgtgcgcaccgcttttgccctgtgtgatgagcggtgaagtcgccggttccaaaccgacggtgtgtacctgtggcagatgcttttttaaatagcgcgccgtgccggtgatagtgccgccggtgccgatgcccgcaacgaaaatgtcgagtttgccgtctgtttgctgtacaagctccggaccggtcgtttcataatgtgcggcagggtttgagggattctcaaactgtgcggggatgaagctgccgggtgtacttttcgcgatctcatccgccttttcaatcgcaccgcgcatgccgtctttgcccggtgtgagtacgatttccgcgccgtatacagagagcagcttgcggcgctcggcgctcatggtttccggcatggtgagcaccacgcggtagccgcgcgccgctgcaatagatgcgaggccgatgcccgtgttgccggaggttggctctacaatgaccgcgccgggcttcaatttgccggtcttttcggcgtcttcaatcattttcagtgccgcacggtcttttacgctgccggcggggtttaaatattcaagcttcaaaagcggcgcgttggaaatgtttgcggctgccgcaaagcgggacgcacgcagaagcggtgttttgccgatgagctcggttacagatgaagcgatgtgttcatttttcataagacagatcctccctttctatatcgataccattgtacccccgattttacgcgcggtcaagagcgcgatttttgcaaatcttttgcgtttgtaagagtttcttaagttgtttattttttggcttacctgtataatagaaccatcagagagtccgcgccgggtgttttgcgcggaagaaaggactgactttatgactaagaaaaagattttcacaatcgccggtattgccgtcggcgctgtgatcgtgatcggtattgtaatctggctcattttcttccgcggcggcagcgttgcgccgagcgacccaaatgagatggtttatgtgacgagcgttgcggacatcaccggcacgggttcacttggtatgacggcgaaatactccggcgttgtggagccggaaaagacgctctccgtgcagaaggacgatacaaagaaaatcgcagagctgtatgtgacggtcggccaggaagtgaaagttggcgataagctattcagctacgatacggacgacctgcaaatgcagcttgaagaggcgcagttacagctggaaagccttaaaaaccgcatttccacgctgaaccagcagattgattccctgcagaaggaaaagaacaaagcgtcttccgacgaacagctttcctataccctacagattcagtctgcgcagcttgaagtgaaatcgacggaatacgatcagtctacgaaggcgaaagagatcgagaacctcaaaaaatcgcttgaaaatacggatgtcgtggcagaaatggccggcgttgtgaagcagatcaatgacggttccaataccaacacaagcggcagcgattctacgaacgcgtatattacgattctcgcgacgggttcttaccgtgtaaaaggcacggcaacggagctgaatgtctattccttgcaggagggcatgaaaatgaaggtcgtctcccgcgtagacccggagcagacttggacgggcaccgtggagagcattgaacgcgaagccgcaaacgataataacaacagcggcgtttcctacggttccgaaagctcgtttacaaaggcgacaaagtataacttctaccttgtgctcgatgatttcaaaggtctcatgctcggtcagcacgtttacgtggagccggataaggccgaagacgtgaagaccggaatttggctgccaagctattatattctcaacgaaggcagcaaaaactacgtttgggccgtaaacgataaaaatcgcatcgaaaagcgtgaagtgcagctcggcaagtttgacgataccctttccgaatatgagattacgtccggcgtgacggcagacgatcgcttggccgttgtggaagaccgcgtgcacagcggcatgtatgctacggatgatatttcttataagaatcaggggaatgattccggtgacatgaacgatgccaaaacggacgatgcaaacggtgttatgcccgcagaaaacggcagcgatatggacggcaacccgaacggctacagccccatgcccgcagaaggtgccgtaacggagtcagagggcgaaacagacacggcagccggagaagcaagcacggcagatggcgtgaccacctatgaaaatgacggcgcggcgagtcttggaaccgttatcgggggtgctacggcatgatcttagagctgcacaacatttataaaacgtatatccaaggcaaaatggaagtgccggttctaaaagacatttcgctttctgtggatgagggagaatatgtcgccatcatgggtccgtccggctccggcaaaacgacgctgatgaatatcatcggttgtcttgatctgccgacttcaggcacgtatgcacttgcgggtgagaatatcatcggcagcagcgaatcgaagctttcggaaattcgcctcaactccatcggcttcgtgttccagagctttcatcttttgcctcgccagagcgcggcggaaaacgtggcgcttccccttttatacgcaggtgtgccgaaaaaagagcgacgtgcgcgtgccgtgcgtgctttagagcgtgtaggtctcggcgaccgtgtggattttaagccgaaccagctttccggcggccagtgccagcgcgtcgcgatcgcccgcgccatcgtcaacaatccgaaaattcttttagccgatgaaccgaccggcgcgctcgacagccagtccggcgcgcagatcatggagctgttccagacgctcaacgacgagggtgtgaccgttatgatgatcacgcatgacattgatgtggcaaaccacgcaaagcgtgtgctgcatattcgcgacggtcagtttgcggaacaacatatccccgaggaaaaggaggcggaagcatgaatctgccggcaaatttcccacttaaaaaagtcattatcacggtggtctccgtagtgattgtgatcgcgctgatcatcaccggcgtgacggtcgcggtgaacggcaaggcggcaaatgccacggtggatgtggagcaggtttcaaatatctccacacagtattggggcgaccagtccagcacctacggtaatgctacaagtgactttgtgcaggaactttaccccgataaagaaaaagctatttctaagattttcgtcaaagagggcgataccgtcaagatcggcgatacgcttttgcagtacgatacgacaaagctccaattgacggtagagagcaaggcgcttgaagaaaaaaagaagaaatacgaactggagcaggccgaaaaagaacttacgaagctccagaatacgcccccgtatgtggcgccggtcatcccggagcccgagccggaacccacccccacgccggtgccggaatcgcgggcagaactgtatacggagattacagagcactcgaagccgtttaagggtatcggcacggaagaagacccgtatgtctttctttgcacagaagatgctgtgctgacgaagggctttcttttgaagctgctcggcgtgacagacccgcgtgcgacgcctaccccgacccctacaccgagcgcagcgcctacggcacagccgagtgaagcgcctacggcggcgccgcagccgacggttacccccgaaccgactgcgaagcccaccacagcgccgacggaagcccctactcccgcgcccatagaacccacggaagcccctactcccgcgcccatagaacccacggaagcccctactcccgcgcccatagaacctacggaagcccctactcccgcacccatagaacctacggaagcgcctgcggtttccggcatggcgtggttcaagcagatgacattcacaaaaacgaatgagaccggcggcgaaagcgtacccacgccggagcctgatttcacactgccggacggcccgtttgtcgcacgctttgaagtgcatgaacaggataacgaaaatctgccgcttgtaaagggctggcagatgaacggcgataagatttccgcaggcttctttaatgaagttatccgcgagccggatgacattcaaatgccggatctctccgacgccgacccgggcatcagctacgacaccggcggctccatgtatacggcggaagaattgcagcagatgatcgccgataaaaagcagaagattcaagatttaaagctgaatgtgaaacaggcggcgcatgatcttgaaaaagcgaagctgaatcttgaaaacgctacaataaaatcgaccgtgaacggcgttgtgaagtcgctcacagacctcgatacggcgatgtccacaagctccccgttcctcgtggtttcgggcggcgacggtttctatataacggcatccttaaacgaatcgctgctcggcaaggtgcatgtcggcgacacggtcacggcgagctcttgggagaatggacaaatatatgcggcagagattgtacagatctccgattttccgaatgacaattccaattattactatgacggctcctcaaacccaaacagctctacgtaccagtttacagcgcgcattgccgacgcggacggcctgaaaaacggcatgggccttgatattactttgcaggcagcctcggataacgcaagcaatgcaatatatctttttaaagcgtatatccgcagcgatgacggcggcaagtatgttttgaaggtcggcgacgataatcgtgtgcataaaacgtatatcaaaaccggcaagacgatttacaaccagtatctggagatcaagagcaatactttgacggaagaagattatgtggctttcccctacggcacttcggcaattgatggcgccaaggcgaacggcatggaagaaaacacagacgaaaatgacggcatcgacgcaagggggcttgacgcatgattgaaaatatcagactttcatttcagggaatctggtcgcacaaaatgcgctcgttcctgacgatgctcggcatcatcatcggtatcgcctctatcatttccatcgtgtccaccatcaagggcacgaatgagcaaatcaaaaagaacctcatcggctccggcacaaacacggtgcagattcagctgtatcagggcgattatcagtacgaaatgctgtataacggcttgccggacggcatccctgtgcgtgacgagaccacgatggaaaaaatcaagtctgtaaaaaacgtggaagatgcggcattctataccagccgcagcgactacaacaactccgtttactacggcaacaacggcatttccggctcgcagattttcggtgtggataacagttatttcactacgaatgggttggtgctgaaaagcggtcgcacctttgtggacagtgattttacggatttccacgcggcagccatcatcgatgccgatacggcagattcgctgtttgacggcgaaaaccccatcggcaaaacgatcgagatcagcagcattccgtttacggtggttggcattgtggatgaagatagcaagtttgagcccgtcatcaactccatcgatgagtattatacgtattactcgaacagctctgcatcccgtattttcgtgccaagctccatgtggccggcgctctattcgttcgatgagccgcagaacgtggccattcgcgtttccaatacggaagccatgacagatgccggcaaggctgtggcggagatcatgaacacgaacgtgacgaacggcgagattaagtatcaggcacaggatcttttaaagcaggcgcaggacttgcaggatctcagcagctccacaaattcgcagctcatctggattgcgagcatctccctgctcgtcggcggtatcggcgttatgaacatcatgctcgtttccgttacggaacgtacgcgagagatcggtctgaaaaaagccatcggcgcgaaaaagagccgcattctgtggcagttcttaacggaagccgctgtgctgacaagccttggcggcattgtgggcgtgggtgccggtatcggtcttgcggaaatcatatcgcgcgtgacgtctgctccggttgccatcagcgtgccttccatcattattgccgtggtgttttccatggtcatcggcatcatcttcgggcttctcccctctttcaaggcggcaaacctgaacccgatcgatgctttgcgacatgaataaaaactaaaggtttataaaaatgcccgccgggctttccgatcacatcggtcagcccggcgggcattttgtgttttgaattactctgctttgtcctgctctgcggcctgaagaaatacttcgtgccatgcgggaaaatgcttctgcatacggatcggctttaacgcgggtgttgtgaagcagtgctgcgaagtgccggtgcaactcaaaagcccggtctccttgctgtgcccctcatacgccatttcaaagcgtacaccgttgtagttttgaatgcgcagtgtaagcacaagcgtctcatcaaagcgaattgggtgcttgtagctgcacgaaacacccagcacggggatcagaatgccgttatcttccatttttttgtacggcaatcccatagcgcgtagcatctccaagcgggcttcctcaaaccaacgaatgtaattcgagtggtgcacgatgcccatttggtcggtctcgtagtaattcgctttgcgttcaaaggtgaacatggcgcggcctcacaggtgcatttcgatgaggtttgcgtaaaaagccttatcgtgtgcgccgacttcggtgtggatgggtgcgccgtctttaaagaggatgacggtcgggatgctggagatgccgtattcggcggcgatttcctgcgcttcgtcaacgtcgatcttcgcgacgacggccttgccctcgtattcttctgcaacttcctcaatgaacggtgcgatcattttgcacgggccgcaccatgttgcaaaaaagtctacaagaacaagcttgttatcgcggatcaatgcgccgaaattttcagtggtgggatgtacgattgccatggaaacttcctccttaaaatgatttgggattatactaaatttgtttaagaaatttattcgtagggtacgatttctgcggagagaatggtgacgtcttcaagcggcttatcgttcgagtcggtctcaacgcccatgatgctgcgcaccacgtccatgccgtcaaatatctgtgcgaacacggtgtgtccggtacctgcggtggaatatgcaccgtcaaggtgtgtgttgccgccgtttttatcgtaaagttctttgtaggcatccgttaccttgtccatatcgagcgtgccgccgtatatggaggtgaacttttccggtgcagatttatagacctgataatactggtcgtaggtatcccagtctattttgcccggttccgtgcagtttataaaaaactggctgccgtttgtgttggcaccgctgtttgcacaagagaccgcgccggtgatgttgacgaggttttcgtgaaattcgtcgtcataattctcaccccaaatgctctcgccgccggttccgttgccaagcgggtcaccgccctgaatcatgaaatcatcgatgacgcggtggaaagtgacgccgtcatagtagccggaaagcgccagagatttaaagctgtacacggctttcggtgcggcatccgggaaaaagcgcatgcgaatggtgccgtagttcgttgtcagcacacaaatctcctcgcctttttccggcatatcgagctgatagccgagcttttctttgtcggcctttgccaagggctttaaggtatctgccgcaacaactttatccgtagtgccgatgaccttttctgcggcagaagaggtgctgccggagcaagctgtgagcagcatgattacggtcaacgccacacacagcagtttcattttcttcattttttctgtttcctttcttttgcaaagacatactttgcatctgtatatctattttaatatacacggtaaaaacatgcaagcccttttgtttatcttcatgaaaagttcagaaacgcataaatgaaagtttaggttcatatacttcggcgtagttaaggcgcagccgaaagcgttttttgcgcggcacggccttaaaaaggagtgaagtacatgaaattttacccggaaggtcatttgatcgacaaagcggaaaacaaagccagtatgcagacgcctgccgccctctccgacgcaatgcgcgacggaaagatcttagaggcgcgcagcatcatctgcgacaacgagcacaacctcattgtagatctcaaatgtatgcggggcattatcccgcgcgaagagggcgcgctcggcatacgcgagggcaccgtgcgggacatcgccatcatttcacgtgtgaataagcctgtgtgctttatcatcacggattttattcgtgatgcattcggcaggatcacagcggtgttgtcgcgccgaaaagcacaggagcgctgcatggcagagtacatagcggggcttacctgcggcgatgtgatcccggtgcgcatcacgcatttggagccgttcggtgcgtttgcggatatcggctgcggtattgtttccctactgcccatcgatgccatttctgtttcgcgcatcgaccacccgaaggagcggttcacggtcggcatggatattcgcgccgtggtgcgtatgaaggacgagaaccgcatcacgctcagccaccgcgagctgctcggcacgtggacggaaaacgcggagcgctttcgtgtcggcgaaacggtcgcaggtatcgtgcgcagcgtggaaagctacggcatttttgtggagctgaccccaaaccttgcaggacttgccgagctgaaagaaaacgtccatgccggacagcaggccagcgtgttcatcaaaagtattctgccgaaccgcatgaaggtgaagctcgtgcttgtggaatgctttgattacacctataaacccgagccgcccgtatatttctttcagggtgaccatattgataagttcacgtattctccgcccgagtgcgcaaagcacattgagacggtatttgcgtgatttaggacagcaaaaggcggtctgcacggatatttttctacccggcagaccgcctttctatgtgcctttaaaggacatttgccttaacgggtgtgattactttgcttcgctttcgctcgacttttcgtcgccgctcttttttgccttgtcttcaatgacgtacttaccgtctttgaagtcgcagacatacgagccgcccgctttcatgttgccctcgagcatctcttcggaaatcgggtcttccatcttgctgcggatcgctctgcgcagcggtcttgcaccgtagaccgggtcaaaaccggcgtttgcaacagcttccacagcagccggggtgaactcgaccgcgatgtccatgtcgcgcagctgacccttaagaccctcgagcattttgccggcgattttctgaatgtcgtcgtgcaggagcttacggaacacaataatgtcatcgacacggttgatgaattccggacggaacaccttcttcagctcacccatgacgagctcttttgtgcgctcgaaatcggcgactgcgctgtcttcttctgtcgacttgttgtccgcggtggcaaagccgagacgctcttgctgcttctctgtaatgagacgcgcgccgatgttggaagtcatgatgatgatggtgttcttgaagctgaccaccttgccctgcgaatccgtcagacggccgtcatcgagaatttgcagcagcatgttgaagacatccgggtgtgccttttcgatttcatcaaacagcacaacggaatacggcttgcggcgcactgcctcggtcaactgaccgccctcatcaaagcctacatatcccggaggcgaaccgacgagacgagacaccgtgtgcttctccatgtactccgacatatcgagacggatcatggccttttcgtcaccgaacatggcctccgcaagcgccttgcacagctcggtcttgcctacgccggtcgggccgaggaaaatgaacgagccgatggggcgattcttatctttcaggccgactctgccgcggcggatggcctttgcaatggccgtaacggcttcatcctgaccgatgacacgcttgtgcagcgtatcttcaagatgcagcaggcgctcgctttcttcctgcgtcaactgtacgaccgggatgccggtccacatagcgacgatctcggcgatgtcttctgccttcacgacgctgttgctgcgttcattctttgcagcccactcgttctttttctgctccagctcatctgtaagggctttctgcttgtcacgcaactcggccgcgcgctcgaagtcctgctcgttgacggcagccgccttatcaatctcgacttccttgatgcgcttttccatctcctgcaggtcttccggcgcagtgaacgttctgagacgcacacgggacgccgcttcatcgacgaggtcgatggccttatccggcaggtaacggtctgcaatgtagcgcgaggagagcttgacggcgctctcaatggcttcatcggtaatctgtactttatggtgcgcctcgtagcgatctttcagaccttcaaggatttgcaccgcttcttcttcggtcggctcaccgacatgtaccggctggaaacgacgctccaacgcggcgtctttttcaatgtactttctgtactcgttgatggtcgtcgcaccgatgacctggaagtcaccgcgcgccagagccggctttaagatattggcggcatcggcagagccctctgcggagcctgcaccaatgatggtgtgcagctcatcgatgaacaaaatgacgttgccgtccttcttcacttcgtcgatggcggacttgatacgctcttcaaaatcgccacggtacttagagcctgcgaccataccggtaagatcaagagccaccagacgcttgcctttcagcagctccggcacttcgccttcatgaatcttcagcgccaagccttccgcaacggcggtcttgccgacgcccggttcaccgatgagcaccggattattcttcgtacgacgagacaagatctgaatgacacgttcaatctcgttatgacggccgatgaccgggtcaatcttgccttcggctgcgagctttgtcaggtcgcggccaaacttttcgagtgcactgccgccttccttttcgccgttttcgtccttcgggtacgcgttgccggaagctttatcgacggtataaccatcggaaagcgccgaggacaacgcatttgcaacgctctgcgggtcaacgccgagcatttgcaggaaacgcaccgcaaagctttcaccgtcttcaatgatggcgatgagcaggtgctccgtaccgacgtagttactgccgagcttggaggccgcgagctttgccatctgcaaaatgcgctttgtgcgcggggtgaaatatgcggtggtgaggttcgtcggcgaagaagtgccaatcttctcctgcatcaggcgttcgtaatcgtctgccgtgacgccgagcttattcagcacgttgaacgcaacgccgctgccctctgcaatcaagccgtagagcacgtgctcactgccgatgtaattgtggccaagttcctccgccttttcgatggcgcggttcatggcattgtttgctttctctgtaaaacctgtgaatctatacatataaatccgtcctttcgatcactgccgtatcgcagttctctttactgattttctattattgaagcgctttgagggctttgcgcacctcgtctgcgcggagaatgtctctttgccccgccgaaaggttgctgccgtgtgcggctgccatggtggccggctgtaccgctacggtcagtgtgtgaatatcttcaagcgttataccgcttaaaagcttttctgcaatgccgaaacgcacattggagataagcttcatatactcatcgcaggaaagcaaccgtgcgtttttcagcacgccggcggagcggcctactttgtcctgcacattgatgttcttgctgagcgaagcacgcgttttgcgctcttcggaaatgagctgcatcgtaatgttctgcaagttttccacagcctctttttcgctgagacccagtgtaatctggtttgaaagctgatacatggcgccgatgacattgctgccttctccgtatgtaccgcggatcacaaggccgagcttcgaaagattcgtggagattctggacattgcgccgttttcggtgagcgccggcagatgcagcatcacagaggcccgcatgccggtgccgaggttcgtcgggcactgggtgaggtagccgagttcggaatcaaacgcaaaacgcagcgattcgtttaaaagcgtatcgatgcggtctgccatttcggcagcttcgctgagcgcaagaccctcatgcagcacttgaatacgcacgtggtcttcttcgttcaccataatggagatgcgctcgtcctttgaaatgaggaatccgcgtccctttgcgtttgcgatgaactccgggctgacgatgtggcgttccacaagtgacaccgcctgctcgttgctgaggtcatccatctgcacgaagtcgaaatccgatgcgatggcgctgttgccgctgaggatcgcatcgcgtacgcggcgctctacggctgctttctggtcaggcgtcatgcggtttgggaacggcatatctgcaagatttctcgccagacgcacacgcgtgctgatgacaacgtcactttctttacctgctttttcataccatttcttttcttcgttaagcatggtctccatctcctttctccatttctttgatttcgtcacgcagctcagctgcgtgctcgaagttctgcttttcgattgcttctttcagttccgcacgtttcttttcaatcggcgtgggttcttccacaacggcaatcttacctgccggttccacaatgcgcagcgcattgcttccgggtactttgcccttgtgctttgctgcaccgtggatgcggtggatagtcggcatcaggcggtcacggaacacattgtaacactctgcgcaaccgatcttgccgctttctgcaatctcctcaaaggaagcaccgcatttcgggcagcgcaccgcattactgcgcccggtcggcgcaccgatgaagctgccgagcagattgttgaaatcaaagtccatatcatcaaagttaaaaaagctcttgtagccttttgcccttgcacattccgagcaaaggtcatattccgccaacttgccgttgacgatggttttaatgtgggtcgttgccggattctttccgcagttctgacacatcataagtcatcccgtcctttcaaaatggctttttatacatttagtacgagcaacatgtttttgaagatcgatgcccgcagttgatctcgaatttcttttggcgccggtgcaagtgccgaatccgaaagccctgccatcatcaggtgagcgtcggattcggacgcaacgcccgtttccacaagattccgcagcatggcgcgcatagaagccgcgtccagcttaggcccgatggaattgacaatgtgcatgattaaatcggattttgtcatgctccggcgaatgatgcgaatgtaaccgccgccgcctcgcctgctctctacgatatatccctgctccggtgtgaaacgggacgtgatgacgtagttgatttggctcggtacgcagcccagcgtgtttgcaagctcattacgctggatctccgcgatgccgttttcatcattgagcatttgtaagatgtaattcgcaacgctgtcgctgattcgcatttctgatcgcctcttgtcctttctttgtctttgactttctttgactttaattataagcaaaacggatattttgtcaagcttgattttatacgattttcaggaattacattaaattatctctctattttaaattatttctcaataatactaactgaaacgcctaaatttaaaaagtttttgaagttttactttgaccatcacacatttcccccactttcatattctgtactgtaaacgaaaggaggcgttcaatcatgtgtaacggttttggcggaggttgctcttggatcatcattatcatactgatcctcttgtgctgcggcggctgtggctgcggtaacgattgcggctgcaacaactgtggtggctgcaacaacggctgcggcggctgtggctgctgatcggtcgatcgcataatataaaagcaagccgactgagtgaaagcagtcggcttgccgttttataaataacatataaagtgataaagctttacacattgccgagcatataaagaaaagctgtgcactccattagaatgcacagcttaattttagggctatgaaatgtaatttagctttacaggcagctcgggactttgtagccgtatgtattcttcttatagttgccgttagagggcgaggcctcggcgtagttgccataggagaataccttagcttctgcaaggcgtctgtaatacaggccgatgtagcagttgccgcctgccacatgccaatccagcagattgctgccgaatgtgtaggcgtccacatagttcaggtcatgcgtgagaccggaggtgctgttgaaagcaacatcgcctgcgcgcacccaaccgctcttgccgcttgcagagaccttgtaccagctctgcttcgtgcttgagtcgcggtaataatcgatgatgttcacacttgtgttgatcttaagcgtagtaatctgcgtggaagaagcgctgtggtcctgatacatgggcagtgtggaagccgttaccttaccgccgtacggattggaagaagacagatcctgcggcggaacaacggtgttcatgatgactgtacgcacgtagcagttgccggagccgttccagtagcctgcgccgacattgtaagagaagcttgcaagcgcatcaaactggcactggctcatcaaaaggccgttgctcgagatgaaacggttgatctctgtggtgtaagagccgcggttgacggtatcggccagcatggcctttgcttccgagcgggtcaggttattgtagaatgtggtgttcttggaaacaacgtaaccgtagccgacggtcgggatattgccggcaagcgtgtccggcgaaacctgtgggacatagccttcataagaggcgatgttgtcgagcatactgtcacttacgcggcggctctcgcctgttgtcgtatcggaatccgttgtagagacgacgaggatggtgaactctctgtaatcggaggaataaccgccgccggaagacgaatacgcacgcaccgtgtaggtgccaggtgtactgattgtagccgaagcagagaaaatacggacgttgttgtcgccctgactttcggaatcgtaggacgtggtatcgtaggtgccgacgccatcaatctcaaagcgcacggcggatttctgcgtatccgtaaccgccttcaaattgaaggatgcaccggctgtgataatattcggtgttgtgtacgcaaagcggacagcttccggcgcggagaccgtgacggaaacggtggcaagtgcagtgccgtttgcgctctttgcggtgatcttagccgtgcccggcgcagcgccgtaaatgaagagctgaccggaaacaccggcttttgccgttgcaacggaagcatcactgctctcccacgtaacagagctggaagcagaagcctgaatgtagattgtcttatactgtgcgagatcgacggaagaaacggagaccgatgcgctggacgaagacgggtcatatgccgcgacatattctgccgagacatagccctctgcgccgccggtcgtacgcacatgcacccagccgctcgttttgcggtcaagcacgttcagcacggtgccggtgctcaaaacagtgagtactttacagctcgtgttcggctcggaacgcaggttgaggccgaccgtaacgcggacgtattcgcctgttgcaggcgtattggagttattgccgttattggtgttatcatctccactgttaccgggctttacggagttgatatcgccggaggtgatcttcaagtactgcgcggcaaggtagccctctgtgccgtcggaaagcttcactttgtaccaactgttgtttgtggcttccgtaacggtaacggtgacgttcatatcgataaccttgatgatgccatagcttgtgccggggcctttgcgcacatttaaatcggatgtggtcttggcctgtacggttccgttgctcggcgccggggtcggcgcgggcgttgcggaaggcttggcagaatcaatattgccggaagtaactttcagatattcggagaacagatagccctctgtgccgtccgaaagctttaccttgtaccactggctgttcgacgcgtccgtgaccgtaacggtggtgccggtgccgatgaccttgatgacgccgtaattcgtacctgcaccgcggcgcaggtttacgtctgcgatgagcttagcctgcacagtgccatcattggacggtgcctgcgtaggtgtaggtgtaggtgtaggcgttgcggacgatgtgccggtgaccttcaaatactgtgcaaagatgtagcccgtggagccgtttgcaaggcgcacggcataccactgagagttgctcctatctgtgaccgtgacggttgtgccggaagcgataacgcctttagagctgtaattcgtgccggggccggaacggaagtttacgtattccgtcgttttcgcgctttgctcggaaccgctcggtgcctgtgtcggtgcgggcgttgccgttgcggaggaagaactgttcagcttcaaatattgcgcaaatatgtagcccgtagagccgtt

SEQ ID NO: 1723 - DNA, 91759 bp, Unknown
  gut microbiota DNA sequence
actgtaattcgtaccggggccggaacggaagtttacgtattcggtcgtttttgcggtctgctcggaaccgttggatggcgcctgtgtaggtgccgccgtagcagacggcgtattgctgcccgtgaagctgatgtattcggcgaaaatatagcccgtagagccgttcgagagacgcacggcgtaccactgggcgttgctcatgtcggtgaccgtaacggtagtgcctaatgcaatgacgcctttagagttgtaatttgtgcccggtccggaacggaagtttacgtattcggtcgttttggcactgcgttcttccccgttgcttgtgctgccgccggtagacatggaaatatactcggcgtagatataacctgtagagccgttagaaagacgcacggcgtaccactcggaattgctcgtatccgttactgtaatgctggtgccggaagcgatgatcccctgcgagctgtaattcgtaccggggccggagcggaagttcacgtattcggttgtttttgcggaaacttcttccgcataggccgcaagcggcagcgcagaagccaatagcagcgcggaaagcaacagagccgtgcccttctttcggagcattctttttctgtattgcatgtgttttcacctatccttatcaaggcatcgacctgtagaagcaaaagccggtttctgtcctgttgcggcagaatatggtacagatcgttttatacagttacaatcataacacaatagttacaaatttgcaaccatttttgcggttcaaaagccaaaaacagaaaataagcccgcgattttcgcttaaaatacttaaatatgaaaataccggacccgcaaaaacggatccggtatcgaatttcaggtgaaattacagcttttcaacgatggctttcgtatcgcgtgcaatgacaagttcttcgttggtcgggacgatgtaaacagcgaccttgctgtccggcgcggagatcttcttctccttgccgcgaacgcccttgttggcttcgtggtcgaacttgatgccgaggtattccatgttggtgcagatgcgctcgcgcagggtatcctggttctcgccaagacctgcagtgaagacgattgcgtctacgccgttcagtgcagcgacatagctgccgatgaacttctgaatctgataaacgagcatctcatgtgcgaggtgtgcacgctcgtcgccctcgtcctctgccttgcagatgtcgcggtcatcgctggagataccggagataccgagcaggccggacttcttgttgaagaggtcggaaagctgtgccggggtgaggttctctttctctgcgatgaacgtgacaacggaaggatcaagcgtgccggtacgggtacccatcatgaagccgtcaagcggggtgagacccatgctggtgtcgatgaccttgccgttcttgatggcggtgatggaggaaccgttgccgatgtggcaggtgataagcttcagatccttgatgtccttgcccatgagctctgcaacgcggtggctgacatagcggtgggaggtgccgtggaagccatagcggcggatcttgtacttctcatagtactcatacggcacagcgaacatgtaagccttctgcggcatggtggaatggaaagccgtatcgaacacgacaacttccgggacttccttgccaaaaacgctcatgcaggcacgaatgccctgcacatgtgcgctgttgtgcagcggtgcaagcgggatgaggctttcaatgccctcgatgaccttttcgtcaacgagaacggactcgctgaagagcgcgccgccctgaacgatacggtggccgatagcagcgacttcgctcagatccttaatgacgccgacttcactgtcgagaagtgcgttcttgacctgctcgaacgcttcggtgtggttcgccatgcggatttcgatcttcttctctctgccgtctgccgtcttgtggccgaaaatacccatttcaaggccaatcttctcgcagttgccctttgcaagcatttgctcgttgtccatatcgatcagctgatacttaagtgaggagctgccggcgttgatgaccagaattttcatttcgtcttccccctgaatcatggttaaatttgaattggatcatctgtgcaaacgcacaaaaaataagcacgacacttccaaaattataaataaggaaacgcggcttgtaaattgatcttcattgctttatacttatgataatacaaaatcatgtaaatttcaaggagtttcctataaaatgattggaaaaaacaagatttcgggcgttgtttgcgagtttaatccgctgcataacggccacgcggcactgctctcccgcatttcggaggagttcggcagcgacattgtctgtgtgatgagcggaaattttgtgcagcgcggcgaggcggctgtgctcgataagtggtcgcgcacacggctggcactgcaaaacggcgcggcactcgtgctggagctgcccttgccgtgggctgtggcaggcgcagaaaaatttgcactcggcggcatttcgttattaaatgcgctcggttgcgtagatacactgacgtttggcagcgaaaccggtgataccgctcccctcatgcactgcgcggaatacttgcactccgatgtgtttaattcggatattcgcccggaggttgcaaaaggcgtttcgtttgcagcggcgcgtacggaggctgtgaaaaaggcactcggcgcagaaaccgcagagctgctcacaaagccaaattgcattttgggtatagagtattgcaaggcgatcttatcgttgaattctaatatcgcgccgcagactgtgcagcgtatcgcgattgaccacgacagcgacaaagcgcacggcgcgtttgcatcggcgagcctgatccgctgcaagagcgccgagggtgaagagatttccgcgtatgtcccggaaaatacggcggtgtgtattcgtgcgctgcaaaaggaaaagcagtaccccgcttccctttcgtatctcgaccgtgcggtactggcggctgtctctgccatgtcacccgaagacctgcgccgcgtgccggatgtttcagagggcatcgaaaaccgcattttggcggctgccgaaacggcggaaacgtgcacagggctgtttgatgcggtgaaaactaaacggtacagccacgcgcgtattcggcgtattgttttaagcgcgtatttgggcatcacgaacgatctgcccaatttgcctccgtacctgcgcattttaggtatgacaagctgtggcgcggagatcctgcacaaagcgaagccgatgctgccgatcatcgcacgacctgcggacgtgaagaagctttcgccggaagccagacgtgtgtttgagttggaagtgcgcgcggataatctttacagcctgtgcacagagcatcgccgccctgcgaacatggattatacagaaaaactgattcggatataaactgagctctgcatttggcttttgccagtcgcagagctcttcttttatacaaaaagaccgaaccacgcgggctcggccttttgaatgttcaaatattcgaattacttctcaagcggtgtgacttccacagtccaaccgagggtatcttctaccttaccggtctggatgccggtgacggtgtcgtacagcttctgactgaattcgccgatgccgccgtccttgatctgcatgacttcgttctcgtaacggagtgcaccgaccggggagataacggctgcggtaccgctaccccagcactcttcaagtgcaccggtacgggccgcctcaacgagctcgtcaacggagattcttctctcttcgaccgggagaccccagtgcttgcagagatcgatgcaggaagcacgggtaacgcccggcaaaatactgccgttcagcatcggggtgacaacggtgccgttgattttgaagaagatgttcatagcaccgacttcttcgatgtacttgcgctcaacaccgtcgagccacagaacctgagagtaaccttcgtcgtgtgcctttacctgtgccgcgaggcttgcaacgtagttgccgccggtctttgcttcgccgataccgccgcggactgcacgtacatagtcgtcttcgatccaaatctttaccgggtcgaggccgctctcatagtaagcgccgaccggggaaagaatgatgatgaatttataggtgttcgacgggcgtacgccgaggaacggatccgttgcaatgacgaacggacgaatataaagagaagtgccgggacggctcggaatccaatctgcgtcaacggcgacgagcgtcttgattgcattgaggaaatcatcggccggaatctccgggatgcaaagtcttctgttggaattgtttgcacgctcgatgttcttgttcgggcggaacagacggatgcggccgtctgcgcatttataagccttcatgccctcgaacatttcctgaccgtagtggaaaaccatagcagacggatcaaggacgatcggctgatacggcatgatcttcggatcgtgccaaccctgctccgggttatattccatcacatacatgtgatctgtaaagattttaccgaaaccgagcttgctttcgtctgccggcttcgctttaggcgcagtggtacgctcaatctggattttctgcatcaaaaaacacttctttcctgtttgcttatacacattttagcacgtatttgccttttttgcaagttgccgaggtttaaattgcaaaaaaagcttcacaaataaccgtttggctttgcgaagctttctgttctttttgtataaacgaatgcacctttacaggtgtgtgcgcagcccctttgggtaacgattcttcaaaacgccgttcgatgccttgccaaagcccgttacaataccgtctgcagcaacggcggtgtaaccggaaagcccctctgcggggatttcttcgccgcgcaaaaacgcgaataaagcaggatcgttcgatgtgagatgcagcacgctgcggcagttttccgcacggcttgccatgaaaatgccatgcgcgggctcgatgcggttcttttttgcctcgccgaattccacaccggcgcgcagaacggaaagtcctgcaatgtccggcagctcatttggcaataagatcacacggtcgcgcacgcgctggaatcttcccggtgcatcggtaaacagagatgtgtacaattcttcggcatgcgcctgcgtctctcggtcgggtttaaagctaaacggcgcaaaacgttcttcacatggcgcaacgcgtcggaagcgcgcggcaaagtgcccctcacccccgtccatcgggaaaatgcgcacagcgtctacgccataggccgggcgaccaaatgtgacattcggcttttcgagcacgaattccgggtggctttcgagaaatttctgcacaacgccctcattttcttccgtggagaatgtgcaggtagagtacaccaaaatgccgccttcgcgcacgcactgtgcggcggaggataaaattgcgagctgacgtacagcgcaggtctccacgtgctcaggactccattcctgcacggcaatgggatcgcggcggaacatgccttcgccggagcacggcgcatcaacgagcactttatcaaaatacccaccgagcttttccgcaagcatctccgggtatacgctggaaacgactgtattacgcacgcccatgcgctccaaattggaggataaaattgcggcgcgattgtgcacaacttcgtttgaccacaaaagcccggtgtcgccggtcagcgcggcaatctgcgtagatttaccgcccggtgcggcgcagaggtcgagcaccttatcccccggctccggcgccaaaagcgtgacggccgaagacgcggacggctcctgcgaataaaacgcgcctgcatgatagagcggcagcgccgccattttggtatctgtcggcgcataaaacgagagcggcgaaaacggcgtttgcaccagtgtaaacggcagtgcgcgttcaagctgctcttttgtgcattttacagtgttcaaacgaatgccgcgtttgtgcggttcattgtaagacgcccgaaacgccgtatattctgccccaagcatatcctgcattcgtttttcaaaagctgcgggcaattccatggccgccccacctttcctaatttcataaattcggtacataaacgcgcgtaccgtgcgcataatagctttcggaaggggtgaatcacatggcaaattccgaaaacaagaattacacaaacaaaaaccagaaacaaagccgcaataagagcgaccgtcagacaaccgaccgcgtgaataacggcacggaaaaccgtacggaaagccgcagtgagaaaagctgccggtaacacaaaaaaccggaaaaagcaggcaggcgatgcgcttgtctgctttttctatgcggatttattctttcggctcgctgaccggcttatcgcccgtcttgcgaatagctttgataatctcgccgagcgtgcggtcgtcggagcgcacgggtttgaagccctcaccggcgatttcaccggcatcgccgacgatgacgaacgcatcggggtcttcctcgcggataatctcgctgatgcggaacacctcaaagcgacgcacggcgcagaagagcacctcaccgtcctgcttcaaatagccgctgcgggacttgagaaacgtcaggccgcggtccatctccttgatgatgcggtcggcaatgacatcgtttttatgggacataatgaagaacattttgccattgcccgcatctgtgccgtacagaattgtatcgatgatttttgtcgatacaaaaatgacgatgcacgcgtacacggcgctttcaatgctcttatatacgatggcggaaaacagcacgacgcagccgtctacggcaagcatcagcttgcccatggaaagatggcgcaggcgatgattgagcagacgcgcgatcatgtccgttccgccggtcgtggcaccgcgcataaagacgagtgaaagaccaacgccctcacacacgccgccgatgagcatgatgatgagtgggtcaccgtggtagaccggcatgaacagcgccacgatgtcgatgcaggcagcgtttaacacgaccgccagcatcgttttggtgacgagcttatagccgatctcaatgatcgcccaaaggatgatcggcacgttaatgagcaaaatcacggtgccgacgggcgtgccgaacagataattcagcacgatggcgataccgctcacgccgcccggcgcaatgttgttcggcgcggtaaagccgttcaggccggctgcgtaaatgacggaacccgccgtcataaaaatcaggtcaagcaggaattccttcacgttttttgcaactttatttttacgcatgtgcggtttcctccgtttctgtaaattcaaggatcttatcgaagaaaagacgcaggcgctccagctcgcctttaaggtaaagataaccgaaaacgcattcaaatgctgtggctgcgtggtaatccgcaacgctggagtttttcggcacgtgcgaaacgtgcgcattgcgtccgcgcaggcagacttctttttcctcttccgtgaaaagcggcatcagcacttcactaagcaccttcgcctgaaactcgcaacgcacgaacgaaacggcgcggctgtgcagctttttcacggggcagttgcctttggagacgatatattcgcgcacgaaaagctcgtacacgccgtcacccacataagcgagcgttaaggggcttaactgcttcggatccgattccgtttgatagaacttttccaaatagccaccctcttagtttacaaaatcaaattcaaggtcatacatgctgaccgtgtcgccttcctggatgcccgcctcacgcagcgcatcgataacgccggtgtgaatgagcacacgctggaagtactggagcgcctcgtaatcatcgaaatcgacggcggagatgagctttaagagccaatcggcctcgacaaaatacacgttgtcctccacgcggatatcgacctttgccttgctgctgaattcttcgacaggctttaccggctccggttccggctcgaaatgcgcgaccggcggcagcgtggaaagcagttctgcggttttattcaaaagcgggtcaacatcatagcggattgccgccatgatcgggaagaattcatagccttgctcctcgacaaacttacggaaatcctctacctgctcgtcggtcgtcaggtcgcatttgttgccggcgaccagcatgggacggttcgcgaggtcggggttgaatttgcgcagttcctcgttgatgatgcggaagtcctccttcgggtctctgccctcgctgccggaaacatcgacaatgtgaatgagcatgcggcaacgctctacatggcgcagaaactgatgaccgaggcctacaccctgccatgcgccctcgataaggccgggaatatccgccatgacaaacgatggcgcgttcggcatatgcaccacgccgagcaccggggtgatggtcgtaaagtggtagtttgcaatgttcggtttcgcttcacttacaacggaaacaagcgtagatttacctacgtttgggaagcctacaaggcccacatcggcaagcagcttgagttcaagctgaagctcaaatgcttcaccgggtgtgccgggctttgcaaagcgcggagtctggcgcgtaggcgacgcaaaatgcgtgttgccccagccaccgcggccgcccttcgcgataacgacgtcttcgtctgtggacatgtccgccatgatgcggccggtctccgcgttgcggatcagtgtgccgcgcggcacggtaatgacgagcggctgtgcgcttttgccgaagcagcgcttgccgcgaccgttttcgccgcgctctgcggtgtacttgcgcttgtagcggaaatccgccagcgtggagaggttatcgtccacgcggaacacgatgtcgccgccgcgaccgccgtcgccgccgtccgggccgccggaagccacgtatttttcacggtgaaaagccacggcgccgtcgccgccgtcaccggcttttaccttgatcttagctatatcgataaacataattcatcatcctttcagcgccgcagacggctctgtacaaaataaaatgggcttctccgctttacccgaagaagcccgtttcatcgtatattcggggatacgaaaccgatattcccccaagggtcaaaattactgctcgatcgagtaaacgctgaccttcttgcggtcacggcccatacgctcgaaacgaacctgaccgtcaatgagcgcgaacagagagtcatcagagcctctgcctacgttctcacccggatggatgtgcgtgccgcgctgcttaacaagaatgttgcctgcgaggacgtgctgaccatctgcacgcttgacaccgagtctcttggattcggaatcacggccgttcttcgtggagcccataccttttttatgagcaaacaactggatattgatcttaagcattttgttgccttcctttcgttttattgtcagacttctgcgtagcgtacctgtaagttttcggggtactgttcctctaaaccgagaagatgcagcttaaatccctcaaacaggctacggcatgtccgtgcatcggtatcggaaaccctaaacagcatctcgccgtcctctgctcggagagaaatcggtgtgatgtgtaaaatctccagcacggtgttcgccgtcatatacgccgcagaagaaaccgcagcacagagaatgtcttctccctcctgcgccaaaccggaatggccaagcacggaaaaaccgagaagcgctccgtctgcatttgcgaaaaaatccgcacgaatcatacgatcaaattagccctgaacggactcaatctgaatcttcgtgtagggctgtctgtggcccatcttgcgcttttcgcccttcttcggcttgtaagtgaggatcgtaaccttcttagccttgccgttcttcaggaccttgcctgtaacggaagcgccctcaacatacggggtgccgatttttgttccgtcttcgccgcaaattgcaacgaccgggaacgtaactgtctcgtcttcattggcagcgagcttctcaacgtagatcacgtcgccgtactgtaccttgtactgcttaccgccggtttcaataactgcaaacatttttttctgcctgccttttctgtaatctcgctactcgtaggcggacttccgtcacttttcagcccacagtaagcggctctatcatattaacatacactgaccctaaagtcaaggtatttcaaagggattttgtggttttttcttcaagcagcaacgcaagcttgtcgtcctgctttaccgctttgatgacgctcttgcggtctgcgatgcgcacgatcaaagcaaggagaaaattcaaaaaggtcaggaacgccagaaacaggcggtcacggcgcttttggcgcttcagtttctccgggtcgcgacggcctgcaccgttacgctgtgccttactcatggctcttatacgcctgttcacagtacaggcaacgatagcggtgcgctttttcatcgcacagcacgaagatctggtcgaggttttcctccgtgcttgtgatgcagcgcgggttcttgcactttacaacatttttgatgcgacgtggcagcacgatgttctctttcttcacaagctcaccgtttttaatggtgcatacggtgatgttgttatcgataaagccgagcacatcgaagttgatggcgaggtcgccttcaatcttgatgatatcttttctgccaagcttgctgctgcgggcatttttgatgagtgccacgcagcaatcgagcttatcgagctccaaaagctcgtagatgcgcatacccttgcctgcctgaatatggtcgatcacaatgccgttttggatactgtcgatgttcagcatacggtttcctcctcaaaaagtcccggttcaatgttcagaagcattaaaatgagcgccatgcggacatatacgccgttttgtgcctgcacaaagtactttgcgcgcggatcgtcgtccacttcgaccgcgatctcgttgacacgcggcagcggatgcagcacaatgagatccttcggcgcaagcttcatcttctctgcatcgaggatgaagctgtcttttaagcgaatgtaatcttcttcgttgaagaagcgctcgcgctgtacgcgggtcatgtagagtacgtcaagctccggcagaacctcgtccatggtacggacttctttatattcgcagccggagggctttacgacttcatcgatgatataactcggcacatgcagctcttccggggagatgaacacgaagcggatgccctcccagcgcacaagcgatttgatgagcgagtgcacggtgcggccaaatttcaagtcgccacacagaccgatcgtcaggttattcagtctgcccttttcgcggcggatggtgagcaggtcggtgagcgtctgcgtcgggtgctggtggccgccgtcaccggcgttgatgaccggcacgcgggcgtactgcgctgctacgcgcggcgcaccctctttgttgtggcgcatggcgatgatatccgaatagcaggataccatgcgtaccgtatcggcaacgctttcacccttggaagcagagctgttctgtgcacttgcaaagcccaataccttgccgccaaggcgcatcatggccgattcaaagctcagacgcgtgcgggtactcggctcgtaaaagagcgtggcaaggatcttaccttcacacttgtgggcgaatgcggtgcggtcgtttgcaatgctgtccgcaaggtccagcagacgcagggtctcctcaaaggaaagatccagcgggtctacgaggtgtcttaactcattcatcttatctatgccttcctttcttatgtgcgccgtgtgttgcgttttatacgtggcgcaagtaaaaacaggctgtaaaaaacctccccggtaagcccggagaggttttcagcatcaatcttcgtcttcttcctcgggctcgttccagttgtgccaaacttgctggacatcgtcgttatcctcgagtgcatcaatcagcttctgcatcttgagaatctgatcgggatcggtgagatccgtgtaggtatccgggaccatttccacttctgcggaaacaaaggaatagcccttagcttccagatcgtcacgaacgccactgaaatcggacggttcagtatagatctcgaatacgtcttcgtctgcctgaaaatcagaagcaccggcctccagtgcatcgctcatgacggtatcttcgtcaaggccctcacgctccagcacgataacgcccttttcgttgaacatgaaggaaacgcaaccggtggtgccgaggttgccgccgaacttatcaaagtaatgacggacatcgcccgcggtacggttgcggttatcggtgaggcattccacgatgacggcaacgcctgcggggccgtagccttcataggtgatgctttcatatgcgttggagttgccctcgcctgcagctttcttaatgatgcgctcaatgttgtcgttcggcacattgttcgccttagccttcgcaatgacgtccttcagcttggagtttgctgccgggtctgcgctgccgccttctttaacggcaacggcaagctcacggccgatctttgtgaagatcttcgctcttgcaccgtcggtcttttctttctttctcttaatattattccacttggaatgtcctgacattgatgaaaacctgcctttattcacacaaattcaagttattatatcacagctcgcgcgcgatttcaatagcaatttcctgtgccttcgcgaaaatcgcagagttttcgcaatctgcacggtctgtgtccggcaaaaccaccgtttttttgagcgttgtgttcataacggaaaagctttggcgcagtgttttctcgcatacctccaccgcaaacggatcataccgccccatggtgagcagcaaaacggcatcgcggtgtgtcgcaatcgccgggcggatatcgcgggcaaatctagcttcaaaatatcgctgaaaacggtcgatgaccgccttgagctgcgccggaaacgagaggttatagaccggcgtggcgatgagaagcagatcacacgcgcgtaggttacgatcgaattcatcgaggtcgcgaaacgcgcagccgtctgctttttggcaatatccgcaggcgatacacggatgaatattcactttgcaaatgtcaagtgattttacttgccagtccttccctttcaatccgtcgagaaaagcttcaagcagcttctttgtgtgtccgtctttatgcggcgaagaaaacaaaacgagtgcatgtttcatgtactggcctcctattctgtgaagtaaaaagcctttgcaaagctatttaacttcacataaatgtaaaaagagcgctgtgaatttacgcacagcgctctttaaaggattaaccttttacaacaatattgacgagtttgcccggaacgtaaatctctttcacgacgttcttgccgttgatctccgctgcaatgcggtcttccgcctttgcaagtgcaatcgcgtcatccttctggatgtcggctgcaacggacaatcttgtgcgaactttgccgttgacctgcacaacgatttcaatgacgtcatctttgcacttcgattcgtcgtacttcggccaaatctgctctgtgaccatgccctcgccgagcttcatctcactccaaacctcttctgttacatgcggtgcaaacgggttgaggagcatcgtgaagacggagagctctgctttattgatggagcccttttccgcaataacgttcatgagcgccatcaaagatgcaatggcagtgttgaacttgaggttctcaatgtcataagagaccttcttgatggctttgtggaaagaattttccatctccgggcggatcgcttcgccgtcgacaagaatggactgcaggttccaataacgctcaatgaagcggcggcagcccttgatgccggcgttgctccacggtgcggccttctcaaagtcgccgatgaacatttcgtagagacggagcgtatctgcaccaaactcgtttacaacgtcgtccgggttgacaacgttgccgcgggacttactcatcttctcgccgttttcaccaaggatcatgccgtggctcgtgcgctttgcatacggttctgcggttgggacctggccgatatcgtagaggaacttatgccagaaacggctgtacagcaggtgcaacgtggtgtgctccatgccgccgttataccagtctacctgatgccagtagttgagtgcttccttggatgcaaaagattcatcgttgtgcggatccatatagcgcaggaagtaccaggaggagcctgcccactgcggcatggtgtccgtttcgcgcatggccttgccgccgcacttcgggcacgtggtgttgacccaatcggtcatcttggagagcggagattcgccgttatcggtcggctcgtaggaatcaacctgcggcagaacgagcggcagctcgctttcatcgatcggcacatagccgcacttctcgcagtgtacaatcggaatcggctcgccccagtagcgctggcgtgcgaatacccagtcacggagtttatagttgaccttacggtggccgatgccggtctcctcaaggtaatctttgatgcggactttcgcttcttcgacggtcatgccgtccagaatgccggagttgaccatgatgccggtgtcgcagtccgtgaacgcttctttctgcacatcgccgcccttaacgacttcgatgattggcaggtcgaacttctttgcgaactcccagtcacgggtatcgtgtgccggaacagccatgatggcgccggtaccgtaggaaacgagaacgtagtcggaaatgaagatcggaatggtggtaccggtcagcggattgatggcctcaacaccctccaaacgcacgccggtcttatctttcgcgacctcggtgcgctcaaagtcggactttttcgcggcctctgcctgatacgcgcggacggcatccagattctgcagcttatccgcccacttttcaatgaacggatgctccggggaaacgaccatgtacgttgcgccgtaaagtgtatccgggcgggtcgtgtaaacagtcagcttatcgcctgcggtcgtgttgaaatcaacctcggcgccctcggaacggccaatccagtttttctgctgggtcttaacgcggtccgggtaatcgacaagatcaaggtcgtcgatgaggcgttgtgcgtaagcggtgatcttcagcatccactgggatttgaccttgtgaataacttcactgccgcagcgttcacagacgccgttgacaacctcttcgtttgccagaacgcatttgcaggaggtgcaccagttgacggacatctcttttttgtaggccaaaccgttcttaaagagctggaggaaaatccactgcgtccacttgtagtatttcggatcaatggtgctgatctcacggctccagtcgaaggagatgccgagagactgaatctgctgcttaaagcgcgcaatattcttctttgtgatctcttccgggtgcacgtggttcttgatggcataattctctgccggtaggccgaatgcgtcccaaccaatcggatagagcacattgtagccctccatgcggcgctttctggaaacaacgtcaagcgcggtgtacggacgcgggtggccgacatgcagaccctgaccggacgggtacgggaattcgatcagagcataatatttcggcttatccgaagtattggaagcatggaaaacaccggcttcttcccacttcttttgccacttcggttcaatttcactggggttgtacttgttcatattgattacacttacctctctgcgctatataaaataacaaaatcaattcggttcaaacgtcatgttgagcttttcgccgtcgagccacaggcgatccaaatcataaaaactgcgcgcttccgaggtgaagatgtgtacgaccactgtttcgtaatcgagcacgacccaggaatcggagcgatagccctccacgcggtccggcgcaatgccgagctctttcagcttaaactccagctcgtccgccagagcatgcacatgcgtgctgccggtgccgttcgccagaacgaaataatcaccgagcgaggaaacgtccgaaatgcggatcacattgatctgatcggcttttttcgcatccaaaatgcccgctgcggtttttgcaagcgtcaatgaatccatgcttttagccattcctttctgcgcgctgcgcgatttttatgcttccttccgcttagttgccatgccgcaaagcccacaccgcgtcattatatgcgtctatggtctccggcacgatgggcgcgcggtcttttgcgagctccgtaatggtgaacgcgatgccctccacaatggctttgtcgaggcttttatacgcggccttgcgcatatcttctacgccggggtaattgcggtctttggagatgaaatccgcgataaaaatgactttttcgagtaacgtcatgttttttctgcccgtggtgtggtatcgcacggcattgtaaacatcctcgtcctcaatgtgcagaacatgcttgatatacaccgcgccgctgatggcatgccagaactttttagcggaaagttcaacgtcactcatgattataccaaagtccgcgagaattttcaactgtttctccgggggtgtatccttcaaaatatcatgcaaaagccctgcaagctccgctttttcggtatcggcaccgtatttttttgcaagctttaccgcttcttccgaaacatttaaggagtgttcgaaacgtttttgcgtgagcatgggcttgatgatatcgatatattgctgtttttctttcttattcatgcgcgtaaagcctctttttttggatgtattccgcgacgcctgcgggcacaagaccgcttatatcttcgccatgcagacttttttcgcgcaccatcgtcgatgagacaggcaaaaactcgatgttctgcacggtaaagcgaagctgcgggaactttcctttcacttcttccccgtgcgtgacaagcgtttggaagctatccttgtcacgcggtgcggcgcagatctctgccgcggcgaaaatgcgctccgggtgataccacttttcgacagtgcagaacatgtcttcccccatcagcaaaaagagctcatcgtcgggatattgcgctttcagttccgtcatggtgtctgccgtgtagcttttgcccgtgcgcagcacttcaatatccgagactgtgacgggacattcggcgatgtccgccgccgcaagcctgcacatttcaatgcggtctgccccgcttgcaagctgatgtgtcgctttgtgcggcggcgtgcccgtcggaatcaaaatcacgcggtcaagcgacagacgcttaataaattcccgcacaaggtgcacatgcgccgtgtggatgggattgaacgtgccgccgtaaatgccgatgcgcatggcttatgccttttttgcacgcggcaggacgattttcggatccttttcgttgcgtttataaagcgcaaatttggaaccgatgacctgcacgacttcgctttccgtctgctctgcgagcgcttctgcggcttcacgcggagagaccggcgcagtctccaacactttgcccttgatgagttcacgcttaaaaatagcgtctgcagcctgctttacgacatctccatcgatgccgcccttgccaatcatcaaaatggtgtcttcatttacggcgagcgagcggagatacgctctttgtttactggtcagcataatttatccctctttgtctttcaggtagttttcaagtttttctgcgaaaatacgcaaggattttccgcggtggctcacggcatccttttcttctgccgtcgcttcgccgaacgtcttgcccgcgcagccttcttcggtgcagatgaaaatggggtcataaccgaaaccgctttcgccgcggcattcctctgcgatgcgcccgtagcagtagccctcagcttcaagtacgtcgccgttcgggaatacacagcagatggcgcttgtaaagtgtgcgccgcgcttttcttccggcacgcccttgagcttttcgagtaccgttgccttacgcttgcccggctcggcataccgtgcggaatacacgcccggctcgccgtttaaataatcgatcgataagccggaatcgtccgcgacgcacggcaggcccgtttcgtcacacgcggatttcgccttgatatacgcattttcacggaacgtggtgccggtctcttccgcctcggtcagctcggccgtctgcacagtgatgccaagcggtgccaaaatgcggccgaattcttctattttatgcgcattatgcgttgcaatgatcatgttcatgcgttatccctccaaaattccgaaatcgcgtgcggcttgctgccaatgctctaaaagtacggggccgcccgctgcaagctcttctgcgcgctgcacgcagaaaagcgaataatttttgccggtgtaaagctgttttaaaatcgcatacccccacacgcccgcgcggatcagcagtccgctttcgcggatttcccgcgctgcggcgtcaatgtcatacggcacttcgagcagcgtttcgttccacgtgtttccgtcggaatcgagcagcgccattttcgccgtgacggtttgcgtacactgcacgccgaccgcaccggggtttacgtacagcttgcccattgtgtgcgcgctgcacggctgatgcgtgtggccgcttaaaagcacgcgctcgtcgatttttaaaagccagctttctattttataggagaacgggcgcagcgtgtcgcgcgttttttccggtgagccgtggcaaatgcgtatgggacacttgccgtttggatcaatcgtctgcataaacggcaatgcggagatgaactcgagatcctccgccgtaagcccctcgtaggtgtatagaagggagcctgttgtagtgccgtttgcccaatcgctgccgaagttgtggtggttcagcacgtattcttcgcggttgccgcgcacgaaccagcagggcatttcctgctttgcgcggtatattagcttcatggtctcgtgcgggtttgcacagtccgaaatataatcgccgaggaaaatgtacccatccgctttttgcttttccgcttccttcaggcaagcttccagcgcatggtggttgctgtgtacatcggaaaaaacggcgagcctcatgcttccggtctccgctcgaacagcgcgcgagcgaaatcctccgcgtcaaacggctgcagatcgtccacctgctcgccgacgccgatgaatttcaccggcaaaccgagatcccggtggattgccaacacaacgccgccctttgcggtgccgtcaagctttgtgagcacgatacccgtgagtcctgcggcttctttgaattcacgcgcctgattgacggcgttctgccccgttgtggcatcgagcacaagcaaaacttctttgctgcagcccggcagacccttatcgatgatgcgcgagattttggaaagctcgtccatcaggtttttcttattgtgcaggcgtccggccgtatcacagatgaccacattggcgtgacgtgcctttgccgcggagattgtatcgtacacgacggcggcggggtctgcgccctctgcatgcttgatgatcggcacgtctgcgcgctctgcccagacttcaagctgctcaatggccgccgcgcggaacgtatccgccgcgcccaaaattaccgatttgccctcttttttgaggcgggaagccagcttgccgatggtcgtcgttttgccgacgccgttcacgccgatgacaagaatgacggatggctgcgtatcgagatgcaactcgttgtcgccgctgaccatctccgtgacgacctcctgcaaaagcgtcataatctcgttcgggtctgtgatgccgcgctctttcacgcgtgcgcggagcgtatcgcagatttcggtcgcggtgttcatgccgacgtccgccatgacaagcagctcctcaagctcctcaaacagctcctcatcgatctttgtgaacgcgtggagcatgctgttaatctgcccggtgatgctgtctcttgtttttttcagtcccgctttgatcttatcaaaaaagcccattcaggcacctcttttccgaatttatgttgttatacccagtttttcctgcgcttcgtgtgcgtgcagtgccaagagtttcgaaatgccctgatcctgcatcgtcacgccgtagagcatatcagcttcttccatcgtgccgcggcggtgcgtgatgacgatgaactgtgtcttttgattcatgcggcgcaggtaatttgcaaagcgcacgacatttacgtcatccagcgcagcttcgatctcgtcgagcatacagaacgacggtggatttacgcgcatgatcgcaaagtaaagcgaaattgccacaagcgccttttcgccgccggaaagcagctcgatgtgcgagacgatcttgcccggcggatgcacgcggatatcaatgccggaatgcagtacatcgccgctgttcgtaaagcaaagctctgccgagccgccgccgaacaactcctgaaaaatccggctgaaattctgattgatgacggaaaagcgctctgcaaactgcgtctgcatctgctttgtcaagttgtcgatgagctttaacagttcggcgcgggagcgctgcacgtcgtccgtttgcgttttgaggaaattgtagcgctccgaaacctctttgtattccacaacagccgccacgttgacggagccgagcgctttgatgctgtttttgagttcggacaaccgcctttgcgccgtgggcacatcttcaatcgtaatgttcatttcctcggcttcgcggcgggtgagctcgtattcttcccacagctttttgaggatagcatcatattcaccgctctggttttcacggcgttcgcgcagacgagcaagttcaaggccaatcgtctcgcggcgcgaggaagcttcgcgttccttttggcgcaactcgctcgtctgttgctcgagtaccgtgcgctttgcggcgatggcgctgaccgtttgccgtttttcctttgcggtctcacgcagattggcggattcaatttttcgattttcaatatccgcttcgcgcgctttgatcttcttgaagctttccgcaagttcttgatttaaactttctatacgtgcagcgcgttcggactgctgtgctttcagcgtttgcacagcattttcaagcgattctttatctttttcgatggcgagccccgcaaaacggatttcctgcaaatgctgcaaggtctcatcacaacgatgcattgcgtcctcgcggtcgccgaccatggattctattttgcttctggctgcctgaattttgtcttctgtttcttctgttttctgctgggcactgtctgcggtctgcacaaaaccactcagacgctttgcggcactttctttttcgtcgcgcagagaaacaaggttcgcggtttccgtctccacgtcgcgtgcggcacgggccgcttccgttttgaagcggatctcatcttccctgtgctgcgccagcacggccttggcgttttcaagctccgccatggcctgcagcacttcctgctgtgtagccttgtggcgctccagtgtttcatttgcggcctgcgccagcttttgtgcgtctgcgcgaatgcgtgcgatttccgccgagcggctcaaaaggccggaattgcgcgccgcggaaccgccggtgaacgaaccgcccgcattgacgatctgcccgtccaagctgacgacacggtagcggaaccgaatacgccgtgcaatctccgccgcgcggtcaaggtcttctgcaacaatagtgcggccgagcagagaatcgcggatgccggcgtactgctcgtcacagtggcagagtgttgaagccacgcccacaaagccgggcatattctgcacatcgcgcgcatcgataaccgtaccgcgcaccgtggtcagcggcaggaatgtcgcacggccggaatcgcgctgtttcaataagcgaatagccgctttcgctgcatcttcggaatcaacgacgatgttctgcatggcggcgccgagcgcggtctccagcgccacggcgtattcgcgcgggacttttaaaagccgtgtaacaggtccgtggataccacgcagattgccgcgcgtgctctcgcgcatgacggttttaacgctctgcgtgaagccttcaagattgcgttcaaggtcttccaacagtccggcgcggcgctctttttctttggcgtcgagcatttggcggtcggcttcggctttcacggcttcggcgcgttttctgcgctgttgcacacgcatttcatgcccctgcacagtgttttcagcattttgaatgtactccgccgtatcgtgcagcatggcgttaagctcctcgcactccgtgtgaagcgctgcaaggcgttcttcgctttcggtgatcgcagcatccactgtttcggcgcgggcgcgaatctcctgcatggaggattccgccgaggactgctgcacgcgcatttcggaaagtgcggcgttcagtgccacaagttcagccgaaacggcgtcgatctcacgcgtggtgctgtccgtgccggcacgcagctcctcgagttgtgcggtaaaggcaacgaaatcggcatggttctgcgcagcttccgcttcctttgcttttaccgcctgttctttttcttgaatatccgcttcaagcgtttgtccggtcagcgcggcgctttcaatctcgccatttaatctgcggatggtctgctgctcgtgcagaatatcattttcaagcaccgaaacttctccctctttacgggtggcgagttcatcggcttcggaagccttcaaacgtgcttcttccatctgtgcggtgcagccgttcgtttctgtgaaattctgctcgatttgcgcggaaagcacattgagctcactttcggcttcctcgtagctgttctgcgcggaggcaatcttttcctccacctcgcgcacgatcttgccggagcgctccagcgtttcaagccacagaccgatctccagttcctttttctcgctgtcgagtgcaataaacttttcggctttctctgcctgctcgcgtaaaggacccacgcgttcttcaagttcgtttaaaatatcgtgcaggcgaatgaggttttcttcggctttttccaagcggcgttcggcttcctctttgcggtagcgaaagcgcgaaatgccggcggcttcttcaaaaatctcgcggcggtcttcgctttttgcggagacgatgctatcgatcttgccctgtccgatgatggaataaccgtcgcgaccgaggccggtatccatgaacaactcatgcacgtcgcgcagacgtacgagcgttttgttaatgcggtattcactttcgccggagcggtaaaaacgacgcgtaacggaaacggtgtcgccgtcgtaattcaactcgcggtcggtgttatccatggtgacggtcacttcgcaaaagccctgcgctttgcgctgcggcgtgccgctgaaaatgatgtcctccattttggagcagcgcagtgcgcgggtagactgctcgccgagtacccaacgcatggcatcgctgatgttgctcttgccgctgccgtttggaccgacgaccgccgtgatgccgttttcaaattttaaagtcgttttatcgggaaaggttttgaagccctgcagctccagagattttaaaagcatctgtttacctgcctatcgtagcctgtatgtgccgccggaaagcgaagcatccgggcggatgtgcacggtgtagccgtgcttagagaaatgctgcaaattttcttttttctgtccgagcgcaatggaaagcatgcgcgggtcaacatcgatcgtaacttccgaatcgtttcgggcttgaagcgctttaaggacgttttcgcggaagatcgcgctgcggcacagctccataaaagcggggtgaaacggtcccgcgacacggttttccagttcttcgctggcgtgcagccccacacggatgagctttacaccgcgctgctcaatcatcgggatgagctttgcgcagagtgaaacggcatcctctaaggtctgcggtgtgtattttcctgcgcggtacaaatcgcatagtggtgtgttttctaagacgatcgtagggtaaatgcgcatggtgttcggctttagagccaacagccttttgacagtcttcatcgcctttgcgtcactgtcgccgggcagcccggtcatcatctgcaagccgagctcaaagccgtatgcgcgaattaaccgcgcagcgttttccacatcctttgcggtatgcccccgacgattgagcagcaacacttcgccatccatcgactgcgcaccgagctcgattgccgttacgccgtattgctttaatacggtcagacgttcatcatcaatggcatccggccgcgtagagcagcggataccggcaaagccgtatgtttcgcatgctgcgtgcgctgtttttaaaagcgccaaacggtaatcggggtcgattgccgtgaagctgccgccgaaaaatgcgatctcggcgttctgcacgcgctcccccatttgctttgctgcgctttgcagcagcgccgccacttcttcaggctgcggctgatgattttcacctgtaatgcggttctgattacagaagctgcattgctgcgggcagccgttgtgcggaataaaaattgagatattcgcgtgcttaatagcccatcagctccagtgcttcgcgtgccgcctgctgttcggcttccttcttgctgcgtccgccgcccttgccgatgacattgctgttgaggtgcacctctacggtgaagtgcttgtcatggtcggggccatgctcgccggtaagaacgtattcgagccgttcaccggggttctgctgaatgatctcctgcagcatcgtcttgtggtctttaaacgggcgttcgcctgcagactgcgccgccggttcaatgtagtgcagtacaaagcgcttggcttcctccaagctgccggaatcgagatagattgccgccgtaatggattcgaacacgtccgctaagatgcttgggcgttctctgccgccgctgtgctgctcgccgtggctgaggcgcagcagctcgcctgcgccgaagctgcgtgtaaacccgcaaagcgatttttcgcatacgagcgccgcacgcttctttgtcagcttgccttcgggaatatccgggaacgctttgcacaggtattccgccgtgacaaaccccaaaatggaatcgccgaggaattccagtcgctcatagctctggtcgccgccgcggctctcgtttgcgtaggaggagtgcgtcagcgctgtgatgagcaggttgcgattcttaaatttatatccgatctttttttcaaattcatccaatgatctcatagttatacctttgctgtcttgttattcgttcgtgttttccgttttctcgttttgtagggctgcggtgatttcacttataatgccggactcggcgtacttcaccgtaagcgcaatggcgtttttcagcgtggaagccttggcgctgccatgtaccttaaagaccggcttcgagcacccgaggatcggcgcaccgccgtattcgttataatcaagctcttttttcatggctttcatgtcgtttaaaaccattgccgccgcaagcttattttttaggctctttttgaaaacggccttgaatttattcatcagcgccatggcgacgccttcatacatcttaagaaggatattgcccgtaaaaccgtcgcacaccacaacgtctgccgcatcaaacggaatgtctctggcttcaatgttgccgatgaaatggacgtctttgttttcgctcagcagtgcaaacgccgcgtgctgcaattcgccgcccttgtgcggctccgtgccgacatttgcaaggccgatgcgcggcttttgaacacccatgaccttctgcatatacacagagcccatcatgccgaactgctccagcatttcggggcggcattcgttgtttgcgccgccgtctgccagcatgaaaaagccctcggatttcggcatgagcggtgcaaatgccacgcgcttgacgcctttgatgcgcttgacgagcaatgtggcgccaacgacgagtgcgccgctgttgccggcggacgcaaacgcatcgcccttgccctctgccaaagcgcgcaggccaaccgccatagagctttgctttttggcgcgcgtgatcgctgtgggctcatcctccatcgtgatgacatccgggcagtcgatgatctcaaaatcggaaacgttaacgttcagcttttccgccgctgctctgatcttcttttcgtcgccggttaaaacgatctgcacatggagctcatctgccgccagacggcagccttttataatttcgtccggggcgttgtcgccgccgaatgcgtcgattatgatccgcatgtttttccctcactttaatattcagcttccggcaaaagccggttttgttcgggcatttcggtttatcaaacacggattttccgccgataaaccgctttagactataattcactctattatagcaaaataacaacgcaatttcaataccgcgctccccataagttgcacaaaacaaaaaacgtgcgccaggctttcccggtacacgtcttttgctgatttggaggaaaaattttgagttttgatttttagaatttatccggcaggcggatctcgcggcgcacggctgtgccgtcgatctcgttaaaccgcacggcttcgttctttacggccattgcggcggcaatgcccgcggcctcacccatggaacggcaggtgggttggatgcgtgcggcggactgcgcacggaaatccatacccgcgcagcgcccggctgtaagcacgttatcgagcgttttcgggatcatcacccggaacgggacttcccaatactgttcatcggccggtacgtcatgctgatatttgagtcccagcgaaacatcgtccacgccgtgcacatcgatgggataatggctcgcagcaatgccgtccgggaattttctgtacgtcagcacatcttcaatcgtcagcatgtattctgcgtcgatgcggcgggattcacgaaaaccgacgagctgcgcgatgcttgtgatatacgcgttctcaaagcccggaatataatcgcgtaggaatttgcgcaggcgcataatggcttttttgccctcaagctgcttttgcgtcataaattccgcatccacaacgttttctttcgtcgttagttccgggcagttgaagttcatgccgtccgggcggccgggaataccgaatgcctgaaaatagcacgcgtcctgctcggtcagcacgccgttttcatacgccttgcggataatgtctttcataccgggcgtgttcatagcaaagtatttatattggtcgttgccgaggctgcgcatgtacgcatggaaacgttcaaagtcaatacccgccatgtcaaagcgcagggagaccggctgattcatgcggttgtggttgccggactgatacgacgcaccgacgagcttgatgaggtcagcgtcaccggtgcagtcaatgaagcacttcgctttgtatgccgcaaggccgttcttattgttgacaatcacgtgtgttattgtgcgatcttcgagcacggcatccacgagcgtggtgtaatacagaatatcgcagttactgtctgccgccatgtcttctaacgtgatttgcaccataacggggtcaaaagagttggcgtcttcctctgtcccgccgacggcgcgcaggcgctctacaagctctgcactcagcgggcagtggccgttataatttttgatgtgcagcgacatcagcggcagcacaagaccggtggtagctgagccgccgagcgcgccaaactgctcgatgatgagcgtacggctgccgcggcgagctgcagcgatgcccgcaaaagcgcctgccgtgccgccgccgagcacaacggtgtcaaaggtatcgatgatcggtattttcttttcgggaatatgcagtgtgtccatatacattcctttctttatggagaggatcccgccctccgccgtgcgggcagaaggcgggatcgctttcttcatatcacaatatcacatttttaaggagaggctgtaaaattattcagagtaggacttatttgcgtcgtagaattcctgcatagcagcttcgacttcaaggccaccgtttgcgtcccaatcggcctgcatcgctgcaatggcggtatccgggtcggtgccctcaacgatcgctttcaggaaggaatcgccgaatgcctgattcagcgctgtgacatactcctgaaccttcggagaggtcttgccgtaaagctcaatggagatgagcggctcgtactcgtctacgcgagagttcatcgcttcataagcttctgccatttccggggtctttctcgctctggcctgccacattttgaaagatacggtcgggtcgctgataccggagagcttatcggaattcgtatatgcattgaagttcgttgcatcgtcgccggtgaagattggggtgtagttgccgtcaatcacttcgtaggaaacgccttcttcgccgatgtaggttctgcggtagttatccggttcggagaggatgttgagccagttgatggcatgctcggggttcttggagctctgcgagatgcaggaaacgaagtttgcgcccttcatgatgtagtgtgtgggcttggaattcgcatctgccgcaaggtccgtcacgaactcaatcttgcaatccgggttattcgttgccagtgcgttgaccatagccggaatgtcccagaacatcagcggtgcgcaggcaacagcattggcgcttgcaaatttttctttggcgttatctgccgtgttgatcggcatatcgttatccatgaggccttctttgtagagtttctgcatgtactcaagatacgcggtgatctgcgggtgcttgattctgtgtgtgtaggtgccgtcgatgtcgtaccattccgcctcgcccatgccgaagccggagagcaggacctgaatgaatgtgctggacttgttggaggtcagcggtgcgaagccgtacttctcttttgcggcctcaaggaacgcggtgaagtcatcgatgttcgtcggtaactccatgccgagctcttccagcatatcgctgcgcacgccgatgccgccggtgagcataccgtacggttcttccttggaagccagcatgttttcatgcggaataccgtttacaacgccctggtcgttcgtaacggactgccatgcaagctcactgatggaactcttgatgttggagccgtacttgtccagcatgccggaaaggtcgatcaatgcgttctgcttagagagctgtgcatactggctcggagaaactctgagcaggatgtcgtagtctgcgccgctggagacctcaagcagaagcttctggtcggcgttatccgccggcagagcataccacttggtcttgtagcctgtgagctcttcgtcgattttccatgtcggctgctcctcatagttataagcctgatacatgctgagaatcttcaactccggcttttcgcctgtgaggatcgggtcgtcctcggtggcttcggattcactggaagccgtgctgctttcggtgctgctgcctgaggaagcggtgctcgaagacgatgaggatgtggtcgtgctaccgctgcaagctgcgagagagaggatcatagcagctgcgagcagtgcgctcaatactttcttcatgttgtaactcctttgctgaatgaattttattcatgcaatagtcccctattgcttgataacggatttaatgttagcccttaacggaaccgatcgtgatgccctttacgaaatacttctgtaagaacgggtatacgcagagaatcggaatggtggaaacgacgatggtcgcggcgcggatattctcgccggaaacgttcatcgcctggttcacgtcgccgaagttgccggaggaatcctgcaagcttgttgcctgcgtgacaaggtcgaacatgtactgctgcaggggctttaagtttgcgtccgtgatgtacatgacgccggcaaaataattgctccagtaggcgacggcgtagtacagcgtaacggtggcaagcaccggcgtggacatgggcagtaccacactgaagaaaatgcgcatattcgatgcaccgtcaatgcgggcggcctcttcaatgacctccggcagcgtttcaaagtagttcttgatgagaaacagattaaacgatgagaacatgccggagaaaatgagtgcgaaaatggtgttcgtcaggtgcagcgtgcggaacaagatgtagtttggcaccatgcctgcgctgaacagcataataaaaacgaaaatgtaaaggaagaacttgcggccgataagatgcggcttcgagagcgggtaggctgccataacggtaagcagcattgcaccgatggtgccggtaatcgtgaccgtcacggtgacaaggaacgatgtgccaaactccggcgtagtcaagacgtactttatggtaccggtctggaacccaagcggccaaaagagcaccttgcccgcaatgacgttgccttcgctgctgaatgcttttgccacaaggtttaagattggcatcagcatgataagaccgacaaggatcatagcgatgaggttgacaacatcaaacacagagattttgtttttctttttagttgtttttgccatggcgttaccaaatcccctttcctgttgcttttctggcaataaagtttgaagagagaacgaggatcatggaaatcacggagttgaagaggcccacggcggtgccggtgctgaactctaacttgccgagacccatacggtaaacatatgtgccgataatgtccgccacatcgtatacggtcgggttgtagaacacgaagatctgatcaaagccggcgttcatgatgttgccgacgcggatgatgagcataagaacgatggtcggcagcaggcttggcagcgtaatgtaccagatcttctgcatgcgcgtcgcgccgtccacgtccgccgcttcaaagcactcctgatcaaagcctgcaatggcagcgaagtaaatgatggagctccagccgatttccttccacgcgtctgcaatgacgaggatgccgcggaacttgccgctgtccatcagaaagctgacaggctcgaatccaagcgatgtgataacagagttgatgacgcccgtagagccgaggaacgaaacgaaaatgccgtagatgacgacccaggaaaggaagtgcggcaaataaacgatgagctgcaagcccttctgaaatttcgtgctgcgcacttcgtttaagaacacggcgaagataatcggcagcgggaacgtgaagataatcttatacaggctgatgatgagcgtgtttgcaaacgcctgctggaactcagactttttgaacacctgctcaaaatacttgaagccggcccacgggctttccaaaatggaacggaacggatcacccggtacttgaaacatgttgtagtctttgaatgcgatgagaatgccaaccatcggcagcagatgaaagatgaaaacgtaaatgagcgccggaagcagcagcagatatagatcgaagttttgctgcaaatacttgcgtgccccacccttctttttcatttttgcgtatccgtcctttcttccccgaagaccccaaattcttttccttcggttgatgaacccattttacagcaaaatgcagcaaaaaggaatgaactttcttcctgttttttgtcattatttaccgcgtgtttatttctgtttcgtgcaaaatcgcacaggaaaaaggagtccctttcgatacatttggaacggaatattttgaattatatcaaaaatcgtagttgtgtgctaatttatcgttgatttccgtgacttcttctaaaaaatcctactatttatgccgcagttctggaaatttgccgtaaattctgttataatgatgacaatgtagcaagccatacgcacaaagattttcattttgtgcttgttttcgacattggggaaatgccccggtcgattctttggggaggatttggaatgtataaaatgatcgttgtggacgattccgagatgacgcgccagggcatacgcgcttctgtaaactgggaagtgatggacgtgcgcatcgtgggtgaagcagcagacgggttggaggccatggtgctcatccacgatacggacccggatatcatcatttgcgacatccgtatgccgaagcttgacggcattgcactcatcaatgaggtgctgccctctcacccctctctgcaggtcattttcttcagcggctattccgataaagaatacctcaaaaacgccatcaagctcgaagctgtggattacctctataagccgttgcaactgcacgagctcatcggcgccgtggaaaaagccaaaaagaagtgtatgaacaagaaagtgcatctgccgcagaacgaagccgatcttgcgctttcccttttgcagtgcagcgaaaacgagatcccgtctgatctgccgctggatctgcatgcgccgctcgtgactgtcatcgtgcagatgatgaatacggcgggcgagcacatggcagaccgcgcgtacgacaatcagctcgacgatctacttttggcttctcgccactacttggcgttccaaacggtcgcggcgcgcgtgttcgatggtaaatttgtgatgtcctgcgcgggtaagggctacattctgcacgcgaatgtttcgcaggactttttaaaccgcaaaacggcggaggtgaagctcagcccgttcttcaccacgctcgacagcggtcaggccgatgtggtcgtcggtgtgagcaatttgtgtacggatttcaaatatctgcgcgaagcatatgacgaagcccgcgcagcggtgcgcgccgcgttcctgctcggctacgggcgcgtaatcttttacagagatttgagccaaaagccgtttgtgccctcgcaggatatgcagcgcgagctgtacgaccgcattttggcaaacgatttcacgcaggctacaaattttcttaacagctatattgattcactttccgcctgccgcgagcaggatattccgcagattcgcgaggcgctcgcgtccatcgcatattggctcagccgtcagggcaagcggaacgagcaggacggtagccagtatatttcggagttcatccactttgcgccgagcctttccgtcgtgcacgattatctgctcacacagctgcaaaagcacatcgacagcatctcgaacctcgataacaaaagtcgcatcgtgctcgaagtggagcagtatatcacgcaaaattacgataaggaactctccattcgtgagatcgcccagcgcgttttcgtaacgccgaactacctttgctacctttataaaaagaacaccaagcgcacactgaaccagtttattctggataccaaaatgaaaaaagcccggaagcttgtgtgtgagacgaatatgaagttcggcgagatcgccgatgcgctcggctacgcgaaccagaactacttcacgcgtttgttcacgaagtatttcggcgaaagcccgcgtgcgtaccgcaacaaatacggcagcatttccttttctggcacggagggcgaatgatgatgaaccctttctcctaccttgcgctgcggtataaaaactgttctatgcacgtgaagctctttgcgtcgtacttccttcttatttttattcccatcattgccctcacaatgttcgccacctaccagagcacaaagatcatcgaaaagcaatcgatggagatcactgggctttacttacagcaaacggaaaatgagcttgaatctgagcttaaccgccttgcgaccatatcctcctccgtggcgcagcttttggatgtgcatgaggtgttggaaaagcaagatagcaacatcagcttcagcgaagaatacgatgacatgaatgcgttgtacaaaacaattgaatccacgcgcacgctgtacggcgtatatcaaatccggctttatatcagcgattcgtttcggtatagccgcagtcactacattacgtatccgttaagcgaaatttccgatgcggattggtataaacagcttttggccgaacacggcatgcgggcgtttttgccgccaagcacatttcgtcagccgctgttggagccgcaggaggttctgtccgttgtcacgctcattcgcagtcgcaaggatatcaacacagtcctcggtgcggtgcacgtggatattttgaaaagcgatgtattaaacatgctgcgccacggcaactacaccgagccgagcgcggcctatcttgtagacgaaaacctcaatatcatttgcggtgcggacagctctctgacgctttccgatgaagagcttgcggctgatattcatgagcttcaaaaagaaacgggttcattttccggtgtgcagacgcaaggcgaatcggtgttcggtctttccgcgcccgttttcgacggctgccgcatattcacggtcgcttccatgaataacctgctttctcccgtcaaagatctgcgcaatcaaatgattgtgctgaccatcatcatcagcgtaatcgcgttcattctctcctatgtctacgcaaaatacagcacgcggcgtatcaaaacgcttgcaaagcaggtgcagcgtgtagaaaacggcgatttaaatgtaagctgtatcgtggacagcgacgatgagatcggcgagctgcaaaacagcttcaatttcatggtgcggcgcatcagcgtactgattgacgagcggtataacctcggcaaaaacctgaaggacatggagctgcgcgccctgcaggcccagatcaacccgcattttctctataatacactcgatctgatctcttggaaagcgaccgcaaacggcgatatggagacggtggacatcgttgtgaagcttgcgcgtttttaccgcctcagtctcagcaacggcagtgatttcctgccgctcagcgatgaggcggagcacgtgcgactgtttgtggagctgacgaatctgagtcgcggccgcacggtggagctcatcacgaaaatcgatccgtctattgcagattaccccatcatgaagctcattttgcagccgatcgtggaaaacagcttgtttcacggcttatatgagctcgatgaccgcgcaggcgtcatctgcctgtccgccgagcgcatcggcagctatgtgcagatccgcatacaggataacggcatcggtatggataaaggcaagctgacggagattcttgccaaaaaggataagcctgtcgtaaacactaagcgcggcggctacggcatcggcaatattttggagcgcctgcacatttattacgatgatgattttatgtttgagatcgattccgccattctggtcggcaccacggtgacgatccgcatcccctattcccgcaacgattccccgcagatccacgcggatcgccccatcggcggcatagagcaaaattgatgctttatatcgatttttactaaaatactacgcactgcatattcacctcttgtttttttcgtttgtcttcgttatctttaaagcagcgcagcgtttatctgcctgatctaaagatgaaaagaggttcaacatgtatacccttagatcccgttccattccgctcaataccgattacgacgtgatcgtggtcggcggcggcccctcgggctgcacggcggcggccgcagcgtcgcgcaccggcgcaaaaacacttttgctggaagcgaccggctcgctcggcggcatgggcacttccggcttggtccccgcatggtgcccgttttcggataaagaaaaaatcatttaccgcggtcttgccgagaccgttttcgagcgctcgaaggcactttctccgcacgtggcgccgaccgacgtagactgggtgccgattgacccggaggggctgaaacgcatctatgacgacctgatgcaggaatacggcgttacggtgctgttcaacacatttctctgcgacgtggatgccgaaaacggcgaagtgcacgccattgtaacggcgaacaaagccgggttcacggcatacagcgccaaaacgtatatcgactgcaccggtgacggcgaccttgccgtatgggcaggtgcaaggtacgagtttgaagaagacggcgagccgatgccctccaccctgtgttttattttgtccaatgtagacttgtatgcctacttatatcacccgaaatacgggcacagaaatggtggcatacacccaaacaacaaaaaaagctttacacacctgctgccgaacgacgaccgtttcccggaaatcttagacacgcacctgtgcaacaacatcatcggcccgaatacggtcggctttaacgccgggcacttgttcggacttgattctaccgacccgaaatcagtctctgaagcgatgatgcgcggcagacgcattgcaaagcagtatcgcgatgccctcgcaacttatttcccggaggccttcggcaacgcgtaccttgttgccactgcgcccgtgatgggcgtgcgcgaaagccgacgcatcgtcggcgattacaagctgaccgtggaggattacgttacgaaagccgattttccggacgagatctgccgcaacagctattatctcgacgtgcactatacgctcgaagaagcgaagcttgcagccgtcggcaagattgacggtgaaaagcgtgatgcccgctacggcccgggcgaatcgcacggcattccctaccgcgctttgctgccgcagggcgtgaaaaacgtgatcgtcgccgggcgttccatttcgtgcgataagcgcattcagggctctgtgcgtgtgatgcccgtgtgcctcacaatgggcgaagccgcaggtgtggcagccgcgttcgccgcaaatgcaaacggcgacgtacatgcggtcgatacagataaattgagagaaacactgcgcgaaaacggcgcgtattttcactaaaacacaacggaggagtttaacatggaatatgatgtgatcgtagtcggcggcggttttgccggcaccgcagcagcggtctccgctgcaagagaaggcgcaaaggtgctgcttttggagaaaagcggatttctcggcggtgcagccggaaattgctacgtcaacccctttatgggctacacaacgaaaatcgacggcaaaacgacgctgctttccgacggtatttttactgagattctggatcgtctcgagaaaaaaggcggactgatgccgaaccgcgtgacgttcagcgaagaagttttaaagctcgtttttgacgaaatgaccgaagaaagcggcgtagatgtgctgttccacgcctacctgctacgtgccgagcgcgactgtgaccgcattaagtccgtgacaatcatgggcaagggcggcgaaatgacctttgaggccgactatttcatcgatgccacgggcgacgccgatctgacggcatgtgccggtgcaccgtaccgcatcggtcgagaggatgacaatctttgccagccgatgacgctgtgcttccgcatgtccggcgtagacgttgacctcgcgttcaaaaacacggagaagatcaacgcgctttacagaaaattccgtgaggacggcaaaatcaaaaacccgcgcgaagacgtgctgaaattcaaatatgtcgcagacggcgtgctgcacctcaactctacgcgcattgtgaagcgatcgccgttcgatctttatgacttaagcttttccgagcgcgaagcccgccgccaaatgttcgagctttacacgttcctcaaagaaaactgcgaggggtttgaaaacagcacgctgctgtcctccgctccggagattggcgtgcgcgaaagccgtatgattgacggtgtgtacacgctgacggtcacggatctcaaggattgcgtacattttgaagacggtattgcggcgtgtaactatgatattgacattcacaacccggagggcaccggcacgagccattattacttcaaagagggcacgtactacaccattccctatcgaagcctgatgccgaagaacatcaaaaacctgcttgcagccggccgttgcatctccggcagtcacgaggcacaggcatcattccgtattatgcccacgtgttgcagcacgggtgaagccgcaggtgtggcagctgccgttgccgcgcaggaacacaccgacttcccggaaacggacgtgaagaaaattcaagcgttgctgcgtaagcacaacgcgtttatcggcgagtaaaatctgaaaatacagcgaaaaaccctcgacatctgaaatgtgcttcagcttgtcgggggttttctatcgttcgtcccttatgcgtttttcagtgtttcggcaaggtcttcgagcgcgcgagcggaaaacgcggcgtagcgctcttttttgtcacgaatgtgcggctcaatgacgggcagaatgccgaagttcgcacccatcggctggaaatctttcgaggggctgtgcgcggcgtgctccgcaagtgagcccatcatggtagtgatgggcagaatgagcggcgctttgccctctaaacggcgcacggcgttgcgtcccgcaagcaagccggacgatgccgattccatatagccctccacgccggtcatctgccccgcaaagaacagctccgggcgcgtgcgcatggagaaatccgcgttcaaaagcttcggcgaatcgaggaacgtgttgcggtgcatcacgccgtagcgcatgtactcggcgtttttcaggccggaaatcataccgaacacgcgcttttgctcgggaaatttcaagtttgtctggaatcctacaagattgaacagcgttttttctgcgttttcggtgcgcagctgcaccacggcccacgggcggtgacccgtgcgggggtcgcgtaagccgaccggcttcaacgggccgaagcgaatcgtatcgtgtccgcgctgtgccatgacttcaatgggcatacagccctcgtagaccttcgggttcatcacgtcaaaatcgtgaatgggcgcgcgctccgcggtgataagcgcttcataaaacgcatcgtactcctctttgttcatcgggcagttgatgtaatcgtcgtcgcccttatcgtagcgggaggccgtgaagcagtgctccatatcaaggctttcacgcgtgacgatcggtgcggcggcatcgaaaaagctgagcgcaccgccgcataagtttgtgatctgttcggcaagcgtgtcgctcgtcagcgggccgcttgcaataacggtcacgccctctgcgggaatttccgtcacttcgccgtgcatgacttcgatgttcggatgctccgtgatcgcttttgtgacgagctctgaaaagcggtctcggtcaacggcgagcgcgccgcctgcgggcacggcggttttatccgcacaggcaacgagcagagaatccatgcggcgcatttcctctttcaaaagcccggcggcgctgtcgatgcgcgcagccttcaaagaattcgagcagatgagctccgcaaacccggcgcttttatgcgcgggcgaaaacttctgtggcttcatctcgaaaaggcgcacagaataccccgcctgcgcaatctgccacgccgcttcggagccggcaagacccgcgccgataacggtgacggtctgcttattctccatctttctcccccgcgtcgtccttattgaacgtgtaagtgcagcccggcgttacgcagtagagcgtctgggctttgtcttttttctttaagagcaccttaccgcagaccgggcaggtcttgtcggacggcgcgtcccaagagacgaaatcgcacttcgggtagttgtcgcagccgtagaacacgcggccgcgcttcgattttttctcgatgatcttgccgccgcacttcgggcactttgcacccgtatcgttgacgattttttgcacggtcttgcactccgggtagccggagcaggcgataaacttgccgtagcggccgaatttgacgaccatcggcttgccgcagttcgggcagacgaggtcggtcttgtcttcttcaagctgaatcttcacgccgtccatttcggtcttcgcctttttgagcgtcttctcaaagtcgtcatagaagtcgtgcagcgtgtgcacccagtcttcctgaccgctctgtacttcgtcaagctctttttcaacggcggcggtgaacttgatattcacaatgtccgggaaacgctctttcatcagctttgtaatgacttcgccgagctcggtgggcttaaaggacttaccctcgcgcgtgacgtattcgcggctcgtgatggttgtgatggtcgcagcatacgtggacgggcggccgatgccgttttcctccagcgtcttgatgagcgaggcttctgtaaagcgtgcgggcggctgtgtaaagtgctgcgtgcccttgaggtcgcggactttcagggacatgcctgcttcaagcttcggcaggtctttgcccttttcttcttccacgtcgcggccctcttcgtagagcacggtgtatccgtcaaacgcgacgttgtagccgcttgctttaaaaatataatcgcctgcggtgatgaccgcctgcgtggtgttcaaaacacagtttgccatctggcacgcgacaaagcgctcccaaatgagcttataaagcttgtactggtcttttgtaagggaagattccacgtccttcggtgtgagtgcaacggaggtggggcgaatggcctcgtgaccgtcctgtgcgttggcacgcgccttataatggcgtggcttagaaggtaaatactgcttgccccagcgctcgccgatgaactgcacagcctcctgcacggcgtcttcggaaatgcgcagagagtcggtacgcatataagtgatgagacccacggcacccatgccctcaatgtccacgccttcgtaaagctcctgcgcggctttcatcgtgcgcttcgcctgaaagcccagcttgcgtgaagcttcctgctgcaaggtggacgtgatgaacggcggtgcaggctgcttgttcttcttgccttttttgacggactccaccatgaacgcggcggattcgaggtcggcaaggattttatcggactgctctttgttcgtgattttaatctcgccgtttttatcgccgtagaacgatgcgccgaaaatgctgcgggagccctcggcggtcaggcgtgcgtcgatagaccagtattcttcgggcttaaacttgcggatctcttcctcgcggtccacgatgatgcgcagtgcaacggactgcacgcggcctgcggaaagaccgcggcgaatcgtttttgcgaggaacgggctgagcgaatagcccacaaggcggtcgagaatgcggcgcgcctgctgggcgttcacaaggttctggtcgatggaacgcgggtgcgccatgccctccgtgatgccggttttcgtaatctcgttgaacgtgacacggttgtggtaatcctcatcaaggccgaggatatacgcaaggtgccaggagattgcttcgccttcgcggtcggggtcggtcgcgagatacacggtatcggcctcttcggctgcttccttcagttcggaaacaagcttctcctttcccttgatgatggcgtatttcggcttgaaatcgtttttcacatccacgcacaggcgcgccttcggcaggtcgcgcacatggcccatggaagcgatgacttcatagtcgccgcccagatatttcttgatcgttttcgccttggcaggcgactcaacgataacgagtttcgacatggttttctatctcctattctgtatctatttaaaccgcacagcgaatgtgcgagtggaaggatcatgtattaggtgcatttgaaaacaaagaaaatgcgaaacggacaaacttccgatttttcaaatacaccttagtatagcgtacttttacgcctttgtaaacctctggccgggataagttttgatgaggccgaaaagctcgagctccgtgagtgccgccaaaattttccccgtggatatgcccagttcaagctccagctcggaagcgtgcttgggggtatcgttcagtgcggcgtaaacgacttttgcatcttcagaaacgttttgcaaaaggttgttttcgggcgcagggatcggctcggcaggcttcttctctgttatttcgggctccttttccgtatcggaaagcgacgcaatcttcgggcggacgcgggagacatgggagatattttccgctgtgcgggcaagctgttctatacgctcctgtctgcggcgggaagcaaacggctttaaaacatcctctgcagtgtaaatgcgcgctgcaccgtcctcttccagtgcgatacagccggaaaacgccttctcgtcttcgccaatgaatacgaaaacctcgcgattctgctctaaagcatgctttgcggtgatgagtgcgccgctcttttttggcgcttccgcaatgagcacgccgtgcgccatgccggagatcagccggttgcgcacctgaaacgcgccgcgctgcacaggcgtgtgcatgggatattccgtgacaagtgcaccgccgaaatcgacgatctcgcggcgcaaaatggcgttgtccataagatacggatattcgagcccgcacggcaaaattgcgattgtcttgccgcggccgttcagtgcacccttgtgtgcctcggaatcaatgccgagcgcgccgccgctgataacaacggcgtttttgagcgcaagcccgtaggcgatctctcttgcggcattgagcccgttttgactggctttccgcgtgcccacaatgctgatggaaacggcatcggaaaggatgctcaaatcgccctgcacatataaaacggcgggcggattgtagatttctttcagcaatacagggtagtcttcgtcatcgggcgtgatgaccttttgaccgagcttcaaataatactcgagcgctgcggcggcctgttccgcgccgtaggcattgagcgcggcaagctctttatccgaaacgaacgaaaaggagctccacagtcgtgtgccgccctgatacagcttttcagcactgcctatgcggcgcacgagctgcacaggcttcgggctgcctgcgccaaacgcgttttgcagccagatccagtatacgcggttatccatggcttgtgcctcctgccccgttgcgctccatttcccacagcacaatggcggctgcagtggaggcgttgaacgattccgctctgccgcgcatggggatcgtcacgcggtcatgacaatgctcgatggcttcatttgtgagaccgttgccctcgttgccgatccacaccgcccagtttcccgtttcaaacggaatggtcgtgatgggcgtagcggcgctgtccggcacggcggcaagtgacgtgatattctcggcatgtaacactttcaggcaatcctctgccgtctcaaaacggcggatgccgaggcggaacaccgcgcccatgctgccgcgcagcactttcggggcgtatacgtcgcagcaggtacccacaagtgccaaatgccgcacaccgagcgcttccgctgtgcgcagcacgttacccatgttggacgggtcctgaatattttccataacaagcacatgacggcacgggcgtgtatccgactctgcggaaacaggcaggccgtctgcacggcgcttcggcatgcgacacacgcagaaaatgccttgcgggttctttgtatcggacagcatgggcgcgatgtgttcctctatgcagtatgcgtgctctgtctgctttaaaaccggatctaaataatctttgtattttttagcggcgttttccgtaaagaagcacgcggcaatctccgtttggctccttgcggcatcggcgcaaaggcgtgcaccctcggccatgaaaaggcctgcttcacttctgttttccgctttctgcaaaagcgcggcggcgtttttaacgacgctgcttttgcggctggtgattttttcgattggcacggtacacactcctttttaccgataataagcagaaatcctgtgcactgtattttacggcacacgggaaatttccgcaaaggcgattttgcacaaagaaatacacttacgtttgcaactatcaccctaaaaaatgtgcgcccggaagaattccggacgcacggatagcttaattatacagaagcctttgccttctcgacaagtgccttgaaagctgcttcgtccgcgatggcgatctcggaaagcatctttctgttgagcgtgatgccagccttcttaagaccgttcataaatgcggaataggtggtgccgttagcacggcaagccgcgttgattctggagatccacagacggcggaaatctctcttcttctgctttctgccgatgtaagcatagttgccggacttcatgacagcctgcttagccatcttaaagtgtctgctcttggaaccccaatagcccttagcgagcttcagaaccttttttcttctcttgcgcgtagcgagcgcacccttaactctagccatttataaaaacctccgattatgctttacttaaacttgagctgccctgttcgcttatgcgtaggggagcatcttcttaacagcctttacgctggtcttatccgtaacggtcgtgccgcgtgcatggcgcttagacttagcagtcttgccatggccgttcagaaggtggctcatgtaagcgtggccacggataactttacccttcttggaaatcttcaggcgcttcttagcaccgctgtgtgttttgagcttcggcattttatagtcctccttgaaattgttacttaacgggcttgggggcaaggaacatcagcatgttgcgcccttcgagcttcgcgggcttatcgacgtttgccgtgtcagcgagcgattctgcgaaacgcttcatgatgtctgcacccagttccggatgacccatctctctgccgcggaaacggatggaaaccttgaccttgtttccgtcgttgaggaaacggatcgcatgatttcttttcgtctcgaagtcgtgggtatcaatgttgagagacaaacggatctctttgatttcaactacgcgctggttctttttcgcttctttttcacgctttgcctgttcgaaacggtatttaccgtaatcgatgattttgcatacgggcggcgtggcctgcggggcaatctttacgaggtcaagatttttctcagccgcaaggtttaaagcgtcacgggccgacataatgccgagctgtgcgccgtctgcgccgatcacacggatctctttatcgcggatctcttcgtttatctgcagttcctgtttgctaatggttaagcacctccatcacgcgtgcgataacttgttttcgcgaagccggcaataaaacaacgggcagagaacctctgcccgcaaatcaactcaatcaaacacacgaatttatcgtgattcttctcgatattgacctgtgtcagacggtactgcacgggtgtgagccatagctccgctttgttttccaaatattatgctaccacaaagagcgcaatctgtcaataggcaaacggggcttaaaagaaattttattcttttcccggtgcataaacaggggcgttcatataaaaagagtaaagcacggtgtctttcacttctttattcatgacgcgggtcatcgcttctttgtagagcgtgagctgcgggccgtatcgttcccacaattcctgtttattgtagcaccgatcggtcttaaagtcaagaatataaagcgaaccgttttcttcaaacatacagtccactgcgccctgcaggatcatcggctgtgcggcatcttccccgctgagtgttttatccgtgagtcctgcgggaatggaaacgatgaaccgctgctctttataaacgcggtcggcatgtaaaacgcgctgcccgagcgggcaggtaaagaacttttccacacgggtaagatcgacggcgtttgcctgcgcttcggtgagatagctttgctcgataaggcgtttgagctccgcttcggggtcttttgaagcggcggaaaaatccgcaaactgcatgaagttgtgcagcgccgtgccgcgctctgcgggcgtcagtcctttggcgctcaaaaacgccgggcgtgaaagtgtggtttccgtttcggcttgttctgccgcaagcgcggaggccgcgaccttcgttgcaagctttgtctgtgcggcgtagggatacacgaacgaaatatccctttcgatgcgcgtcttgagcgcttcatcgaccggtgcgggcgcttcggctttcggcaggtcggataaaatctgcggttcactgtatacgacgcgaatatcccacggcgtgtagtgtgtgcgcagaatgatgtcgtcatccgcttcgatgcggcggcgcaggtcatttccgtttgggtgccgcagcgcacagagcatcagccactccgaaatgccggaagcgttgctgaccgtgtacggcggcacggtctcctcctcggtaatctgtgccgcaagcttttgcaggtttgtatcgatatttttcacggtggaaagcagaatgagcttctctttggcacgggtcatcgcgacgtagaacacgcgcagctcctctgcggaagcgctttccgccgttgcaaggccgatggcctcgcggatgaacgtggtgcggcgcacgccggtctcggggtctgtaaggcgcatgccgacaccgagctgtgggtgcatgcgcaggtcgtccgtatcattcacgaatttccggccgcagcccgcaatgatgcacacgggaaactccaagccctttgatttgtgaatgctcatgatgcgcacgacgttggcgttttccgagacgacattggcgctttccatatcggatcgattctttttcaggcgctccgcaaagcgcacgaagccggaaacgccgctgtacccgtaggcttcgtattctgccgcgtatttttccagcaggcgaatgtttgcaaggcggctttctccgccgggcatggcgcgcacgatgttctcgtaaccggtttcggtgcacagcatattgataaagctgtccgcaggcatggtggaagcgagcgctcggaaacgcgtcagctcatcgcgcacacgcacacagcgctcgttttcagcgcgcagaagcgaaacgtacaacgtctctcccccgcactcgcggcgcagttgcgccatatcttccgctgtgaagccgtaaatggggctcatcaaaacggagagcagcggaatgtcttgatccgggttatcgatgacgtttaaaaatgccaagatgagcgagacctccgccgcggcgaaaaagccgcccgtgacagccgcccacgtgggaatgcccgcattgcgcagattttctgcatagacaggtgcatatttattggagctgcgcagcaaaatgcagaaatcgtgatattctatgggacgctcctgaccgttttccgtgacggtgaagccgttttccatcagctcgcagatgatttttgcgatgcgctgcggctccagcacctctgcgcccacgccgtcgatgtcttccaaaaactccacgcgcgtttcgcagcccgatttttcggggtactgcgcgcccgccgcaagcttttcatcgccgacgtaatcgatgccgccgcatgtgcgggacataagctgcgtgaaaacgaagttgacgctttccgtcacggttttgcgcgaacggaagttgcggtctaacacgatagatgccgggtatgcgtccttttcgcggtcatagcgcggaaatttatctttataacggatgaaaatatccggcattgcctgacggaagctgtaaatactctgttttacgtcgcccaccataaagcggttcgcgctgttttgggaaatggattcaaaaagataatcctgcacgtcattcgtgtcctgatattcgtccgtcatgatctcgtcaaagcgctcggagacgagctttgcggtctctgtgcgccgaaatgtaccgtcttcctgctccgttaaaaacagttgcaaggccatgtgctcaagatcactgaaatcgagcacgtttttctcacgctttttcgcgctgtatgttttctcgaacgactgcacggccagaaacagatagacgaccgtgccggtcgtggcggcgatttcttccgtgaatttctggtcttccgcgtcgcctgcaagcttttgcagtttgccgatttccttttttaccatatcgcgcatggccttgatgcgatcggcacgcgggtcttctcctctgaaagaaccgagcttatcgaacgtgacggtcaagtcggaaaagcggcaggtttcagggtcttccattgcctgcagctttgcagaaagcttatcgatatccgcgccgagtgccgtacagtacgctttttcaaggtccgggtcttctgccgcaagacggtatgcactgtgggaaagcttgattgtgaagtcatagacttccatgatatgctgccggacgacctcgccccacggtgttttgaccggggactgcgtgacatccgtcatggctttttgaatgtcccgcatccatttgtccggaaacggatggctgcgcgtgtattcgtacattttgaggattgcggcggaaaggcgggcgtcgtttttgtctccgccgagcacatccgccaggtctgtcctaaagttttcgtctttgtaccactcggtcagtacttcgtcgagcgattcggtcatcagctcttcctgttgcttatcggtgatgatggagaaatcgggcgagataccgagcaggtaaaaaaattcgcgcacaatgtccgaacagaagctgtccaccgtgcagatgtgcgcctgctgcaataaaagctgttggcggcgcaagcgggtgttttccggctgctccttcatgagtgccaaaagtcgcttttcgatgcggtcgcgcatttcggctgcggcggcttttgtgaaggtcacgacgagcaggcggtcggcgtccgtgggatgctccggatccgtcaggcgctcgataacgcgctccacgagcaccgcggtcttgccggaacccgcagcggcggagaccagaaccgtaccgcgccgcgctttgatggcgtcgagctgtgcgtcagtccaattcggcattttccccacttcctttctctaagtcatttcccatgcgcgcgagcgcttcgtcgtttttcatgctgttcttttcggcatcgtccgcagcgtgctcagagccgcagacggacgtatacgggcaccacgcgcaggcgttgatgttctgcatcagcggttttgccatgatctcaccggcagaaagctcctccgccattgttgcgatgagacgctccacgtagcacaggacgatctgcagctccggctcatttaaagcggaagccgtaccgctgagttttcttgttttggtgagataaacaggaataaatcgaccgttcagacccatttccattgcattcaaaatttcgttgtcctttaaaagcaggccgttcatgcgcaggtctttttccacttcctgctttagcttttcggcgctttccgtgccgtccgaggtcacacttgcaatgaacgccggcatgtacaaaatgcccgccgggtgcaggtctttattctgcgcgagcgccgcgaggtaaataagcatttgcaagctcatgccgtacagaacatcggcgagcttaaactctttgcggccggttttataatcgacgacgcgcacataagtcgtaccgttttcatctttatacaaatccacacggtcgatgatgccgccgaccgtgacgagtccgtttttcgttgggatgcgcagcggtgggtacggtgtgccgtttttgagctccagctcaaaatgctccgggcggaacaggctgtgcatcatttcttccgacatatgggcgatgagcttcacagccgtttgctccatgcggtacaagcggtatttttcgcgcggcgaaagagcatcatagccgcccatattttcgcgcacatagtccatgatgctcgtgtgtacgcgcgcttttaagtcgtctgcatgaaggtgcagcgcttgaatgtcttccgcactgccgagaatctgctcgaaaagatagtgcatcagactgccgtattccagcgcatcgatctctgccgggcggcgctcctttgcgccgaggccgtagcggcagaagtatttaaagcggcactggtgataaacttcaatttggcttgcggaaaaataatgcccgccgccaaagtaatcgtttgcggtctccggcgcaaggcgagccgaagccatgcggtctgtgccgccgaggacctgcaaacgcccggcgaactccggcttttcgcgaaaaacactttttaatgtctcggagacgatcgagttttcgttgaaaagcgacgccgtttgcgaaaacgcggcttccggtgcgtttgcgaaaaactccggcggcaggttttgcatgatttttaaattcggcagcgccagctcgactgcgctgatgagctcaccgggcgattttgcctcctgccccacactgacgggatacgtaagatacagcttctccgaagcgccgtacagcgcggcgtaggcgaggtacttttcctgtaacatgcggtcttcgagcacatcggagacgggcagctcaagcgcaaggagcgtgcggcgctccggctcgctgaacacaccgtttacggacggaatgagcgggaactcgccttgcacggcgccgagcaggaacacggcgcgcggcgcggactgacggatgcggtctgcggtgccgaatgtgatgctgtccatactctgcgggatatccgaaacatcctcgccgctgacgatctcctttaagagccttccgtatttttcacccgtgatgatctgttcaccgagcacgcctgccatttggtcgagtacttccatgagcaaatcccaaatgcgcatttgagcggcggaaaggtcatcgcgcccggcattttcgagcgtgcggcaaaatatcgggaagctttgctccaaatcaaaatcgatgagaagcttataaacggcttcggagatctgctcgccggaagcgtgtgcggtgcgctcggagaattttataagcggtgcggtgacgcgctcgcgcagagcgttcagcgtgcgcagtgtctcggtcgcggtgtcatccatcggcttaccgaagccgtccgggtgttttgtgaaagggctgcaccaagcggatgcgccgtttaatttccaggtataaacgtagttttcaagctgcgcgagctcttctgtcgtaaagcttgtgatgcccgttttcagcatggcgagcacatcttccgaacgccatttgcggctgcccgaaacgatttgaaacgcggagagcacgaagcgcatcagcggctcagcatcgaccgtgcgcgcttcggaaagaaacgccgggatttcccagcggcgcagcgcggcggcaaacagccgcgtgtagcgttcgccgtcacggcagatgacggaaatatcgcggtagcggtagccctcgtgcaaaacaaggctgcggattttagccgcggtgaagtccgcttcctcatacggagaggtcgcgcggaacacacacacgttttcagcggtatctgcttgctgtacgtggccggcgtaggtgctttccacggcgcgaagtgcatcgttttgaaagcgatacggcgttttacagtacacaggcgaaagcacgcccgtaccgctctcctttgcaaggcgcatcaggcgcgaagcggtgcggcgcacggtagaaaacaggtctttgcggctcgtgtcgagatcgtcgcagcacagcgaaacactgactttttccgcatggcgcagtgcgtggcgcaaaacgcggtactcctgcacggtgaagccgtcaaacgcatcgacggcgacataagcatttcggaaaaaatccggatggtcggccagcaggtcatcaaggcgcgtcaggtcgtcgagcggatcgagatacgtctgcgcgacgagtgcttcatatgtaccgtaaatgagcgcgatctcttttagtttgcgcgaaaggctgtcttctgtgacggcttcggctgtttttgtgagcatatcgggctcaatgccgcagattttcatttcaccgacggtgttcaataaaacgtccgtcatgcgatcggcgcttttttcaaacagcgtgagttggtcggcacagttttcaagcgccaaggtcatcaaaatacgcctgccgccgtccgttaaacgcttgcctgcaccgccgccgtactgcaaaaatgccgcctgcgcaaggcgcgtaaagctgtacacctgcacacggttcgcggtttcagcaccgtattccataagcagcgcgcgttcggattcaaacgtatattgttccgggacgatcaagatcgttttcggcgcagtgctttccgcaaggcgtttacgcagcagcgtcgttttgcccgtgccggcgcggccgaggatcaactccagcattcttcttccccctttttccgtttagagcttatactgctcttattttagcacatgtgcgctcacgcgtcaaagagttcgcggagacgtgagaaaatttccgccaccttgaatttgacttcgtagctttccggttcacgcacgagtgtatcggtatcatcaggcaggttggataggtcgcttgcaccgggcatgcacagcgccggaaatacaacgcaccaccagtttttgccctcggccttgccgagcgaaatgcgcagtgtacggtagcgcccggcgggcagcttgaagctctcgtaggtgcgggtcggaaagtacatttcgcaaatttccgctttggcgcagtatgggaggttttcggctttcaagacagaatttgctgccgcttcaaggctttcaaggtgcgtgcagagcgctgtgacggccgtgtcaaaatcttccgcatcgccgtaccactgctcggcttcccgcagcacggcatcacgcacgcggagctttacggcttgatccgcttcgtcgttcgagtttgcaataacatgcagccgcacgatgttctcttccagcgcggcacactgggcggagaagcccgctaaatttagaagcactgttaagatcagcccgcacgccatcgcgcgcagaagaagcgttctgctatacagtgttttgattttacgcatcatagatttatcctccctgaaatttgcgtcgtttcacaaaatttcatttaattttttgtataaaatatggacagaaaatttgcggtttatactttccgcaaagcgaaatttccgctatactatataataaactatgagcatcaaagcgggaggaatttttatgaactggacagtaccgaacaccgaaagccttttacgccgcctaacgaaaccgaaaggtaagattgacgtggttttggacaccgatacgtataacgagttagatgaccaatttgcgctttcgtatatgatgaaaaacagcgacaagctgaacgtaaaagcgctgtatgccgcgccgtttttgaatgataaatccgtatcgccaaaggacggcatggaaaaaagctatgacgaaattctaaagctgctgacgcttttaaaacgcgaggatttaaaagccgtcacgtttaagggctcggaaacatatctcacggacgaggacacgcccgtgctttcgcctgcggcgaaggacctcgcaaagcgcgcgatggattatacacctgaaaagccgctgtatgtcgttgcaattggcgcgatcacgaatgtggcttccgccttgcttttgaaaccggaaattcgcgaccgcatcgtccttgtatggctcggcggcaacgcgctgcactggccggacaaccgcgagttcaacatgtatcaggatattgcggcgggacgcattgttttcggatgcggtgcggcgcttgtacagttgccgtgtgcaggcgtagtctccggcttcaccgtgagcgagccggagttcaaagactactttctcggcaaaaacgagctgtgcgattatttggcacattatgccattgaagaaggtcggcgctgggcgcaggcggaaacgtggtcgcgcgtgatctgggacgtgacggcggtggcgtggcttttggacggcgagttcatggacgacacgcttctgcacagccctattccccagtatgacgacacatggacgccctcgaacacgcggcattttatgcgctatgtgtacaatatccaccgcgatgttttactcaaggaccttgtgcaaaaattgacggaaatgtaaaattttcgtgcaattttggcttttacgtgctatacttaattttacagtaaacagaatacgcaccttttcccttattttgatccgaaaggttggttgtctcatgaaaaagctgattcttgtgacctcaccgcccgcgtgcggcaaaacccggctttccaaacgcctgtgtacggcgctggatcatgttgtttatttggacaaggacacgctgatcccgctttccaagcaaattttcaaagtggcgggcgaaccgtatgaccgcagctctgcgttttttgaagcgaacatccgcgactacgagtacgagacgatcttggaccttgcgtttgaggcgctgcgttatgcggacaccgtgctcatcaacgcgccgttcacgcgggaaattcgcgacacggcgtacattcaaaatttgcgcgcaaagctcggcgaatatggcgcaaagctgtgcgttatttggatcgtaaccgaccccgctgtgtgcaaggcgcgcatgatgaggcgctcttccgaccgcgacacgtggaaaatggaacactgggacgagtacataaagggcgtgaattttgatattcccgaaaatctgcgtataccggacgacccagaaagtcttttgctgtactacaactcgaccgacgaccttgcggacgcttcatttgcccgcattttaccgatgctgaaccaaaactgattttaggagcctactcatgcagaaaaccgataccctgtataccgcatacgttgaagttttaaaagaagaattgctgcccgccatgggctgcacagagccgatcgccattgcctatgcggcggcggcggcacggcgcattttaaacgagctgccgtgtgaagtctgcgtcacggcgagcggcaatatcatcaaaaacgtgaaaagcgtttttgtgccgaacaccggtggtctgcgcggcatccctgcggcggctgcggcggggatcatagcaggacatgacgagcttttattggaggttatctcaaaggcgaccgaagcagagcaggcggagattaaggcttatatggagcacacgccgatcaccgtgaagctttcggactctccctatattttcgacattgacattacggtgaaaagtgagcatcacacggcaaacgtacgtattgtggggcatcacacgaatattgtgcatacggaaaaagacggcgaaatattgctcgatacctgtgccgatactccggcggaaagcacggacagcggcatttgcgaccgcagttcgttttcggtgaagacgattcttgagttcgttgagtgtgcagagctttgcgatattgaaacgcccgtaaaacggcagattgactacaacacacgcattgcgaaagaaggtttatcgggcagttggggcgcgaacatcggcaaggtattgctcgaaacctacggcgatgatgtgaaaatccgcgccagagccatggcggctgcgggcagcgacgcgcgtatgaacggctgctccctgccggtcgtcatcgtttccggcagcggcaatcagggaatgacagcttctctgcccgttgtggagtatgcaaaagaattgaacgtcggctatgaaaaaatgattcgcgcggtggcactctccgacctcgtgacgatccacctgaagtccggcatcggacggctttccgcgtactgcggcgctgtgagcgcaggctgcggctgcggcgcgggcattgcgtacttatacggcggcggactgaaagaaatcgagcacacaatcgtcaactccattgctattgattccgggatggtatgcgacggcgcaaaagcctcgtgcgcggcgaaaattgcatctgctgtggatgccggcattttgggctaccacatgtacaaaaacgggcagcagttccgcgcgggtgatggccttgttacgaagggcgttgaggagacgatacgcaacatcggcatgctggcccgcgaaggtatgcgcgagaccgaccgcgagattttgcatatcatgtgcgattaaatgtgataaacaaagagacgtttctctgtagttttacagggaaacgtctctgttcattttacataaattacataaagcgctccggcagacgaaaacagtccgctggggcgcttggtatgttatagactttgcttcaagatttcttctgcgcagcgcagaccgtctacggcggcgctggtgatgccgccggcgtaacctgcgccctctccgcacggaaacagaccgcgcaccgtagggcactcgcgcgtctcgtttcggaggatgcgcacgggtgaagagcttcgggtctcgggagcggtcaataaagcgtccgggtcgtcaaagcccctcagccgcctgcccatgcggcggatgccctccgccatggaatcgcagatataatcgggcagcacagcccttaaatcgccgggcacaactccgagccgataggtcggctgcacgctgccgttcagcgcagtcgttgcacggttttcaagcaggtcgccaacgcgctggcacggggcactgtatgctcccccgcccgcttcaaatgcggcgcgctcgattttacgctgaaactcaatgccggcaagcggatgcgcggaaccgaaatcctccggcgtgatgccgacaagcaacgcggcattgctgttttgaccgttgcgggcgtattcgctcatgccgtttgtcacgacactacccgtttcggatgccgcaccgacgacatagccgcccgggcacatgcagaacgtgtacacgccgcggccgttttcaaggtgaacgttgagtttgtagtccgccgcgccgagtgcggggtcgcctgcaaaatcgccgtactgtgcgcgatctatcgtctctgcgcggtgctcgatgcgcgcaccgacggaaaacggcttcggctccataggtacacagcttttttcaaacagcattttaaatgtatcgcgcgcactatggccgatagagagaatgacgtgtgcggtctcaatcgtctctttcgcaccgtttgtctcggcaacgaccccgcaaacagcattgtttttgacgagcaggtcggtcatctgcgtgttgaagcgcacttcgccgccgagagacttgatctcctcgcgaatggcgcggacggtttgcggcagcttgtccgtgccgacgtgcggctttgcgtcaaatagaatgtcttcgggtgcgccgtgctcgcagagcgtttgcagtacgaagaaaatgcgctcatctttcgtgcctgtattgagtttgccgtccgaaaacgtgcctgcgccgccctcgccgaactgcacgttgcagcttgggtttagttttcgcatctgccagaaggtgtttacggccgcttggcgttcttctacagagccgccgcgctctaagatgatcgggcgcaggccggcgcgtgcgagcaataagcctgcgaacatgcccgccgggccaaaacccacaacgaccggacgctgcgacaatgtaccgtgcggcggtattgcataggttcttttcggcgcttttgtgacgtggctgtcgcgcacgcgggaaagcagcttgtcttcgttgccgtccgtttccacatccacggtaacgacaaagcgcacgtcctgcttttttctggcatcgacagagcgcttgacaagtgccaattttttgagcttctgcgcatcggtacgcagttttttggcggctgcgcggcgcaaagcttcgtccgtatagtgaagcggcatggaaatgtcgctgatgcgtatcatcgtttttcctccttcaggcagcgataggctgcgctttttccggctgtgatgccgcttgcccacgcaaaatgcaggttgtagccgccgcaatcgccgtgaatattcagcatctcgcccgcaaggtaaagccctgcggtttttttagatgccatcgtgtgcgggtcgagctccgtaagcggcacgccgcccgccgtgacctgcgccgcagaaaaatctttcgtgccggtgatgtccaacctccagcctttaaggagagaagcaagctttttaagctgtggtgctttgatttttaccgccggttcgctttgtgcgatgcccgccgcgccgacaagcatgtagccgagacgcatattgagtaggccggagagcagatcgcccgctgcacgtgcgggatacaattttgtcatctcaaggagataatcgagcacgtcctgataggccatgtccggcaatagatcaagctgtacggcgagtgaagcatacttcttattgcggatcgtgccgagcgcatagaactcgccggcatacacggaaaggccgaacacgcagatgccggaaatgccggtatccgtaaactgcacctcgccgctttcttcatagacgggtttattgtccgccaaaagcacggcgtttgcaggggcgcgcgtgccggagagcgttttccactgctttgcgcgcacggtaagctgcgttaaagacgggtacagctttgtcaccgtgtggccaagctgctttgcgagcgtgtagccctcgccgcaggaatggcgcggagatgccgcaccgccgcacgtcaaaatgcactgctttgtgaaaagctgcgtgccgtccgtacagataagcgtaaatccgtttttgactttctcgatttttgagacggtgtgttcttccgaaaacgacacgccgtatttttcggcatcccaccgcaaagcggagagcacggccgccgcctgctgattctgcgggtataccctgccctcgctgtccggcttggtgacaagccccatttcgcggaacacggcacaaatagcttcgggcgtgtattcatgcaataggtcttgaattgccgtaacatcgccgtggtaatgcgcgggcgaaacgtttaaattcgttaaattgcagcggccgttgccggtggcgagcagctttctgccaagctttgcgttgccctccaaaacaagaacagaaccgcgttttttcaaaacatgtgcggcggcacacgacgccataagccccgctgcaccgccgccgatgatgataatgtcttttgtttccatttaaacttccttattgaatgaacatgccgagcagaccgtaggagaagatcgccattaaaatatccgcgatgagcgtgccgccgatgacggagaaaagcgcgtctttaatgggcattttcatcagcgccgcggcaagcgaacccgtccatgcgccggtgcccggcagcggaatggcgacgaagatgagcaggccgaacgtcttgtatttttcaatctgcgcaaacttgcttctgcccttggcttccatgcggtcaacaagctttacaaagcgcgtgttgcgcatccagtcgaaaatcttattgataaagagcagaatgaacggcgtcggtaaaatggtgccgatgaagcagatcagcatggcaggcaataaatctacgccgagcattttcgccgcaacaagaccgccgcgcagctcgatgatgggcatcatggagaggatgaacaccgtaagctcacccggaataatatttctgaaaaaattgacaagtgcttctaccatactgaattgttcctttcatgatccgttctttttcaagtttcttaaaagttccgcaaataagtatactaaacgtcatggtttttatttttctttttaagaattatagcttacgttttgctgacaaaacgtgctcaagatgttttctgtgcggcacaataggcttcaaggtcgccgaacgagtagcccgtttcttcccattttgtaaggagctcatctaagatttcggcgttcgtgctcgacgtgctgtgcagtaaaacgaccgcgccggggtgaatgcgcggtaataatttagaaaatgcctgctcgggtgtgggttggtcatccgtataccaatcgacataggcaaggctccaaaacaccgtggaatacccgagctgctgcgccattttgaggttttcctcacagaatttgccttgcggcgggcggtagagcttcggcatttcgctgccgagaatgtccctgtacagcgcttcattcttttgcagctcggtctgaaagctctggatatcgccgattttcgacatgtccgggtgcgaatacgtgtgattgccgatggtgtggccttcttctgccatacgttttacaagctccggctgcgtctcaaaataattgccgacgaggaagaacgttgcctttacgccgtgctttttgagcgcgtccagaattctctccgtgttgccgttttcaaagccggcatcaaacgtgatgtagatctctttttggttcgcgtcgccgacatacagcgcgtcgaaattccttaaatactcctgcgaggcatttgcaacgggcggtgcgccctcggtttgaaagctcaggccccaatcggtaatcgctgtggcggcctctgctgcgtccaaacggtttaccgcgcgcaaagcgcaaaccataccgatgcacaagagaatgattgccaaaacaacataaagcacctgctttttaccgaatatgtgcactttcattctgcgttccccctatttctttttataaagagtatgtgcaaccgcataaaaaagaaccgggatagcattgcgaagcacatgaaaatcctgtacaatgataaaaagatgaattgtaagctgattgtaagaattctattcccgattttgtaagaggtattctgtatactttcagcatggagtgaaaaggagggcattttatgccggatatgaataagaaaaccattttggttgtggatgacgaccacgagatcgtgcgcgccattaccattacgctggagcgcgagggctaccatgtgctgaacgcttacgacggcttgcaggcgctggattgcgtgacctcccgcgaagtgcatctgatcatcatcgacgtgatgatgccgaagctggacggactttccgccgtgatgaaaattcgcgaaaagaaaaatctgcccatcatcattctttccgcaaagggcgaagacagcgacaaaattcttggcctttccatgggcgcggacgattacatttcgaagccgttcaacccgatggagcttgtggcgcgggtgaaatcgcagctgcggcgctacaccgacctcggcgacatcaacacgcgcagcgacaacgtaatcgtgaacgggcgcttgacgttcaagctggacgagcacgtgctgtatgcggacggcgagcctgtaaaactgacggcgacggaaacgaaaatcgtggagcttttgatgaagcacccgggccgcatcttccccgccgaggaaatttacagccgcatctggaacgaacccgcgtactcggcggaaaacaccgtgatggtgcacattcgcagaattcgcgagaaaatcgagctgaacccaagcgagccggaatacttgaaagtggtatgggggatcggttatgaaattgaaaagcactaaccttgcccgcggcgttttcgcctggttctgctttttgctgtgcgcgttttctattattgcgggtttgatatttgccatatactacgggcgaagcatttttgacgagggcagctatttttttaccgagatcggacaagcactttcgggtgatctgcgcaaaacggatacgtataaagaaaatgcttccgcgctgtttgagcgattgtattacagtacgcaaggcgataccgccgcgaattcaaatgtggctgacgacgaagatgcagacgaaaacgccgtagcatcgagcagctatcattactatgtttcgcgtgacgaaaccggcacaacggtctccacggtctatgtggaatcgatttctaaagacgacctctattccgtaacaagctatagcacagaccctgccggtaaaacggtgacgaatgactcaaactgggatgcacagacgctgccggaggggttcaattaccttttcatctgcgaagaaggtgtagtcagaatttatcacagcgataaagacggtgctttagactgtgttttcagcagtgatacaccgggtgcagtttatacaaatacgctttcgtatacactggaagcattgagacaaagtagcgttcaatcgcctaaaatcagttttgcggtgcgcacagagccgacctcttactactcctcgaacgaaattgtcagcgcagcgcagtcgcaaatgaaaaccatatatttttatatgggattgattatggcagcagtggttatgttcgttctggtgctgctgttctccattttgttccggcaggacaggaagctgtttgagcgttacattgcacacggactcaaatggatttggatcgaaatcaaagtcatagccgtatttgtatgggcttttgttgtgctcaatattatttcgtatgggtttgaccttgcaggcacagctgttactctgttctccgtgttctttgtgttctatttgctcggcatcgatatttctcacaaccggcggatttatcggcacaacatcattcattccgttttgaagcttgtgcttggcaaccgcgaaggaaaaaaattcgagcagattgtttaccgcaaatacatggcgactgccggtattttggtggggctttgcatcgtaggtgttttaggatatgtgttcttttgcagccattggttgatggatacgatttggtttgtcgcgttttacgtcggtctgttttccgcgggtgtgggtacgcttatatggtttgcgtgggcactgcgcgacgacctgcgcgattatggcaagctgatggagcaggtggagcaaatgtacaagggcgaccttgacgcgatgaatcacctgcccgctacttccccgctttatgattccgccatgcagctcaatatgatccgtgacggcatccgtatcgcggtggaggaaggcatcaaatccgagcgcacgaaggtggagcttatcacgaatgtttcgcacgacatcaaaacgccgctcacgtccatcatcagctatatcgaactgatgaagaccgagccggatctgccgccgcacatgcaggattatttgaaaatcgtctcgcagaaagcagaccgtctgcgccatatgctgcaagatattttcgatgtctctaaagccgcaaccggcaatattacgctgatgccggaatacatcggtctcgataagcttttgcggcagacgctcggagatatggacggcgtgatgaacgacagcgagctgacgtggcgcgtgcagatcccgcaggaagacttccccgtttatgctgatgggcagcgcatgtaccgtgtgttccagaacctcatcaaaaacgcggcacaatatgcgcttgagggttcgcgtgtctacgtggagctgcaaaagcagggccaaaacgccgtcgtgacgatccagaatatctcgaagtacgagcttaccatggacggcgattcgctgacggcccgctttgtgcgcggtgatgacagccgttccacttccggcagcggccttggcctttctattgcaaaaagcttcacggaggcctgtggcggtaccttccacgtgaccgtaaagggcgacctttttaccgtgatgattgccctgccgctcaaagagccgccgaaggagccggaaaaggaaccgctgcccgaaacggcagacgcagaaaacaaagcaaacgagccggaagccaagcccgacgcgctccccgaagcttcggagcaggcagaaaacaccgaattcccggagtcttcggaaccccaaaattgaaaaagttgagtatataaaaccgcctgcaggagatatgaaacctgcaggcggtgctacttatgcgaaagcacggcgcaaaattttttctcgcgccgtgcttttcgtctttataaatgcttattttgctgctttctcaagtgcctgcttgatgtcatcgaggatgtcttccgggttttcgatgcctacggagaggcggataagatccggggagacgccggcttcctttaattgcttatcggtcatctggcggtgcgtggtgctggccgggtgcagcacgcaggtgcgcaggtctgcgacgtgcgtgacgacggaggcaagctccaagctgtccataaagcgggtggccgcttccctgccgcccttgatgccgaaagaaatgacgccgcaggtgccgtgcggcatatatttcatagcgagctcgtggtacgggctgctctcaagacccggatagttgacccacgccacgcggtcgtcctgctcgaggaattcggcaatcttctgcgcgttcgagcaatggcgctccatgcgcagcgcgagcgtttccatgccgaggttgaggtaaaatgcgttcatcggggcagcctgtgcgccaatgtcgcgcatcaggtggcaacgcgcttttgcgatatacgccgccttgccgaagtgcttggcatacacgatgccgtggtaggattcatccggctctgtgaactccgggaacttgccgttgttccaatcgaaattaccgctgtctacaatggcgccgccgagctgcaccgcgtgaccgtcgaggtactttgtggtggagtgcgtgacgatgtctacgccgaactcgaacggacggcagttgataggtgtcgggaacgtgttatcgacgatgcacggtacgccgtgcgcgtgtgcggcgtttgcaaacatttcgaggtctgtcacgacgagagacgggttcgtaagcgtttccgcaaacacacagcgggtgttctcgcggaatgcggcgttcagctcgtcctcggtgcagttcggcgaaacgaatgtgcagtcgatgcccatttcatgcagggttttgtagaacaggttgaatgtgccgccgtatacggcgctggagcacacaatatgacctcctgcgtggcagatgttcagaacggccatcatggtggctgcctggccggaggacgtgacgagcgcgcctacgccgccctcgagtgccgcaagcttcttttccacagcgtcgagcgtcgggttgccgaggcgcgtatagaaaaagccgtccgcttttaaatcgaacagatcgcccatttctttggagctgtcataggtgtatgtggtgctttgtacgatgggcagaacgcgcggttcaccgtttccgggcgtatagcccgcgtggatacacgttgtatccggtctgtactgtttcatttggacttccccaatctttaataatatcctattttcgcggcagtgcttactttgtgaaaagcgcttttaagagatttgcgatgaaatctgagccgagcacgaccaaaatgacgattgccatgaacgcgatgacggaaagcgactggatgagcatacgcttgccgcggggcatatcgtcctcttcggacggtttttcctgcgactgctcttcccgctctttgagcatcagctctttggcgcgttcgaggtcttggtattccacgtaaatatccttatcggtcggcagatactccgggtcgtacacgctggtggaaaagcctccttttacggggtgtatcgcatggcgcactgcgttttgctcaaagagcaatgcgagctccgcagcttccccctcgctaaccttgaggaaaaacacttcgtcctcgggctttacgggccgcagaccgcggctgcgcttgcagttcggacaggtttgtgtggaatcctcgcagatgcttttgcatttcgtgcagtagagcataatagcctcccatttcggcattgccgtttctgcttttcagtatagcacagcttttttacaaattcaactgtctttcgcggcgcacttcatcgcaaaacaggctgcaactgttctccgagcacggcgtttgcaagcgtttcgggaattaggtcgaaatgtgcgacgagagaattcggcttttttatggggtcgtcctgtccgagaggcacaaaatagatgtttttcgtgttcataagcagaccgatgtttttgcacgacgcaccgagagcatcgtttgtggcgagggacagtataacgggcatggagacgcgcagggcggattttaccgccatcgtgacggctgtatccgttacggcatttgcaatcttcgcagcggtgtttcccgtgcacggcgcgacgagcacggcatcggcaagacgcttcgggccgatgggttccgcttctgcgatggtgtggataatttttcgtccgcagatattttctatgcgctcatgaaagctttccgccgtgccgaagcgtgtatcggtcgtgtacgccgtttcgctcatcacgggcaacatatcccagtcctttcgcagcagagcaagctgcgcgagagctttttcaaatgtgcagaacgatccgcacatggcaaaggcaagcgtgggcatgtcgatcactactcctccaaaatattgtagaccgcctctttgatatactccgccgccgtcttcggcgcgacgcggccgggcagcgagggcgcgtcgatgacatgcaggtgcaattcttccgcacgcttcaaatcggtgccgccgggtgcggaggcgagctcgatgatgagcgtatcgcgtgtttgctgcatgagcacaggcgaagtcaaaacctttgcgggcacagtgttgaaaatgagatcgaaccttctgccgatctcgcggtacgtcaacggctgcacgccgaacgcgcgcatttgcatgagatcggcctttttgcgcgctgcgcagaatacctctgcacccataccgcgcaggataatcgccagatttttcccgatgcgcccgaaccccgtgatgagacattttgcgccgtttatcgtgccggggtattcgcgaatcgcaatgccgaccgcgccttctgccgttggaatcgcgttgccgacggcaagctcttcgcggcggtagtagtcttcgggctcaatctcacgccacagggaagacgaggcggtcaaccgctgaagcatgccgccgcacaccgttttgtgcataaaaagacgcgcaaaatcgtcatctaaacgaatttcgttttcggcatacggcgcgtttaaaaacaggccatcctttgttgcgggcagcggcaaaaggatgacggagcttttcgccgcgagctgcggcaggtcgcattctgctgcgccgcggcaggtgccgagcttttctaaaccgcagacacacacgggataaccgtccgccgcaatggactgcgccaaatatttcatgcgctcatcgccgccgatgacgccgaatgtattgatcatgggcatatttcccccacctttcaaattatcatccgcttcattttatggaaacgggcggcttttgtgcgccttgaaagacttttttatacttttttgaatttgctatttatttttctgtccgttggcggtataatgtatgtgtatgggtatgcgatttcggacgcatagctatgtttttgagatataacacagtgtattacataattttagataatttcgcaaaacaagttttgcgtgaagccaattcagaaaggactctttcgttatgacgaatcagaataatacgaccgataaaaacgttaacctgctcgataccgtacgtcgtctgcactttgtaggcatcggcggttccggtatgtgccctatggcagagattttacaccacaaggattatatcatcaccggcagcgacatcaatgaatccgatacgctcgcgcgcattcgcagctacggcatcccggtgcacatgggtcaccgcgcggagaacatcggcgatgcggaggtcgtagtgtacacggcggctgcaaagcaggataacccggagcttgttgcggcgcgtgcaaagggtattccgacgttggagcgttccgtgatgctcggccttttgacgaagaagtttgcaaaccccattgcggtttccggcacgcacggcaaaacgacgacgaccggtatgctcacgcagatcttgattgaagccggacgtgacccgagcgccgtcatcggcggcaagctgccgttcatcaacggcaacggcagagtcggtaaaagtgcggacattgtttgcgaagcgtgtgaatatgtcgatacgttcctgcagctccatcccgccatcagcatcatcacaaatatcgatgccgatcatctcgactatttcggcacgctcgataatattgtgaagtcgtttcatcagttctgcttgcagacctcaaagcgcatcatcgtcaatgcagataacgccaacgccatgcgcgccgtagagggcattacgaatgcggagatcgtcacatttggcagaacggataaaagcgattactacgtgacggagctcaacgaagaagatacggtctgcgaagactttaccgttatgtataggggcgagcgcgtttgccgcgtgagcctgcgcgtgccgggtgagcacaacatgatgaacgctttggcggctgccgctgcggcacatggcatgggtgtggacggcgagcatatcaaaaaggcgcttgagaacttctccggcgtacaccgccgctttgagattttaggcaaatttgaaggcgtgaccgttgccgacgactttgcgcaccacccgacagagctttccgccgtgctttccgctgccgtgcgcatgggctaccatgaggtttgggcggtgttccagccgcacacttattcccgcactgcaatgctgctggatgattttgcaaaggcgctttccatcccccagcatgttgtgatgacggaaattctcgccgtgcgcgagacgaacacgtataacattcacacaagcgaccttgcggcgaagattcccggcagctgctggtttggcagctttgaggagattgcggattatgtgatgacgcacgctaaggaaaacgacctcattttaacgcttggcggcggcgacatttacaagtgcgcaaatctcatcgtagaaaaatacaaagagagagcataaatttctaaaaggctttccgcgcgaaagctttttcttttggaggtaccatgtcttttcgcgccattttctttgacattgacggcactttgctcgggcgggataaacgtatgccgccttcgacgctgcatgcactaaaaaatgcgcgtgaaaatggcgttttgttattcgttgcaacgggccgtgtgacgccaatgacgtatttcctgcgtgattattttgattttgacggctttgccgcgatgacggggcaatattgcttcgataaaaacggcaaggttttacatacgctggcgatcgacccggaagacattcgtcttttgatgcagctgcaaaaagaggagcctttcccttgcctgattgccgaggggcgcgagtgctttgccgcaacacccgcaaagcggattgaagatcactttttgcggcataatcttccctccccgtccgtttacgatatatcgcgtgcagatcgtcacgaagtgtatcagcttatggtatacgacccggaaatttatttgccgtgtattttgccgctgaagcatgtacgtatcacacatgctgtcggttactgctatgatattcttccgcaaaacggcggtaagcaaatcggtattccggcgatggcggcgcattacgggataagaaacgatgaaattctcgtgttcggtgacggcccgaacgacgtggacatgctgcgcgatgtcggcttcggcgttgcgatgggcaacggttgtgcaaaagccaaggcggctgcaaattatgtgacaacggatgtggacgacgacggcatttaccgcgcactgaaagagctcggtgttatttaaacgataaacagaaagccccgcaaaaccgattgtttcggtaattgcggggcttttgctatgcggaaaattttatcgtttgtatttcggtgcggcggcgcggagcgtgtgccaaaggagcgcagcggcaatgatggcggcgcttacggcagcgccgatggaaaggcttttgtagccgagcggccctgtgaccatggagacgagcacggcaacggcggcgatgcacagcaaaatgatatatgcggctttatccatatgctcaagtacatttttgttcatgttcataaaagcatctccttaatcggtaagctgattgacaatagcggcaaactccagcagcgtgagtgcttcggcgcgggaatttgcccgaactccggcttgctcaaatgcgtctgtcacttgctgcttcgacatatgcagtgtgttggaaatggaattgacggccgttttgcggcgctgtgcgaacgcggcgcgaataacgcggaagaaaagtgcttcatcgtgcacatccacaggcggttcttttcgaatacgcagctgaatgacggcggaatccacattcggtgcgggcataaagctgccgcggctgacctcgaacaaaatttccggctcggcgtaatactgcacggccgcactgacagcgccgcactcgcgcgtgccgggctgtgcacacaaacgctctgccgcttctttttgtaccataaccgtgatgctcgtgatgggcaaacgatcctccaaaagcttcatgatgaccggcgacgtgatgtaatacggcaggttcgcacacacagcgacctcttccccgttaaattcttcttcgatgacgcggtgcaagtcaatcttcatcacgtcatcgttgatgaccttcacgttatcgcagtcggcaagtgtttcgtctaaaacgggcaacaggcgcttatcaagctcgatggtgacgactttttttgagacctgcgaaagctcgtaggtcaaaacgccgatgccggggccgacctcaatggcgcctgcgcagtctgccgcgccgctcatctcagccatgcgcgggcagacggagggattgatgagaaagttctgaccgagcgccttggaaaagctgaagccgttcttttccatgacggctcgaatggtggatatatcggaaagtctttgcatagggatatcctttcgattaaaatgtcactttatagatctgcacgccgttttcgtcaaagacacacgggaacagcgctttgatctccgcttcgttcacggtgaagttattgcgctcgtaagcggagaccaggatgtaatcaatactgtatttttcaaagagcgcacagtttgcctgcggtgcggagaacatactttgcatgtccgtttcgcgctcggtgtaatcgagcccgtgaaaatacacgtagcttgtggagccgcagacgatgtttctgcccgtcagcgccgcgatctcgttgttatggcgcatatcggtcagcacagtgtcttccggctcggtgttctcataaatgtactccgctgctttgagctgactgtcgccgtataagcaatagcccgcaatgctctctctgccgatggtcagcactgcagaaagcatgcatagcacgagcgcgccgatagccaatgcgcggcggcccggcagtgtgcgcaggcgacggtaaatctcgaccatatacgaagcgactacgccgcagacgagaaaatacgcggcgtaaagcagcttgttgttatcataggtattcggctggaatacgacaaactcgcaaatgaaccaaatgacggctgcgggagcgcagaccgtgaaatgacgctgatctgccgtgaaaaatgcaggcaggaataacagcgccgtgacgccgagatttacaagatagaaccacaaatagccgtcctgcaaattgccccagttgtaccacccacgcatgaagctgtctccgctcgcctgcgagaatgtccacgtgaaaagctgcggtgcggcaagcagcagtgtgatgagcaggaatacgccccacgtttttacaagctgtatgccgaaacccttgcggatcgccaggatgagcagtgcgagcacaaacaatacaaacactgcggcacaaaccaaaaccagatacagaaacacggatgattcacgcgagatgagcttcggcgtgacgaactgcgcgccgaacgcgagcaacatcaaaacgagtgcagcgacttttgcggtaaactgcacatgagcactgctgtcccggaatactctgcagcacagtgcaaagcaaagccacacgccgcaaatgagtccgaatgcgaggaacgaatgcgtatgaatcatgacaagtccgcctgcaaaaacaccggcaatgatgaaataccgttcgcagtgctcataaacggcgcggtacagcacgtataaaagcgggaataaaaccgcccagccgaacagcgttgcgcgctgcgggatgagcatatccacaatgacgttcacccagcggatattttggttgacaagattcgtgggcgtctcataaaacgatgtgaaaatgcgggtgaaattatctgttccgttttgcagattcgggaagaaatacgcaaagccgaagccgccgtttaaaaaaaacaaaatctccgctaacgcggtcttcgctttatcacgcagccagcgttgccagaaaagatgtgcgccgaaaaacacctgcgccccggcaaaaagcatcggcagcacatacgcaaagcgcagcggcgcaccgagcaaatataggcttgaagaaatgctgtccgacaagaacggatacgaaagcttcacgcccggtaaaatggaatacatgggcggaaatgtcttctgctccgcgatactcgtgatgaacccgaggtgcatgctcatgtcgccgtaggtgcattggctcgaccagatctcgccgttttggtaacggaagctgtgcagcaccaaaaacacgaacagcagccacaagccgagcggcaaaagcagcgtgcgttctgcacggcagaaggctttgcgtttgccgggaaaatcattcggaagcagcttcggacgctttaagaacacagcgccaaccgtcagcaaaagcagtgagatgagcgccaaaacatgcgctgtgatactgaacaaaaacaggaatgcccacaacgacggcagccacattaaaagcacgctgcccgcggcgctgccgagaatcatttgtgtatatcgccgctctttatttaaaaagcatgcggcaagtgttacgccgcacagctgaaacatcagaaaatacagcagcgccaccgcgccgcccaaaaaattgccgctcataaacagctcctgaatttgttctttaatataatatattgtaccattttggcgacgggatgtaaagacggcagaaaaggttttattgcaggcgcttacgcgctttttcacaaaacacccggaaacggggttgaagttcaaaatgcaatgtgctacaatatattttaataattacggcgtctcccctgcggttttgcgcaaaagcgaacgatgatacgcagtcgtatatgtgtagtttccgattgcggagtgcctgaatgcaaagtgaggtgttcttcgtggagaatgatatccatcggagagataaaacgaactactatctggatctggctgaggccgtttcccagcgctgcacatgccttcgacgtcactacggcgctgtgatcgtaaaaaatgatgaagtgatctccaccggctatgtcggtgcgccgcgcggcagaaaaaactgcacggatatcggcaaatgcgtgcgcgtggaaagaaatattccccgcggtgaacgctatgagctgtgccgtagcgtacatgcggaagcaaacgccatcatcagcgccccgcgcgataagatgatcgacgccacgctgtatcttgtcggcaaggaggtctctaccggcgactatgtgaaaaacgccgtatgttgctccatgtgcaagcgcatggtcatcaacgcaggcattgcacgggtcatcgtgcgcgatgaccacgatcggttcagagagatagatgttcaggattggatcataaacgacgaatccatcgaaggtgtattcggctattgagccttaccccgttaccgcgtatccggcataaggctcggaaagaatacggtgaacatttatgtctttaatacaggtgtcaaacctgaccttcggctatgaaggcagctttgataacgtctttgaaaacgcgtctttttccatagatacaaactggcggtgcggctttatcgggcgcaacggcagaggcaaaacgacgtttttaaacctgctgctcggaaaatacgcgtatagcggtaccatttccgcttcggtcaactttgagtatttcccgtttgaggtggaaaatccggacgatacaccgcttgagattgcggagagcatcatgccggactttgagatgtggcggctaacgcgtgagctcaacttactcgacgccgacccgggactgctttaccgcccctactcgacgttaagctacggcgagcgtacgaaggtactgctgtcgattttatttatccgcgaaaacagctttctgctcatcgatgagccgacgaaccacctcgatattgaagcgcgcgacacactggctcagtatttgaagtcgaaaaaagggttcatccttgtcagccacgaccgtgcgtttctggacgaagtcatcgaccatgtgctttccatcaatcgcgcggacatcacggtgatgcgcggcaactttacgacgtggcaacaggagaaagaccgcgaggatcaatttgagttacaacaaaatgagaaactcaaaaaggatgtgaagcggctggaggcggctgcccgccgcagcgcggaatggtcaaaccgtgcggaagaccgcaagatcggtttcaaaccggagcgcacggaaaaggcccttgaccgtcgtgcctacgagggtgaaaaaagccgtaagatgatgaagcgtgcaaagagcattgaatcccgccgcaacgatgcactggaggaaaaaagcgcgctgctgaaaaacattgaatcggccgatacgaaattgcaggttgcgacgctgcgccatccgaaagaccttttggtagaggcaaacgacctttctgttgattacggtgacggccccatctttcctccgctgcgctttgagatccgccgcggcgaccgtgcggcattgcagggcaaaaacggctgcggtaaatcgagcatcataaagctattgtgcggcgaagatgttccccataccggcacgctgaaaaccgcaagcgggcttgtggcctcgtatatcccgcaaagcgcggagggactttccggcacactgcgcgactatgcagagcattgcggcattgacgaaagcctttttaaatcgatcttgcgcaagctggaatttcagcgcacacagtttgaaaagcacatggaggatttttccgagggacaaaagaaaaaagtgctcattgcgcggagcctctgcgaaaaggcacatttgcttgtgtgggacgaaccgctgaacttcatcgatgttatttcccgcatgcagcttgaaacgctcttaaaagagtgtgtgcccacagtcattttcgtggagcacgaccgccgctttgtggaaaatgtggcaacaaagatcattcggttataattgcgggttaaaatctgaacaaagcgcgtcgtgcagggctgcggcgcgcttttgttataaaaatcaggggctatgaaagagagaaatctatgaagcaaagaagcgactatattggtatattggacggcatacgcgcgtattccattttgatcgttgccgggtttcatttgtggcagcaatcctggctgcaaaatctgtttccaagcaatttgctgcagtttatgggcgtgcggaatttcagcttaaactgggtaccgcgcacgggctacatgtttgtagacgtgatgctgctgatttcgggattctgcctctttttgccctatgcgcggcaaatgaccgacccgcttgcgccggagccggataacctgcgcacattctttaaaaagcgtgcagcgcgcattttgccatcgtattatttgtgcttgcttctctacctcattttctgggtgcggccttcggattacgcgaatgtcaagcaatacttgcaggatatttttgcgcatctgacgtttacgcagacgttttggccggaaagctacatcggcacaaaatttccgacagcactgtggacactcggcgtggaaatgcagttctatctcgtcttccctttgctcgcgcgcgtgttccgtcgctttccgcttgtgtgctgggcggtgctttccgttttggcgcaggtgtatatcgtgctttttgcacatctgccgcaaggcaacgcagaaagcctgcgcatcaaccagttcccggcgtttttgggtgtatatgcaaacggtatgctgtgtgcgctcttcttctgccgcctgcggatatggcgcgagcgcgaatggaagaaaaaccgtattttaccgcttgcggcgctgatgctgcttctgttcagcggtgctgccattgtgtgtatgttaaatgacgggctgagccgtgcggcaatcatccagcgctggcaggtggattaccgctttctgttttctgcgatggtctgcgttttcattttgcttttggatgctgcaccgaaaggcgttcaatggctgttttcaaaccgcatagctgcttttttgtcggcggtctcctataatttctatatctggcacagcacggtgcttttaaagctgaaagcgtggcgcattccgtattacccggatgccccggagggcgctgccgcgtggccgcaatccgcaggcggcgagccgtggcactttgcttggcaagtgaagtacacggtgctgttttgggcgtgtgcgctccttttggcggtgtttttcacctatcttatcgaaaagccgacagcaaaacagctgctcagaaagaagaaaatcacccgtacatagaaacagaccgccgcggcgtatttcacgcattcggcggtctgtcttcatattctgtccgggttacggaaaactattccgttttgccgtcttctttctggccgtaagcgcggtcggctgcttctcttgcaatgtcgatgacgctgtattcgcgcttttcgccctgttcgatgataggcagcatttggtagacctctgccgccatgccgtgcccccaaagcatagggtcgatacgcatggagtagccgtggccgttttcgcacatccaatcggtcattttggcgcgcggcaagccgtaagccgctaagatcgtcatgatgacgccgccgtgtgtgacgagcacggcactctcatctcccgtcatcatcatgtttttaacgagcatctcaaagcccgcacagacacgctgcataaatacgatgctgctttcgccgttcggcggggcctcgtgctggccaccgttcatccaggcgacgaacttcgggtcgtttttcaattcttcggcttttttattttcccaatcgccgaagtcgcactcggcaagctctaaaataacttccgggtcggcagtgggatataagaccttcagcgtatcgacacagcgcacgcacgggctggcgtagtacttttttgcttcggggtaaacgcccttacgtttcaactccaaaagtgcctgaatgccctcctgcgcaagcggagactgcgtgcggccgatgtaacgaccctccaaattgccctcgcatataccgtggcggattaaatgaatggtgtaagatttcatgcgattttcctttccgggacggtaaaacgctgccgttgcgtccctttcaccaaaaattcgcgggaaaacccgcaaaaaaggttcgtttatctgtttacttctcggataatttcgtttataatttacagagtgttattttttgactcaggtggtgaaacttttgtgaacagtgattttccgcgcattctgacactgctgcgcaaggaacagggtatcagccagaaaaaggctgccgcagaccttggcatctcgcaggcgctgctctctcattacgaaaaaggcatacgtgaatgcggtttggacttcattgtgcgcacggcggattattacggggtctcctgtgattatctgctgggcaaaacaccgcaccggcagggcgaaaagctgcatgtgccggaaacggaggaggaagacacgcacgatggtctccccaacgtgagccgaaaaataatatcgaactccttacatattgtatttggtattctgaaaaaaatcaatagcaaatctttaacaaaagagatcacgctgtatttgagcggcgctgtgtataacgcgttccgcatgctgtatacggcgaacccgaaaaatccttcggctctttttgagacgaaggacggactgagtgaggcgctgaccgacggccgtatgcagctggcgcgtgccaaaagccgcgtgatgctgctcggcgaaaaagtgtcggacgacgaggccgttaaaaaagacgacctgccccagctttccggcgagatgctctcggcggaatatcccgattgggcgccctcgctttttgcattgattgagaataccgaaaacgaacacaaggaaaactaagtaaaccaactgcaaaaaggaggcaaactgtatgtgtggttttgtaggttatattgacggcggcgaaacacagcttatggagcccgtgctgcacgctatggcagaccgcatccgtcaccgcggcccggacgacgccgactattacatggacggcgagatctcgctcggtttccgcagactttccatcattgacctcgagggcggcagacagccgattttgaatgaagataaaagcaaggttctcatgtttaacggcgagatttataactatcagtctctccgcgaagaccttttaaaggcaggccatgtatttacaacgaaaacggacagtgaagtgctgctgcacggctttgaagaatacggcaccgacctgctcaataagctgcgcggcatgttcgcgttcatcatttgggacaagaacacgaaaacgctgttcggcgcgcgcgattactttggcattaagccgttttactatgcaaagatgcagggcacattgatgttcggcagcgagatcaagagctttgtggaacacccgcactttaagcgcgagctgaatgaacgcgcactggagggctacctttctttccagtattctccgggctacgagacattcttcaagaacgtttacaagctgccgcctgcacattatttcttctacaaagacggcaaaatggatatgcagcgctactggatcccggaattcaacgcggaagaagacaagccgcttgaatattgggtggacgagattgaaaagacctttgacgactccgtaaacgcacacaagattgcggacgttgaagtcggctctttcctttcctccggcgtggattccagctatgtggcctgctctgccgatgtggacaagacgtttacggtcggctttgacaacggcgaaaaatacaacgagatcagctacgcaaaggagctttccgagctgattccggtgaagaattacagcaagacgattaccccggaagagttctggggaaacttcggcaagattcagtaccacatggacgagccgcttgccgatccgtccgccgtggcactctatttcgtgtgcaacacggcttccaaatatttgaaggtcgtgatgtccggcgagggcgccgatgaaattttcggcggctacaacatttataaagaaccgctcgccgtaccggcttatgataagattccgttccccatccgccgctttatcggcaaagtcgcttcgcacctgccgaagaaatccggcatcaacttccttatccgccgcggcaaaaagctcgaagaccgcttcatcggcaacgcgtacatgttcactgaggaagaacgcaagaagctcctgaaaattaagaccgatgcaccgtccccggcagaagtcgtaaagccgttctatgatcgcgtaaaggacaaagacccggtaacgaaaatgcagttcgttgaccttaacgcctggatggtcggcgatattcttctgaaagcggataaaatgagcatggcaaattcccttgaggtgcgcgtgccgttccttgataagaagattatggagcttgcggaacgcatcccgctcaagtaccgtgtaaacgacgagaacacgaagtttgcgatgcgcaaggccgctttgcgccgcatgcccgaaaagtgggccggcaaaaagaagctcggcttccccgtgccgacacgtgtgtggctcaaggaagacaagtactacaacatcgtaaaggagaagttcacgggcgaagtggcacagaaatacttcaacaccgacatgctcgtaaaactgctggacgaccacaaaaacggcaaggcggacaacagccgccgcgtttggacggtctacacgttcctcgtgtggtacgaccagttctttaacgatgatattctcaacggctatgcggagcacacagacgcaaagaccgcgtaagtatttggaaggaaaataaagatcatgaatacagaagcattaaaaaaacaagattttctgccggttctgctcggcagtgacatcaacgtatacggcatggcgcgttctttccacgaggcttacgggtacaaaagcgtagcggtcggcaagggcatccttcccgcctgcacgcacagccacattgtggaagttttaaaggtagaaccgcgccttgaagaagacgacgtgtttatccgcacgctgactgaatttgcaaagaacttctccggtcagagattactgctcgtcccctgcggcgacaactacatcaaaatgcttgtgcgcaaccagacgaagctgcgcggcatttatgaattcgagtgcatcagcgaagagcttttaatgcgcctttccatcaaggaaagcttttatcaggtctgcgaggagcatggcttctcgttcccgaagacaacaacctgcacgtatgagaaccacaagaatcttgagctgcctttcgacttcccggtcatcatcaagccctcgaacagcgtggcatattggaactgtaagttcccgcacaaaaagaaggttttcgttgcaaacacccgcgaggaatttgatgcgattttggacgccatctacggttcctcttacaaagatcacctcattttgcaggaattcatcccgggtgacgattctaaaatgcgcgtgatgaactgctactgcggcaaggataagaaagtaaagctcattgcactcggtaatgccgtgcttgaggagcattccccggagggcatcggcagctatgcggccatcatcaacggctacgacgaaaagctgaacgagacgatgaagaacttccttgagggcatcggttacgtgggctttgcaaacttcgatatgaagtacgacgagcgtgacggcaaatataagctcttcgagatgaacctgcggcagggccgcagcagctatttcgtaacggctgcgggctacaacattgcaaagtggcttgcggacgacgtcatctacaacaagcccatggatctcaccattgccacaaataaagtgctgtacacaatcatcccgacgaagatcatctttgactattgcccggacaccgccgtgaaagcggaagcgaaaaagctcatcgacgaaggtaaagtggttaactcgtattattacaagaaagaccgcagcctgatgcgctggctgatgttccgccgcaaccagcacaactactttgaaaagtacaagcgttatttcaacaacaaaggactgcgtgactgatgaacagtttaggcgttatcggcgggctcggccccatggcgacagcgtatttattagagcttatcaccgacatgaccgatgcccgcaccgatcaggagcatcttgacgcgatcatattcaatcgcccgagtgtgccggatcggaccgcatacattttagaccatacaaagccctcccctgtgccgccgatgatcgacatcgcacagaaattggaggcgctgggcgtgtgcgcactcgctaccccgtgcgtgacggcacacagctttcacgatgaactgcaaagcagcgtacacattccgtttatccacatggtgcgcgaaacggcagcatatctaaaagaagccggctgcaaaaagcccggcattatggcgacaaccggcacggtgcgcatgggcttatttcaaaccgcgctgaccgaagcggggctttcctacgttttgccgaacgacgaaatgcagcagaatgtaatgtcgctcatttacgactgcgtaaaagcaggtgaaccggcggatatggtaaaattccgcgccgtttccgacgctttgcgcgcggatggctgcgacgctattattttaggctgcacggagctctccatcatcaagcgcgataacgagcttgggcccggttatctcgatgcgctggaagtgttggcacgcgcgtgcattttagcgtgcggcaaaaaactcaagccgaaatattcttccctgatccaacaataaaagcataaggaggcgttttgtatgtgcggctttgccggttatattcacaactacggaacgttcgataaagaagaagtcatccataaaatggccgaccgcatcaagcaccgcggcccggatgatgcccattattacattgacgacggcattgccctcggtttccgccgcctttccatcatcgacctcgagggcggcaggcagccgattttaaacgaagacggctcgctcgtgctgctctttaacggcgaaatttacaactatcaggagcttcgcgaagagctcatcaaagccggacacgtcttcaccacaaagacagacagcgaaacgattctgcacggatacgaggaatacggcaaaaaaattcttgaccgtctgcgcggcatgtttgctttcatcatctggaacaagaacacaaaagagctctttggtgcacgcgatattttcggcatcaagccgttctattactacaaaaagggcaaggaattcatgttcggcagcgagatcaaaagctttctctctcacccgaattttgaaaaagagcttgacgaggatatgatcccgttgtacctttcctacgagtacagcccggacgagcgcacaatttttaaaaatgtcttcaagctgcccggcgcacactgcttcacctacaaaaatggcgaactgaaagtggagcgttactataagatcgaatacaaaattgaagacgacaaatcgcttgaatactgggaggacgccatcacaaaggagttcacggagtccgtctccatgcaccagatcgccgatgttgaggtcggctgcttcctctcctccggcgtggattccagctatgttgtgaaagaaatctccaagggtacgaagaaggtcaagacattctccgtcggttacgaggaggaaaaatacagcgagctgccgtatgcgcaggacttctccaatgtcatcggcgtaccgaacatcgcgaataaggtttccgcagatgagttcttcgacgcggtgccggagattcagtattacatggacgagccgctgccgaacccctcggagatcccgctctacttcctcgccaaaaatgcccgccgctatgtgaaagtcgtgctttccggcgaaggtgcggacgagctgttcggcggctacccgatgtatcttgcaggcggacattttgaccactattcgcataaggtaccgcgcccggtgcgtaaagtcctcggcacggtcgcaaagcactgcccgaacttcaagggcaaaaactttctcgtgcgcggcgccatggagccgtatcagcgctttatgcgcgcaaactacgttttccagagcgcagagcgccaaaaattcttgaagcgtcccatcacgagcaaggttccggaggaatacagcaagcgctatttcgacgaagtatcgaatctcgacgagccgacccagcttcagtatgtggacatgcacacgtggatgatctatgacatcctactgaaagccgaccgcatgagtatggcaaactcccttgagctgcgcgtgccgttcctcgacaaaaagatgctggagctttccacacgcattccttcccgctaccgtgcagcaaacgaaacgacgaagatcgccctgcgcggcgcggccatcaagcagctgccggagcgcacggcaaacaaaaagaagctcggcttccctgttccgctgaacgattggctgcgtgaggataagtactacaacaaggtcaaggcggcgttccagagcgatattgcggagaaattcttcgtgacaagcgagctgatgaagctgctcgacgaccacaagagcggcaaggcgctgaacatgcagaagatctggtcgttctatacgtttatcctttggtatgagcagttctttgtgctgaactgaatatagtcgaaaacagcgtcaaattacagattggcgctgtttctttatggaattattttgttaacaacagacaagcaaatttaaaagaaaaacaaaagctttattcttcccttttttgggcggaataaggctttttcttttgcagctttatcgtcttgcacggcggtacgcggcaggtgtttcgccggtgatgcgtttaaactggcggatgaaatggtatgggtctgcatatccgctgtgttcggcaacttccgtgatgggcaagtcactgccggagagcaataaagactgtgcataacgaatacgcgcttcaatcaggtcgcgcatgggcgacgtaccaaaaaccgcgcggtataacgcatgcaggtgcgaagcgctgacagacgcaagcgatgccatttgcggcacagtccagtgcttttccgggtcagaaagcaccgtgtgacgcaggttctgcatcttttctctatctgcacggctgaccgtaggcgagtagttttcttccgctgtggcgcgggagaaacgcacaagaaattctgtggtgtatgcttccaacaagtcctcccgaaacggttcattggagaaaaatgcagcttccgtttttcggaaaaggccggagataaactctgccgcacgtgggtaaagcagtgtgttttctggaatacgatagcgcaaaagctgcacgcgaaagccaggcgcaaaatgcgcccagttgtgcgtgaggttactgtctgagtgaaaccactgtggttcatccggcgcatagaaaatacacgcgccgggtcttactgtgaccttttccctgttaatttcaatctccacgctgttcataaagtgcaaaaacgtgtagatttcaatgcctgttgggcgcacaagtgtaaacccggctttttccggccaatcgtggcgaatatctgtaatctccattttgacgccccctttgctttatattatactcaaaaactccccgtgtcgcaatagaataagtcaattttcgtgcatgatacgacattgtattttgcatagagattgcgtacaatgaaaccgtaatcaaaaaagcgcggcagaaattgagatttgccgtcttttcgaggaaaggatgtacgaaaaatgagtaatataccgaggaaagaatatccgcgcccgcagtttgtgcgcgaaaactggatgaacctgaacggcacatgggcgtttgagatcgacaacggccgcagcggtgaggcacgcggcttacagaaggtcggcacagcgctcagcggagagatcaccgtgccgttctgcccggaaagcgaactttccggtgtgcagcacacggatttcatgtacggcgtttggtataagcgcgtcgtaacagtcacagaagagcagctgaagggccgcgccgtgctgcatttcggcgctgtggattattgcgcaaaagtttttgtgaacggcgagcttgccggcacacacaagggcggctatgtttcgtttgagtttgacgtgaccgcacttttaaaagcgggcgaaaatgaaattgccgtctacgccgaagataatacgcgcgaccgcctcatcccgagcggcaagcaaagcgagcaatataactcatacggctgcttctacacgcgcaccacgggcatttggcagaccgtatggctggagttcaccccgaaggcttatatttcccgcgtgcagtattatccgaacatcaccgcaggcacggtaacggtgaccgcagagctggtcggtacggcaaacctcacagcaacggcttcgtttgaaggcaaagaaatgggcagctacacagcagaaaacgcctgcggcacgcacacattcacgataaagctgagcgaaaagcatctgtgggatgtcggctgcggcaatctgtatgacgttacattcgctttcggtgaagataacgtcatgagttatttcggtctgcgcgaagtgcgcctggacggccacaagttccgcatcaacggccgctctgttttccagcgtctggtgctcgaccaaggcttctatccggatggcatctacactgcgccgagcgacgaagcgcttgaaaacgacattaagctctcccttgccgtcggtttcaacggtgccagactgcatgagaagatttttgaagagcgcttcctctaccacgcagaccgcttaggctacatcgtttggggcgaattcccgaactggggtctcgattcctcctatgccgattccgtttacggcattttgccggagtggacggaagagatccgccgcgattttaaccacccggctattgtcggctggtgtccgtacaacgagacatgggataccgacggcaggaaacagtttgacgacgcactcgacatcgtttacagagcaacgaaagcgcttgaccctacccgtccgtgcatcgatacgagcggcaactatcatgttgcaactgatattttctgcgtgcacgattacgagcagaacccggaaatctttaaggagcactatgacaagctgatgaccgagggcacactgtttgacaaccacgcgcaccgccagacctacaagggcgaagcgacgttcgtcagcgaatacggcggcattcagtggagtcaggacgagagcggctggggctacggcaccggtccgaagaccgaagaggaattcctcacgcgctttaagggccttacaggcgcattgcttgataacagtgaaatgttcggtctttgctacacgcagctgaccgacgtggagcaggaacagaacggcctttacacctatcagagaaagccgaagtttgatcccgcgttcttccacggcgttttgagtcgcaaagccgcaatcgaagactaacagatacgtttggtgcccgcagtttttccgctgcgggcacttttttatcaaaatacaggaattttgttgattttcgtcatacgtacgtcacaaatgcatagtattttatataatagagtaattttgggcagcaagtttctgctgccggatcctgttctgaggagcgtatttatgccgcaaaatcactttagagaaccgaaaaaccgacgtgaacattttctctctgccctaccaatcgtcttgccggtggcagccgtgacgatatccgccgccgcgtttggtttgctgttcctgcaaggggatctagtggagcgcgcggaggaaaccgttacatacactgcagcgattggcgcagctgacgagcagatggaaatgtacgtctacgatgcggacaacgatgaagttgaggaagccgaagaagaagcttcggaaatgaatgccgcgtcttcctacgccgcgaaagagcgcattttgccggctggcgaagtagaagacaccgcagagcttgtagatgtatacagctctgtgccattatttgtttccagcggcaatcttgcggagcaaggcgtgcagacacggcttgaactgcttgaagattattttccaaacggcatgtactggaaccatatcggtgtggacacaagcgaaatgacggcagacgaaattgccatgtgcgttacagacacgccgtgcaaccattctgtttatggttatggaaactgcaacatttataatggactgatggatgatttcttcccgcaatacggagacgaaatgcaatgcctcggctacgcttccatcatcagcgacctgctgttcggctacgatgcaccgatcacggagttttacgactttgacgagttgcgcatcggcgatcacatccgcatgggttggtatgagcactcgatgatcgtgacggaagtaaatgcagattacgaaaactgccagatttcctggggccgacaaatcacccgcagcgagcttctcggcatggaaggcgaccttacctattacacgcgctacgcaaattgaaaatcggttgttctgcgcctcggcaagattttgatgtcttgtcggggcacattttatattttccaaaagttatacgatacaaaaacaccccgaacgacgcaaaatcgttcggggtgtgctgattcagagaatcaattatttaaccatgttggcaacttcgcttgcgaaatcgtcgtttctcttctcgaggccttcgcccttctcgaagcgaacgaaatccgtaaccttcatcgtgccgccggccttctttgcttcctcagcaatgtactgctcaacggagaggtcgccgttcttaacgaacgcctgctgcaggaggcagttgttctcatagaacttgccgattctgccggtaaccatcttctcgatgatgttctgcggcttcttggagttcttcggatcgttctggatctgaaccatgaggatttctttttccttatcgagtgcttcagccggaaccgtggacttatcgagataagccggattcagagcggcaatctgcattgcgacgtccttgccgcactcgttgagaacttctgccggaacattctcggtctcaaaacgaacgagaacgccgattctgccgccgccgtgtacgtaagcaacgcagtcgccctcgtaacggacgaagcgacggatcttgatgttctcgccgatggtgagaatcttatccttcagcatagcatcaacagtcatatcggagccgtgtgccttagctgcaaggagagcttcaacgtctgccgggttctcatagataacagtctcggcacaggtcttaacgaaatcaatgaactgagcattctttgcaacgaagtcggtctcagcgttgacttcgatcacaacgccaaccttaccgcactcgctgaccatagcgtatgcaacaccctcagctgcaatacggcttgccttcttaacggaagctgcaagacccttctcgcggagaatctcggttgccttctctacatcgccctcagcctctgtgagagcctttttgcaatccatcatgccgcagcctgtcttagcgcgcagatctgcaacgtccttagctgtgaaattcatttcaaatcaccattccttgtagaatcttaaactctatatcaaacgaaaggaatttttaaccgaaattaaattattcctcggtctctgcagcagcttcttcggtctcctcagcagcagcgcccatgcggccctcgcggccttcgatgatagcgttagccatagcacctgcgatgagcttaacagcgcggatagcgtcgtcgttgcccgggataacgtagtcaatctcgtccggatcgcagttggtatctacgattgcaacgatcggaataccgagcttcttagcttcggaaacagcgattctttcctttctcgggtcaacaatgaacagtgcgcccgggaactccttcatgtccttgatgccgccaagatacttttcgagcttttcaatctcgagctcaagcttgctgacttccttcttcgggagcagctcgaaggtgccgtcttcctgcatcttgcgcagctgtgcaagtctctggattctgcggcggatggtcgtgaagttggtgagcatgccgcccagccaacgagcgtttacatagtaagcgcctgcgcggagagcctcttccttaacggactcctgagcctgcttctttgtgcctacgaagagaacgctcttgccttccatggaaaggtcacgaacgaagttgtaagcctcttcgagcttcttaacggtcttctgcaggtcgatgatgtagataccgtttctctccgtgaagatgtactgtgccatcttcgggttccatcttcttgtctggtgaccgaagtgaacaccggcctccagaagctgcttcattgatacgactgccatttgaaaatacctccttggtttttcctccgccgggctgatattttcggggaaaaccgcttttgcggcaccaatccgagagcctcggcgtgcgtttttgcttgcagaatctgcaaatcgctgaactattatagcacaacatgccgggtaaagcaagtgttttctatccgttttcaaagaaattttgtaagaagctgcgcttcggtgtccgctttacgggaatgtgatcgaccagcaccgcatcctctccaatggtcttcacagcgctccatgggatcacacagtcattctctctgccaaacaatccgaaaaagcgcggacgaccgtacaccacgatcgccgtcagtgccgcctgctgtgtatcaaattcaatatcaccgagatacccgatacgcgagccatccaaaacactgataacctctcgcccatgcatttctccgatgcgttctaacatatcgctcccccgtttcgccgtatttttccgatacagcgtatgcacagtagggatacattatgcgtttgcatcctttaaaatgacttcggcaatcgtttcggcggcaaggttcgagcccgcttcgttcggatggctgccgtcgtcgttgaaaagattttcggtttcggttttttcataaaatgcactgccgacatcggcgagcagtgtgtggtttttctctgccgcttctgcataggcttcgtgcattttgcggtacatctcatcgtaatctatgccgaatttttgaagctgtttgccgtctttttggtatgcccatgtcgcatacagaaccggtacggcaccgttttcacgaattttaccgcacaaatctttcacgctctgcataaaactttcctttgctatgatagggccgttgctcatctcctgcaaaacgacgtaatcccatttttcattttgcagcagctccaatgcttttgcgccgagccttgtttcagggttcagctgctcacgtaagcgtgcaccgccgcgtgtgttctgtaccacttcggcacccgtgatttccgccagcatactcggcagatcatttgtaaaaatatagctgtttccaagcattaaaatgcgcatatttatttctcctagtcctgtgtttctcgatattctacaaaagtgttttttactttctccgccacttctgattcatacacaccagccgtgatgagcagctttctcaccttgatagggtttagagctagagcatcggcgatggattggagggagcagtcctccccataaagagccacagcagcatccatctgctctttcagaatctccccggcatcgtattcaggcttcagcttcttccgaccaccgccgggcttccgaggtttatatgcttttttctctcccataattattcgtgcagttccagcggcagtccatccgggtcatggaagaaagtcatcttcttgccggtgtaatcatccacgcggattggctcacattcaattcccgcttctgccaactcattcactgtctgctccacactgtctacgcagaatgcaaggtgacgcagaccgcaggcctctgggcggttcacacgcttcggcggatttttctctgcgaaaagctccagctccgtgtgttcattgacacgaagatccagcttccggtccttgcgctctgggcgatagttttctctgatgacagagaatcccagcttgttcacatagaactcccttgcggcttcgtagtcagatacgatgattgcaatatgatgtatttttgataagtccattttgtgtcacgctccatttcttttatttctattcaattcttatttccgttataaactatatagcgaccttcaaaaaaaccgtgtgaacttctggagttcagtttgtccacacggccgatcttattccagtttttcgaggatttcatccgcactcatgccgctggccagcagcttcttcagcacagcctctgcttcggtcttcttcgcttcttcagcggccttagcatctgcctttgccttcttcgattccagggatgccacttctttttcggccttcttcagagcagacttcttctctttcaggtcagcctttaaagtgtcaatgttggcggtgacggaggcaatctccgtattcagagacgcaatagtctcctgcttctctgcgatctgggttgcgtagtcat

SEQ ID NO: 1724 - DNA, 63224 bp, Unknown
  gut microbiota DNA sequence
ggtcatatctatttacaacgcaaaacaaaaaacgtcctaaaccgaacttccctcttgattttttcctcaatttatattagaatagataatacagtaaaatgaatacgcgggcgtagtttaatggtagaacatcagcttcccaagctgaatacgagggttcgattcccttcgcccgctccaaaaatcacgagtctttttgattcgtggttttttcttttgaaaaaagcttttgcacatttcaaagcttcttcttttccaaaatcgttagtgaatgccgtttcgtttctaaaactattcatcaaaatattttttgcagaaaatgcagcgaaagtttcctttttcagggaaacttttgccgtgttttcctctataggtagaaaggcttcattttacttatagaggagatataaaaatgactgaagaaaatcgagaatatcgcacaagtcaaatcatgctaagaaaccagtttcatggcaaagacaaatttaagattcctattattcccaaaggaaatttcggggataaagactttcaaaatctgctgttaatcggctttgaccgcaccaacatcagagatgagcatcacttaaaccgcatggttcatttctttttatatgattataaatttgaacggatatggaaaaaaccggactatgatatagaaaaactgaaacgctacagagccgttctatctccagatttcagtatctatagagagatgaacccttcaatgcagctttataacacttttagaaaccgctggtgcggcgcatattttgcttcaaaaggaattcgggttattccaaccgtaagttggggagacgaaaatacctttgatttctgtttcaagggcattccaaaagggagtgttgtggcggtatccacttacatggtttctgagcatggcaatcacgccgatcaaaaagactttttcctaaaaggttatcgcgaaatgcttcggcaaatcgaacccgaacggattatttgttacaataccccatttcctgaaatggaaggcaacatcatttttgtagattatgaactttcttcttggaaatatcaaaaccatagcaagtcttcaaaatatgcaaaatatctcacaggacagttgtctcctgtcaaaagccgtgctatactgataaaaagaggttatgtattcccccagcaagaagaaaaaggcatgggcagtgcttatggcggcgaatggaaacctaagaaaccggacgatgaaagatttataggtaaaccgggagaaattaaaactaccaaagacaaaaatgaaaatcttcgacttaccaaaatcggtgaagatggcaaagcggtttcagaacgacatttttcggatcacggttacccacgccaccattccataccgcacgaccacgaactagtctgggaacacaaccattttcattggggcgacactaaaaattattgggacggaaatgtccccgaattcaaacaatatggaggtaacgatatggacactatttttcctgcttgcaacactctggaagacgatcgttttgaatctattgcggaattcaaggactgcatagggcgcggagatgaaattgaattcgaatggaaaggcgttcatttcggaatgagcggctgccaaccgaaaccggagcatcggatcatggcctatctctggaaccagccggataccgaacaatactttgatacgccggacgacgcgctggaatacatcgttgccggagaccgcctgcgcgatatcatcacgcagatagacgttctctcgcgtgctttttgacgaaccctatttgcagtgtgcagcgaccgtatacttttaggaggtttttccatgacccatctttattacgtccgccatgcgcagccggattacagtgttcacgacgatctgacccgcccgctgaccgaaaaaggtatgcgcgactgcgcccttgtgaccgcttttcttgcggacaagtctattgaccgcgtgttctccagtccttataagcgcgccgtggacaccgtgcagccgtttgccgcacaggcgcatcttcccatcaccctgatagacgacctgcgcgaacgccgcattgattccgcttggatcgacgattttgaaagcttctgcaaggcacagtgggcggactttgactaccgctacaaagacggcgagtgtctgcgcgaggtgcaggaacgcaacatcgaagcgctgcaaaaaattctgttgacctgcgccgggcaaaacatcgtcatcggcggtcacggcacggcgctgagcacgatcctcaacttctacgattcggctttcggctatgaagattttacccgtatgcgcgccaaagcaccgtggatcgtgcacttcacctttgacggaacaagatgcatctccatcgaaacacacgatttaatttaaatttgatattcaatactcaaaatcatacaaaaagctcccgcaaattttctccgcgggagcttttgctgttttcacttatgcgcttttttccgctgcaaaacggtctcgcgcagcgcacagtatttatcggcaaggcacaaaacagccgtttctttgaaccgcggcggggtgggatttaacggaaacatgtgctttttgatcatgtcgcgctccgtgtcattcagctcaaagtcgcggtcggcattgcgcagggccgttccggcgtgccgaaacccgtgcagcctgtgcgcggggtcgggcgtgtgccaatcgtagaggaaataatcgtgcagcaaagcgccgcgcacaagagcacgctggttcacttttaggtgcagtcggtgcacaagccacaggcacacaagcgccacgcacacggagtgctcaaacacgctcacagacccgtgctgcatgttctcttttgcaatctgcatacccggagatttcaaaatatcaccgccgtgcaaaaacagcgtgcgcaaagtggggcgcatcagtttgctcccccggcaggaaactccgccttgatcttcgcgagcacatccacatctgcggggcagaacacaacgtcgtcgatctccccgggcgtgatccagcgaaaatcctgatgctcaagccgctgcggctcgccctctgtaatcttcgcgttatagacaaacaggtgtacgaacagatccgggtagtcatgcagcacgtccataaaaagcgtgcccacttctaccgtaacgccgatctcttccctgcactcgcggatgagggcttcctcgttcgtttcattcggctccgttttgccgccgatgaattcccacatgcctgcgcgggctttgccttccggccgctgcccgatgaggaatttatttccctcacgcacaagcgccgccactacggtgacgcttcttttattctccactaaaaagacctcccgtcttttgtaaaacaaaccgaatgcagcgcatatctctgcattttcattatagcacgcaaattggggaattcaactgaaaagtttcttacaatacgcaaaacgggcacaacctgtttccaagctgtgcccgcctttcaggaggtagaggcaacaccgaacaaagaacgcctatcggtgctgcctccatgtttatggttaacggaggcctcgcggtctttacttctgtgcgtgcgcgcagccgccgcggcaagccgcgcagttgccgccgcaggaggacttgccgtttttcttatcccgcctcatcgattttacgatcgcagcgacgatgagaacaacgaccagtaacacgattatcgttcctatgttttgcgaaagccaagtcagcataacgatctctcctttcggcttggataattcctgaatttgcgaatttaaattacggagtaagattacttaaccttaacggctctgttggacagcgtggtgctctccttatacgggcgaaccaacaggaagataaagagcgcaatgagcacgatggaaacgatgatgccgaagacatttgccgtgccgagtgcaatgctgccgagctggttgatgacgaacgctacaagataagcaaagccgcactgataaccgattgcgaaccaggtccactttgcgttgttcatctcacgcttgattgcaccgattgccgcaaagcaaggtgcgcacaggaggttgaacgcaaggaacgcatagccgctgaccaccgtgaagtgggaagccatgttgctgtaaaccgtgccgtcgccgccgccatagaggataccaagcgtaccgacaatgttctccttcgcaacaagaccggtgatggaagccacagcggcctgccagttgccccagccaagcggcgcaaagatccaagcaatcgcgttgccgatggtagcaagaatgctgttgctgatttcgtcttcggtgagcattctgaacgcgccgtcgacaacaccgaaataggtggtgaaccaaacaatgatggtagacagaaggatgatggtgcctgccttcttaatgaaggaccagccgcgctcccacatagagcggagcacattgctgacggtcggccagtggtaagccggcagctccataacgaacggagccggatcgcccgcaaacatcttcgtcttcttcagaatgataccggagcagataatcgctgcaatgccgaggaaatatgcgctcggagcaacccacggtgcgccgccgaagatagcgcccgcgatcattgcgatgaacggaagcttggcgccgcaggggatgaacgtggtcgtcatgatggtcatacggcggtcacgctcgttttcaatcgtacgggaagccatgatgcccggcacgccgcagcctgtaccgatgaggatcggaatgaaggacttaccggaaaggccgaacttacggaagatacggtccataacgaacgcgatacgcgccatataaccgcaagactcgaggaatgcaaggaagatgaacagaacgagcatctgcggaacaaagccgagaactgcgccaacaccggctacgataccgtcaaggatgagacccttcagccagtctgcgcaatttacagcgtccaaaccgctttcaatgatgcccggcaaacccggaacccaaacgccgtaatcggccggatccggctcttcgcagccgtaggacgcataggtcgcaaccgcttccttgagctctgcgcctgtgtaggtgacatcctcttccgccagcgtttcttcatcaacgagggtataatccgctgttgcgtcgtcagaaacggaagctgcaaacgtatccagcgcagaagccgctgctgccgcgtcaaacgtgtcgctctcggtgtcgatggcgtctgcaacgtcatccgcaccttcagccgttacgaatgcgtcgatgacatttgccgcatcgccgaactcgccggaaacgtcttcgtactcgcctgcgccgatgccgaacagatgccaaccgtcgccgaacacaccgtcgttcgcccagtctgtcgcaaccgtaccgaccgtcgtaacggagatgtaataaacaataaacataacaactgcaaagatcggcagagccagaatacggttcgttacgaccttatcgatcttatcggaaacggtaagaccgccgttgttctttttcttgtagcactgcttgatgatggaagcaatgtaaacatagcgctcgttcgtgatgatgctttccgcgtcgtcatcaagctctttttcagccgcttcaatgtccgtttcaatgtgcttgcgattgtcctgcgtaagacccagctgctcaatgattttctcgtcgcgctcaaagatcttgatcgcgaagaagcgctgctgctcctcggggagggtatgtacggcaacctcttcaatgtgtgcaatcgcgtgctcaaccacaccgctgaagctgtgctgcgggaccgtcttcgtgttctgggctgcatggatagcggcttctgctgcttcctcaatgccggtgcccttcaaagcggaaatctcaacgaccttgcagccgagcgccttgcccagtgcgttggtgtcgatcttgtcgccgttcttatttacgacgtccatcatgttgaccgcaacaacgaccggaataccgagctcaacgagctgagtggtcaggtagaggttgcgctcaaggttcgtaccatcgataatattaaggatggcttcaggtctctcctgaataaggtagttacgtgcaacaacttcttccagcgtgtacggagaaagggagtagatacccggcaagtccgtgatcacaacgtcgtcgtgcttcttcagcttgccttccttcttctcgaccgtaacgcccggccagttgccgacgaactggttggagccggtcagcgcgttgaacagcgttgttttaccgcagttcgggttgccggcaagggcaattttgatcttcatttattactcatatccttccgataagattaagcccaaaggttagaatttactaacctttaagtaaaaagataactaagtcggtgctttgcaagggcttattcgacctcgatcatctcggcatccgctttgcgcagggaaagctcatagccgcgaaccgttacttccaccgggtcgccgagcggcgcaaccttgcggacgaaaacgtccacgcccttcgtgatgcccatgtccatgatgcggcgctttacggcaccctcgccatgcaaacgaacaaccttgcaggtctcgccgatcttgacttctttcagtgtcttcattggttcttcctccttatatcatgatcttagcggccatctcgcggctgattgctacgcgagagtccttaatgttaacaatgatatttccgcccatggaggtgatgaccttcacggcggcgccggctacaaagccgaggttttcgaggtgagcacggacttccgcttttccgcctacctgcttgatgatgttttcttcgccctctgtggcaaatgacaacggcatcacagtttttccctctttcctgaaaattctccgcgccgaaacgacacggttaggctgcacaaattagtttttgctaacccggatgctgtaaattaggttagatcactctaaccgtcactaatcataccgccccattcaaaatttgtcaacactttttgccccaaaaagacgcgctcagccccattttcggcgtttagtcaaacgcaaagttagttgcagcaaacgtctttgtgcagactgcgcaaatttttccggttcaaagccgcataacgcgtctgtttggggccaaactgtgttattgtacatgaaaatgtcgccttttgcccctttggcataaaccgtgccgcggcagaaaatttgcatacctgccggcccaaataagcaggaagcaccgatgcaacttgtaaaatcaaagtgcttttcgatgaaatccacaaataaatgcaatttcagttcaaatatctttcagattatgatgcttgtttttttgccggaagacgtatagaataatagtcacaaagtgttgatggagacaagcgcacggcatcttcctcaaagcgagcggcgggtggtgaaagcgccgcaggcaaccccgtgtgatcatccctccggagcagcagcttccaaagagaacgagtagaggctgacgggatcttcccgttacagaagaaggaattgctggattccgttaagtgcagggcaaacgccctgaattcaggtggtaccgcgtgatttgcacgtcctgagggtcttaaagagactttcaggacttttttattctttaaagtatccccgcaaagaaagcctaacttccagtaaagcgtttttttatttcattttcttatttcaatttattgagcgatctcaaaaggagatccaaaggagcgtttatcatggaaaactacaatgtcaattacagcgtacatctgccgagctattccatcggcccggattgctacaacgaagtgccgtatgtcacgcgcttcttcggcaaaacggctgttgtcgtcggcggcgagaccgctatggaaaaagcaaaaccggctctgcttaaaggcgtagaaggctccgacgtcgagcttttgggcttcctcccctacggcggcgattccacctacgaaaacggcgatgcccttatcgcaaacccgctcgtgcagaaagccgacatgatctttgctatgggcggcggccgcgcctgcgataccggcaagtatgtcgccgataagcttgataagccgctctttaccttcccgaccgttgcgtcgaactgcgcttccgtcaccgccatctccgtgatctataatacagacggctccttccgcgagtattattacccgaagctcgcaaaccactgcttcatcaactccgccgtcattgcagattccccggagcagctcctttgggccggcatcggcgacgcactgagcaaggagtgcgaagccatcttctcatcgaaagacgacacgctcgcccacaccccgctcatgggccgtcagctcagccgcgtctgcaccgatccgcttgtgcagtacggcaaagaggcgctcgcttccatccgcaacaaaacggcatctttcgcgctcgatcaggtcacgctcgacatcatcgtttccaccggcatcgtctccaacatgatgaccaccgtaaatgattattattacaactccacgctcgcccactgcgtctactacggctccaccgtcacagagcacggccaccatcacctgcacggcgaggtcgtttcgctcggcgtgctgtgcctcttagagcatgccggccagtttgaggaagaagaccgcctgatgcagttcaacgattccatcggcctgccggtctgcttcgacgacgtggaaattcaggaatccgagttcgacaaaatggcggataaattcatgcagacgaccgagtgggcgcacatgccgcagggcgttacgcgcgagaacttcctcgagtccatgcgccgcgaaaacgccaagggtcgtgctttcaaagccgcaaagaaatgatttgagaatcctataaaaggtaagaaaaaacgaaacagggcggcacgagttcgtctctgccgcctgttttacgctcaaaaaggggtaatttcctatgtccgcattacagaaattcaaaactttcttctccaaaaatgtgctcctgtgtttgacggtccccatggtcgtcttctccctgcttgttccgcagccgtttgtgtggatgggccagaacatctcgattgacctttccggcatcccgttcctgaaagaaaacttcccgagcctcggctttgtcaacatgctcctgtgcgtcatcatgttcggcatgggcatgacgcttaaagccgatgacttcaagtacatcttcaaaaagccgaccgatgtgcttatcggcatttgcagccagtacgtcttcatggcaggcttcggctggcttgtcgcatcgctgctgtccctcacgggtgtgggtgaccccaccgtccgcgcacagattgccgtcggtctcgttctgctcggctgcgtgcccggcggcaccgcgtcaaacgtcatgacgttccttgcaaagggtgacgtggcgctctccatcaccatcaccatgtgcaccacattgcttgcgccggtgctcaccccgtccctcacgctcgtgctcgccggtcagtggattgacgtcaacttctggaacatgttcatcagcatcgtgctcgtcgtcctgctgccgatccttctcggtatcgccgtacataccgcgctcggcgaccgcgtaaacggccttaaagatttccttgtcaaggcttccaccgcctgcatcatcctcgtggagggtctgtgcgtcggcccaaaccgagaccagttcacaaatcacggcgtcaccgtcgtgctcgttaccgtgctcgccgttgcgctgcaccatgtgctcggtttactcgcgggctacgtcaccgccaaggtgttccgtttcaacaaaaagaaagtccgcacgctgtcgcttgaggttggtctgcagaactccggcctttcctgcacgctcgcaaagaccgcgttcccggataccatggccattctgccctgtgtcatcgcaacggtcgtccaccagatcatcgggcctatcgttgccagcatgttcgccgcaaagccgctgtctgaagaggccgaacccatttccgaaaagaaagaagcaaaggaggtcgtcaccgcgtgaagcacttttctgaaatttccctgattgcaacggtctcgtttatcggtgaactgctgcactacctcattcccctgcccgtgccgagcagcatctacgggcttttgctcatgctgctcctgctcgtcacacatatcgtaaagcttgaccacgtaaaaaccacggccgattggctcatcaccctcatgcccgtcatgttcgtcggtcccactgtcggtctcattacgagctatgacagctacaaagacattctcattcccatcgttgtcatctccctcgcgactaccgtcctcaccatggcggtctccggcctgaccacacagggactcatccgtttacagaccaaagaagaaaaggaagagcgcgaagaagcgcttgaagcatgcgaaaaggaggaacaaaccgatgttaaatgatattgcgtcgaacacctcgtttttcggcattttcatcaccggcgtcgcctatgtgctcgcctgcgccattcaaaagcgctttaaggcgtccattttgaacccgctgctcgtctcctgcgtgattctcatcatcttcatgctcgtcagcggcatcgattacaacgtctacctgtatggcaagccgcaagccgacggtacatacgacggcacgggcgccattttcttccagaatatgctcacgcctaccaccgtttgccttgccatcccgctgtatgaaaagctcgtgtacctcaaaaagtacccggtcgccatcatcggcggcattttggccggcatgttcgcgtgcctcggcggcgtgcttgttctgagcatagcgttcggccttgaccacacccagtacgtcacactgctgccgaagtccatcaccaccgccatcggcatgggtctttcggaagagctcggcggcatggtgtccgtcaccgtcgcgtccatcatcgtgacgggtctcttcggtaacgtcgcggcggccgccatcttcaagctgttccgcatcaagcacccggtcgccatcggcgtatcctgcggcaccggcgcgcacgccatgggcacctcccgtgcgcgtgagttcggcgagattgaagaagccatgagcggcctctccatcgccgtctgcggccttttaaccgtcgtcggcgcatccatatttgctatgatccaattctaaacacaagtataagtaaccccgcacaggtcattcgtaaacgctcggcctatgcgggggatttataagcaaagccgcgctcccggaaaactcccgagggcgcggttgtttatttcagcctatactttcccttcccaaccttctccaccgtattctcctcgcacagctttttcaaaaccctttgcagctgtcttcggctgcaccttagctgcaaaagggcagtctctatgccgccgatctccccgttcggacacacatgccgcatgtagagcagcacgcgctcctcaatcgttttggcggaagcctccagcgttgccatcgtgtgaaatttccccgcatacgagcgcagcaaaaggtgcaggaacttcacgtccctgtcgagttctgcgcggtacggctccatcggcagtgcggcgcaaataaccgttgttcgcgcctcgctaaataagctcgaagcgccgcccatcacaaattccgcgtcgccgagcagcgccggcgcttcgtggcggttcacgggtgtcacactgccgtcctcgcgtatgccgtagatctgcacctcaccctcgatgagaaacaaaagctccgcaagccgcccgccctgcctcgtcagatactcgcccttttcaaatcggcagacggaaaacggcagattctccgtatcaaaattctcgcggatatgccctttttgaagccaatactccacctgttttttatctcgaatacgccgcaaaaaaatcacctcatttttattttattgtgccatgtggcacaataattgtcaaggcggcgctttataataagaacagaaattacttgaggtgaactatggaaaacgcaatttttgaggagaaaaaggtctctaaagcgtacatgaagttatccctgccgctggtgctcagcatgaccgtctcgctgatctacaatcttgcggataccttctttgtggcgcagacgcagaacacgaacattgttgcgggcgtttctctgtgcgcgccgcttttcacaacgctgatggcactcggcaacattttcgggcagggcggcagctctctcatttcgcgtctgctcggcaaaaacgacacaactgccacgcggcgcgtaagcgcgttctgcttttggggcgcgattctgattggcgttctgatgggctttatcatgcttcttttccgcacgccgctgctctacgtcatcggcgcaaatgaagaaacgtttaacttcgcgcgcgattactatacgtggctcgcaatcggcgcaccggcactggtgctctcgttcatccactcaaatcttctgcgctcggagggcatgtcgaaggaatctatgatcggcaccatgggcggcgcaatcgtcaatatccttttagaccccattttcatttccgtgctcggtctgaatgccggcggcgcagcgatggcaagcgtcatcggttacattttctcggacgtatacttcgcggtcgtcgtcgcgaaaaagagcaaggtcttaacgctcgacatccaagaaaccagaatccccgccgaccatgtcaaggatattttcgcaatcggcatcccggctgcggtcgtcaacatcatgtccagcgtcagcgccgtactcgtcaaccagtttcttctgccctacggcaacgagaagatcgccgccatgggcatcgcgctcaaggtcagcatgattgtcctgctcctgctcacgggcttctcgttcggcgggcagccgcttttcggctactactacggcgcaggcgacaaacagcgcttcggcgagctcttccacttctgtctgaaattcatcagcggcctcgcgctcgctctttcggcggtcgtgttcattttcgccaagccctttatgcgcattttcatggataacgaaaccatcatcgcagacggcgctttgatgttgcgcctgcaggttgtctccatggtgttcgtcggcgtcgtgctgcttatgacgatcctttttcaggcgaccggcaaggcggtgggctcatccatcctctccgtcagccgtcagggcatcgtgtttatggtggtgctgttcgtcgcggccaatcttttcggctgcacgggcgtgctgttctcgcaggccgtcgccgattttctcagcgccatcctcgccgtcgtcctattcaaaaagctcgtctataaagagatttttgaataaccttctataaaccgatttctacgaatcaatcgttacgctcccttaaagcaaagccgcgctcccggaaaactcccgagggcgcggttttgtctattcttttattttcttaccgattccataaacaccatgtacgcggttttataggtggagataaatgccggctcgccgaaattcatcgggaacggtttcgcttcgattttcttttccaaaatgaggtcgcacagcgtcagcatgtcgtcaatcttttcatagctgttcggcacatatttgtcctgcggatcctcaccgccctcctgccgcctgtggccgccgaggaacgcaagctccgtatagccgggcttctgcaatttttctttcagacgcagcactgcggctttatactccgaaatcggtcgtgcaagcggcacctgcatccaaaggccgaatgcgtctccggtaaacatgcacttatgcgcgcggtcgatgaacacgacgctgcccggcgtgtgcccctccacctcggcaacttcaattttcacaccgccgccaaggtcgatgacatcgccgtctttgatgtcgataacgtccttttccgtaaaattcttgcccgtaccgtcgtttaaacgcggcagcagcggcacgtcttttttgctcatgtagtatttttcgaacacatcgccgctcaggagatggtcaatatgcgcgtgcgtcacggcaagctccacgggcagtgatgtcaggctctccgccattttcctcacgttgccgccgccaaggccggtatcgataagcagcgccttttctttgccctccacaaggtacatggagtcgttgttgtagtcctccatatagaacacgcccgggcagatgaactcgatttcatagcggtcaaagcgcgttttgccgaacatccactccagcgcttctttgttttggtacgccgccgtccaagaaccgtgcgggtgcgtgtggtaaacgttttccatttcgcccgcgggatactccgtgtagtgcgcgtcacggttgccggaggagcgcagcgaggacatcgccatacgcgagcccacacccaccgcgccgtgcggcgagtggtaatagcccgtcaccggcaccacggggtcgtcttcggcatggaacgcccacacaggcacatcttttgccgcgcgcagcttaaacggctccgcatagccgcaaatcggcatggccgccgcgatcttatgcgggtagcgcgtgagcagctcccacgtgcccgcgccgcccatggaaacacctgtcacgtacaagcggcagatgtccaccggatactgcgccgccatctcgagcagcgattgcgccagtaaatcaacatacggcacccagcactgttcttccgggcactgcggcgcaaggacaaagcacgggtgctccgcctgccatgcgtccgccataaatgtgtccgcgcccggcgtgaaatcgagcaccaaatttaaatcgtccccgcgctcgcccgcgccgtgcaaaaacagcaccagcgggtacgttttgccgggctccgtcttcggcgtgtacaacgcggcgtttaagtaccgcccgtcttttttcagttcttttacggaaatgttctttttttcaataccgttaatcatccaaaataacctcctttaaagggttcattcctccagcagatacggcatcagcttttcgagcaccaccgcgtagccgtttgcgtacatgtgcataccttcaatggtgtattccgctttcaaattgcccttttcatccagcagacagtcgaacacattgatgtatgtgcagttcagctcctctgccattttttccacttcggcgttcacttctttcagctccgcattcgtgcgtgcgccgaactgtgccttcaccgcttccgggtctgcgccgggcagctcgcggttcacggggtaatagctcatcacgtaaattttcgtctcgggcagacgcgcctgaatttgcatcaaaatttttctgtactggctcatcagacgctcgcgcttatattccggtcgactgatgtcattcgtgccgatgttgatgaacacctttttcggctcgaggtcaaaaatcgattcatccatgcgctccaaaagtccgtccgtcacgtcgccgccgatgccgcggttgtacacacggatgcgcggctccacgttttgcagcatctcgctgatcgggaacagctcgcacagcgaggagcccgtaaatacgatctcgccctttttcgcaaatgtattgaggcacataaaattgtgcactttcatttcccagtccgtcatataaagcacctgacttcattcgtttattttcacagtcattttagcacaaaatccgcacagatacaacctgtattctaaacattttctcctcttgacgtgaaaaaccgcagcatatataataatcgcatagtaacacactaatacacgaaaatttgcactaaagcgctgtggtgtaagcacttcaacgcgcaaaagcagacgttgcaaaccgcttgcacattaccgaaaagaggaatatgaaaatgaaaattgccgcttatgaagtccgccgggacgaacagaaagactttgccttcatcgccgaaaagctcggcgtggagctcaccgaagcagaggataacctgacgctcgaaaacatcgatacggtaaacggggccgagggcgtcacaatactcggtcgcacacattttgaccgcgccctgctcaccgccgtccaggagcgcggcgtaaaatacatctccacgcgcaccatcggcgccgaccacatcgacctcaccgccgcaaaggagctcggcctcaaggtgtgcaactccaactacgcgccgaacggcgtggcagattacaccgtcatgctcatgcttcttagcctgcgcaagtataagcccgccctgtggcgcgcgcaggtcaacgactactcccttgcgggtcttcagggccgcgagctgcgcaacctcaccgtcggcattctcggcaccggcaaaatcggcgcggcggtcatcaaaaatttgagcggcttcggctgccgcattttagcaagcgacatccgcgaaaacccgtcgctcaagggactttgcacctatgtggataacgaaacgctctacaaagagtgcgacatcatctcgctgcacatgccgcttttagagagcacccgccactttgtgaacgccgagaccatcgccaaaatgaaggacggcgtcaccatcatcaactgcgcccgcggcgagctgatgaatattccggatatgatccgcggcattgaaacgcagaagatcggtgcgctcgcgctggacgttttcgataaggaagacggcatctaccacgagaaccgccgcgacgacatcctctcgaaccgcgatatggcctacctgcgccagtttccaaacgtcatcatgacgcagcacatggcgttttacaccgacgccgccgtgcagagtatggtgttctgcggcatagaaggtctgtgcgatttcgccaagaccggtcacaccgagactgagcttgtataaacgtcaaatacgacgatgaaatcgagcttgtgctcaacctctaaaacaaatctctaaaatcaaatactgtatacagaaaaagagaaaacgtgtaccgagcttgccccggcgcacgctttctcttttctttttaccttttttggttatacgtgcggactaagcggtccacgtcattttcgctgtgaatttcgtactcgtgctgtgtgaggtattccttcacttcctcgggcaggtcgtcgaaatccttgtgccagtcgaaaagcgccgcgcccaaaacgtagttttccggcccccagtagccgttcatgccaaaaccgtttggaaacataaaatcaccccttgacttagtatgcgccaaggggtgacttcaaattcatttccctacaaattcaaaaaatgccgtgcgtgtttacgtcaactcactgaccgatctgttcgaagaacttcgcgtggatggcggcaaccgccttgttcgcatcttccttcttgatgagcacggaaattttaatctcgctcgtcgagatcatctgaatgttcacgttcgcctcaaacagcgcctcgaacatatcggaagcaacgcccgggtgagactccatgcccgcgccgacaatggaaacctttgccacgtcgtcgtcaaacacaacgctgctcgcgccgatggtctctacgtaagactgcatgagctcgatggttgcgtccatcttgtccttttccacggtgaagctgatgtccttcgtgccgtttctgccgatggactgcaaaataatatcgacgtttacgttcttctgtgcaagcttagagaaaatgcggaacgcaaggcccggcttatccggcacgccgatgacagagattctggcgacgttttcgtcctttgcaacaccgctgatgagcattttttccacgttggtagcctccttaacgatcgttcccttagcccgtgtcaggctggaaagaacctctaattcaatatgatattttttagccatttcaaccgagcggttattcagcacctgcgcgcccagcgtcgcaagctccagcatctcgtcgtaggagatgacgtcgagcttcctcgccgccggaattttgcgcgggtctgccgtgtaaacgccgtccacatccgtatagatctggcacaggtcggcgtgcatggaagccgcaatggccaccgcgctcgtatcgctgccgccgcggcccagcgtcgtcatgtcgtcatacttgttgacgccctgaaagcccgttacaacaacgatgttgcgctttgaaagctccgccttaatacgttccggattcacacgcttaatgcgcgcgctgccgtaagccgtagaggtggaaaagcccgcctgccagccaagcaaagagaccaccgggtagcccaaatcttcaatcgtcatagcaagcagcgaagcagagatctgctcgcccgccgtcaaaagctggtccatttcgcgcttagacgggtttcggttgatctcttttgctttatcaatgaggtcgtccgttgtatcgccctgcgcagaaaccacaacgaccacgtcgttgccgttcttatatgtgccggtcacgatatcggcgacatttctcaaatgctcggcgtccttaacggaggaaccgccgaacttctgaacgatcaatgccatagaaacacttccctttccataacccctgtgggataattctcgttattcaatgatgatgcgcgcgccctgcgggtcggtatgcagaagctccacacgccagccgttaatgccgcggtcctgtaaatgtgaatcgcatgcgctcataaactcctccgcgccctctgtggggatcatggagatgatggtcgggcctgcgccgctcacatacgtgccgagcgagccaagctcgtagctcatgcggaacacctggtcgtaattttcgatgaggcccgagcgatacggctgatggatcctgtcctgcaccgccacgcgcaggttctgcagatcgccggagaacagcgatgccgtcattaaagcggagcgcgaaaggttaaacaccgtgtcttcgcgggaatactccgtcggcagcacgccgcgggctttctccgttttgagctcgaacggcgggatcatcaccgcaaagctgatcttgccggaaaccggcacggaaacgctgtacacgcgcttgccctccatagcagaagcgacaaggccgccggagattgccgggctcgtgttatccgggtgcccttcaatctgcgccgcaaggttaatgaggtcgctctgcgacatcggcgagccaagcatgcggttcgcacccaaaataccggctacgatgcacgccgaagaactgccgaggccgcgcgccatcggaatgttgttttcctgaatgatatgcagacccggcagcgttttgccgcagatctggtacaaatgccgcgccgcccagtaaatgaggttcgtctcatcggtcggcactttgatcttgtccgtcgtcgtgatcttcagctcgtccgcttcttccatccacacgcggttgcacatggtcagcgcaatgccgagcgaatcaaagccggagccaaggttggcactggttgccggaatatcgattcggatcataatgctttcccctttccgcttttatcaataatcggagatgcgaatacggccttcaacctttacgccgcgcgcttccagcgctgccagcttatcgctgagttccttctccgtaaggttttccaccgtaaagcccgcttcgccctgtaccggccttttcgcgagcagcggcgtgatcttgccgaagacgtccgccgccgtgttcagcgccgtatcgctgtccttggcggaaacgcgcacgaatgcggacgtttccatgctgccgaaatccgccacatagttcggcttcgcatcctcccagaagaggtacttgcgtgccttaaagtgcttcacacagtcgatgacgtccgccacaacggcactcgccgtgggcagcttgcccgcgcctttgccgtagaacaccacgtcgcccgtcgcgtcgccgcgcaccataatgccgttgaatacatcgtccacgctcgcaagctggctgccgcggtgcacgaacatcgggcaaaccataatatgcacctgtccgttttcgagcttcttcacagagccgatgagcttaatgacaccgccccaaacgtctgcaaaatcgacgtcctgcagcgtgatcttcgtaatgccctctgtgtaaacggaatccgggtacacgtgcgtgccgaacgccaaagacgccaaaatgcagatcttgcggcaggcgtccagaccctccacatcggcgctcgggttgcgctccgcgtaaccgagctgctgtgcaagcttcaaagcgtcttcaaagttcatctgctcgcgaatcatcttcgtcaaaatgaagttcgtcgtgccgttcaaaataccggcaatctccgtcacctcatttgcggcaagacactggctgatggggcgaatgatcggaatgccgccgccgacgctcgcctcaaacaggaagttgaggttattcgcctgcgcgattgcaaggagctccgcgcccttttgtgccacaagctctttattggaggtcacaacgctcttgccgttttccagacacgccttcacaaagtcatacgccgggtgcaggccgcccatcacttccacgacgatttgcacctcggggtcatttaaaatgacgttgaaatccttcgtaaagcggtcgctgtacggcaggcccgggaactcctttaagtccagaatatacttaacatggatctcttccttcgcgcgcttcgcgatgctcgccgcgtgagaggtaagcacctccaaaacgccggagccgaccacgccgtggccgagaactgctatgtttgccatttccattttcctttccacgcggatttaaccgacgatgctgtcaatcttaataacgccctgcacctcaaaaaggcgcttcaaaagctcatcaatctcaatactcatgttttcgcttcgcgccgagaccgaaacgaacgctttgccctttaccggaatattctgattaatggtcagaatgttcgcgttcgccttatagaataccgtcaaaaggttcacaagcacgccgggcttgtcgtttaacacgacctgcaccgtcataatggagcccgtttccttttttgtatacggaaaaacggcgtttttatacttataatatacactgcgggagatgcccgccatcttgaccgcctctgaggtgttcgaggcttcgccggtctccagaagctggttcacgcggatgaccttctggtatacctccggcagaacggattcgtcgatcaaaagaaacgatgtgttttccattgtccaccacctaagtacgtttgtattgcgtcgataaacagtgtagcacacttttcggcaaaattcaacccaaatttctttcctttccccctttttcttattttggtctatctcgtacaaaaagcaacaggacccactcttaaaatgagtgagtcctgcataatgcacgttaaatttttatcgtggtctgcgttctgcaaaccgctttacgccgccggtgtttccggctctgtcggcggttccggggtaggctctaccggcggttccggggtaggctccggcgtcggttccggggtaggctccggcgtcggttccggcgttgcggtcggggccaaggtcggcgtgggctccgctgtcggcgatgccgtaggcacctcgctcggggacgggctcggttctatactcggcgaaggcgaaggcgacggcgttgccgtggcgctcgtccttgcaatatggtcggatcctccgtcacacgttctcggaatgttgttctgcgaataccagccatttgcaatgtgcacgcagttcgggccggggcgcagaccgctgtcgcggcagtaggaaagctgcaccacgttgtcgctcagcacatagctgccgctgtggaggaagtcgtagtagttcgcttccatccagtcgatgatgccgttatacatcttctttgcgctgttcgtgtcgtaaatctcttccttatattcgtggccgttccagatgccgcacacgaaagcggttgtgccgcccatgtaccacacgtcgttgctgtcttccgtcgtaccggtcttgccgatttggtcaaggtcatcgcggcgcaccatgtttgccgtggggtatgcatccgtatccgtaccgttgatcggcaggtgcagcagcttattcataatggtcgccgtatcaaacgagatcgcctgctcctcgctgtgattctgctggtaatcgtagatcacgttgccgtcgttatcctcaatgcggtacacggtgtacggggtgtaatacttgccgccgttgccgaagatctggtacgcgccggtcatctcgcgcacggaaataccgttcgtcaaaccgccgatggccacgccgccgacgttgtaggagtcttcctccgaaagcgacgtgatgtgcaggttctgcgtgaggaactggtaacttacaagcggcgacatctggttgatgagctgcgccaccggggcgttcagagattccgtaatggcctgatccacattcaccgtgccggcgaacgtaccttcaaagttgttcgggcctgcgctgccgtcatcaaagtagttcggcagcggctcatccttcagcacggatccgtacgtgatgagattgttttccaacgccggcgcatacacgctgatgggcttaatggaagaacccggctggttcgtggagtacgaaacgttgttctgcacgcggttgccggtctttttcaaaagctcattgtcatcgtttgcctggttcgtgttcacgcagaggattctgccgtcatactccatcaggcacacgccgctccaaatgccgctgtcgtccgtaaactcctgccagttgttccgcaggtagttttcaaacgcctcctgcatcggcacatattcggcggagtagatcttgagaccgccgttataaatgaggtcgattgccatgtcgcggtcgaggtttgcatactgcataagcaggtcaacggtgtcgttgaacacctcttcctcgtaccagttccacacctcggtggaaacgctctgggtatcggtctcctcttcttcgtcgtccatttcaaagtccacgccgcgcagcttcaggtttgcggattgctccatcgcctcgtcgtactccgcgcgcgtgatacgcccttggtcgtacatttcggagatgacaagctcgcggcgcttgcggttcgcctccgggtggtagaacacgcatagcgcggccgggttttgcgtcgtcgcggcaatggtcgcacactccgcaatgttgcagtcccaaatgtccttgccgaagtagccctttgccgcggcctccacgccgtaatagccgttgccgtagttgacaaggttcaggtatgcttcgagaatttcatccttagtatacttcttttcaaggttcagcgccatgaagatttccttcaccttacgcatgacgctcacctgattttcgcccgtcaggttcttgataagctgctgcgtgatggtagagccgccggcggtatcgttgccggtcgccataccgtatacggcgcctaacgtacgcttccagtctacgccgtggtgctcgtaaaagcgcttatcctcgattgagatcatcgcttccttcataatgtccggaatctgcgtgaaatcaacgcgcgtgcggatctcttcggcgttatagcgcaggcgctgcgtccattccgcattgtccacgctgtctatgtgcagggaatccgtcacatacataaagctcgattccttcagtttaaaggaagcaaggcttgcgttcatctccacatcgtggtagctccaaatgacggccgccacgctcaagcccacaaggcagccggtgatgatgcagatgcaaagcaccgtcttgaggagcttgccgaacatggtaagcaccgcatgtgccgtgccgccggccgcgcgggccgtttcgccgtctgtacggcccatgggtcttccgctcggctgcgccgtgttgtacttattgatgtcttttttcagcacgtttgacctcctgaaaaatcaaattgcgcggcaaaagcgcactttgtctgcataaattggcaaaccttggcgatactaaagccgcagggcaaatcctacttagaaaggatgtatagtcatgaaaatgcgtcttgagtcccttgtgcgctccgctcggcagcggtacggcgcatgggcggcgatctttatccttttcgccgcgctgtgcacgctttccgtgttttccgcacgcgatgcccgggaagctgcggcagaccccgcaaaagcagaaagcgactcttctgtttattatagcccaaacgatgcggcaagtcaagaaaccgaccgggagagcgccgcaaattcagcaaattttaaggaatacgaaacattcttcaccgtgcgcgcctataacggcagcgtagctgttttcaaagacggaaacgatgtgcccctttactgcattgaaacgccgcttagcagccttacggaggaagaccgccgcctgctcgcccgcggcattcgtgccgaaacactctcggaagcctgcaagctgattgaagactatgaataaaaccgcaaaaagaggacgcccgctgccggacgcccccgatttgcctaaatgtcttttacttcatgctttcttcgtaggacttgatcatctttttgaccatctggccgccgacggagcccgcctggcgggaggtgaggtcaccgttatagccctgcttgaggttgacgccgacttcgtttgcggcttccatcttaaagcggttcattgcgtcctgtgcttccggtaccatcgtcttattgctgctgttcatgtttcattctccttttttcggcggcgcttaacgctgcgccgcactgcttttttcgcgtttgttgttcttattgtgcatgatgaaaggagcattatgcgtgtcaatttttgcaagaatgcgcagttttttgcgccgcgcgggagagaatattctctcccctgtccttctcccgcttctcgttttcgcgctgaaaaatgaaaattaagcattgcaggcaaaatcatgccgcagctgccgctcaaggtcaagttccatcgttgcaggggcgttataaagcacggtcagcgcatacgcgcgcatgtttttcacgtttgccgtgccgctttccagcttatccatcacgtactcgatatgcgcgtcatccaggctcaaaaagcgctctgcaacgtcctgcctgcggtattcgctgccgccgatgcgcaccatgggtgctgtgccgcagcaaacatccgtcatcagccggatgagctcatcaagcttcgctttgtctactttgtattccgagagaatgtcgtaatcgatatttcccttaatacgattagaaaagaaagtcgcatcatatccatccgcagatagatcgttctctcttatctctgtctttttatattcagtcttacttgctgcgaaatcgtcgcacgggtcggcgctgatttcccgcaaagggggctgctgcaaagccgaaccgcccggtgcggaaaacccgctcaccttaggcagcggcagcacataaatcgaatccggcccgccgatcttatccttgcggcggcggatgagcccggcgcgttccagctctttatagcgtcccgtcaccttatcgtgtccccagccgaaaagctcgcgcagctttcggtttgtatagtagatatacaccttgccgttttcgtcgcaccattcgttctttttggaaagccccatgcggtttaaaagcacgcagtacaaaagcttgccgccatccgaaagctttttatacgccgggtcttcaaaaagcactttaggcattttgtaaaacaaatacgcgttatcttcccacttgtcttccctgtttatacgcctgcacctccgtttgcgttccttttcacgtgtccatccccttttcgctatcaaaaagccgccggtcagaaaagcaaaagctcctctgccgacggcatacagcgatattttacgaatacgacccggtgcggcaggtcgtcctcttactttttattataaggattccgccgcaaatgtcaagtcaatttagaacatttgtttgtggttttggcggacatcttttcaaaaaaaggccgcgcagggcgttttcggcgctgcgcggttcttgaaattctgtttgatcgatgtgtattgaaatagaaatcacttgccccagacttcctcggcgatctcctttacaagcgcgagttttgcccactgctgctcttccgtgagcttgttgccgacctcgcaggaagcaaagccgcactgcgggctgaggcagaggttctcgagcggcacatactttgcagcctcgtgaatgcgtgcgatgacggcgtctttatcctcaagctccgggcgcttggacgtaatcagtcccaaaacgacttttttgcccggtgtgacgaagcgcagcggctcaaaaccgccggaacgcgcgtcatcgaactccagataataggcatcgacattttcatgcgcaaacaggcgctctgcgaccggctcatagccgccccggctggcccaggaggaattgtagttgccgcggcaaatgtgggttgcaacggtgagatcatccggtttgccctcaagcgcgaggttgttgaccttcaaaagctgatccatgatgtcgcccatcttttccggctccacgccgaacacaaacggcgcggcggggtctacgcaaacgccccaagagcagtcatcaagctgcaggttgcggcagcctgcgtcgtagagctgcttgacgaacgcccgatagatctttgcaacgtcctcgagcagctcttcgcggttcgggtagattttattcgtcgtctccgcgttcatcgggaagatcatctgctcgtagaactgtgccggagacggaatggtctgctttgcgacggtgttttcgtcctcaagcgcctgcacaaactggaagtgctccacaaaagggtgcgtacccgtcagctttaatttgcccgtaaggtacgtgtcatcgacgaccgcaaggacatcgtggaacgggatgccgcccttgggcgcagagtggctgacgccctcaaagccccacataaagtcgagataccatgtcttgcggcggaattcgccgtcggtgagcagcttataacccgccgccttctgttttgcgacaaggtcgcgaatggcggtgtcttcggcttccttcagtgcttcgtaagtggttttgccggcttcataatcggcgcgaatcttcttcaaatcatccgggcgcagaaagctgccgacataatcgtaacgatacggaagtttgatatttttcatgttaatcacctgctgtttgagtttgtgcttacagtatacaggcaaattttcgccttgtaaaatacaagaaaaaagcggtttgccataggtttttactatggcaaaccgctttcggtttgcattattgcattgtgaacttctttaaagcgtcgatataatattgcgcaaacaaactcggctccacgttttcgcgcgtgagatagccgatttccatgtaatcgtcgagattgagcggcacggcgacgatatttttgccgtttagactctcgttgatgacgccgctgcaaatggtgtagccgttcagcccgatgagcagattgaacagcgttgcgcggtcacagacatggatgtctttggcacactcgagcgtgctctgaatttcctcggaaaaataaaacgcattgtggtcgccctgctcataggaaaggcgcgggtacggcgctaagtcctccagtgtgatgctttttcgctttgcaaggggattttctgcacccaaaaacacgtgcggccccgctttgaacagcgggtgaaatctcagcccgtgcgccttaatcgtcttttttaagaccgtctcgttgaacgggtttaaatacaaaacgccgacttcgctttttaataacgccacgtcctcgatgatctcatacgtctgcgtttcgcgcaggtgaaaatcgtacgtttcgccgccgtgctcctttaaaagcgccacgaaggcctccactgcgaacgaatagtgctgcgtggaaacgcaaaaacgtctgcgcacgggcgcgccgccgaaataccgctcacgcatgaggtctaattggctgttcacctgccgcgcgtagccgagaaattcctcgccctccggcgttaaggtcacgcccttgttcgtgcggcggaaaagcgtgacctgcaattcgttttcgagctccttaatcgacgcggtgaggctgggctgcgcgatgaaaagccgctttgccgccgcgctgatggtgcccgtttccgccacggcaagcacatattgaatttgcgtaagcgtcatgcgttctccccgctttcggttctgttttccgcttccagccgttttaatacgcccagaatgtccttgtagcgcgcgataaccttttggtagttttcgcgtcggtgcggaaaaaggcagttcgtgcaatccttgatgccgttttctttatattgaaacgcgccgccgcagttgcggcccaaagcgtaaagcgggcagtagcagaaaagacaattgaaattttccgggtccgcgcccttgtggcagggaaaatactcgcattctttatgcgcaaaatagctgtaattttgagacatattggctccttttaagcgtgcagggtacgcgtttacgtgaacgtgaagctcgagttacggtcacgtttatcgcctcttatgctttgtcttccatggttttcaccatgtttttgatgcgctttgggtcgagacgcgggctgccgtaggggcgcagggccaaagccatcagcttcatggggttatcgtccgccgcaatgcggttagaacccattttgccgcagaccgtacagcggtgaatgacagcccactccccgtttttgcgcacccacacgctgatgggctccatgacgccgtggcacgcggatgcgcggtcgccgggctcgttatccacatggacgctcgaaagacagtacgggcaatggttgcggtggtcgctgcctgcgccctcgggcagaatttcgcgtccgcagaccttgcacgtgaacgggtctaagcacgcatgctttttgtagtagcctttttcgtattttctgcgcttattttcacggttcacggtcatatcctcctttgtcgcccgcgccgcccatcatgcgggtaagctcctctattttttccagtggaaacggcggcatggaaagcggccgcccggcaatggaaagcagcaaaacggggtcgtcctcgtccgaaacgggcgtagaggcaatctcgccgcaaaggctgcaccggcctaaaatctcccagctgtcatcgggcttcacccaaatggaaacgggctgtagcttgccgccgcattcgtagccctcgctgtccgcttcatggatggcggtaaggcagcgcggacagtgggcatattctttttcgggcacgttttccgccggctcaaagccacaggcagggcagtgaaaacgcttgggggtatattccatagggtcgtttcctccttgtttttcgggaaaatatctataaaaataagtataatatgaatcgccacattcgtcaattccgtaaagggaaaaacgccttgcattcccgataaaaaggggcaataccgcacataaaactttcgacagtgcgcggtattgcccttgacagattgatcaaattggaatagatgagatcagaataacggcttgcgttcccatagaaatttctgccggtctcatagtttttttaaaattgtattgattttagcagggtattgcaatatactttataaatacaacttgtttttcgacaaataagacgttttttgcgaggtgcactatgactacacaagctttgctgcagctttccgccgacattataacgcggtattacaataatgagatcgagccgtttctggcggcctgccacccggacgtgctgtggatcggcccggcaaatacacagatcatccgcacgcgcgaaacgctcatcaagacgtttgccgaagagcaccacaacctgcgctttgagatgcacgaccttgtgaccgtgccgctcatgacgcccagcagcaaggtacttgaggtgctgctgttttttgacgtagacaccatttggccggacaacagcatgcagcgtgtaaagcagcgcattcagctttcgtgggtggtggaagacgggcaaccgttcatccgcgtgtgtcacgtttccaatgcactcgattacgatgaccgcgatgtgatctaccccgtgcactatggagaagatcgtgtgcgcgtggcggtgctttccggcgaggaccgcacgccgcgcatcgttttaaaaggcgcgaacaaagccatgctgtacctgcgccccgcgtatatcgattacttagagacaagcggcatgcacacctatattcacacacaaagcgacatacgggaatcgaccgagcgactggcggcgatcgataagcgctacccgggactgtttctgcgctgccacgaaagctaccttgtgaaccccgaccgcgtgacggaaatcacccgctttcatttgacgcttataaacggcaccactttgcccatccccgaaaagaagtacacaaccgtgaaaaagcgactctcggagatgctggcgaaagagaaataaatttcctcaccgttcatgtggtttccctcacccctatgggatcccggcaacaccgggttatttttaacatctcgcacataggcaaagccttataaatcgtccatgtgttcgacctcctttgccgcgctttcatacaaaatacagcactttacgaatttttaaatttttttaaaaaaacacttgcttttttcgtttagctgttgtataatgattgagcacttgagaagtgaatatatcgcggggtggagcagttcggtagctcgtcgggctcataacccgaaggtcgtaggttcaaatcctgcccccgcaaccaaaggaaaaacctcattcaaacgaatgaggtttttcctttggagtgaaataaatctcttcgagatttgtgaaatgtgcttcgcacgtaaaagaacaaccttcggttgttgtgaaatgcctgcgggcgtgaggagatttatttcatttcatattgcggcgaagacgcaatatatcacaatgcacagcacacttgtgtgcgaagcgttatttcacattttgcgtcagcaaaatatttcactaaaaacaaaccggtggcgaccgtccagccccgaccgagccggcaggtgagaacgtaggagattatggtgaaatttgccttacggcaagtgaattgttcgctccgtgaacgttaaaaccccgattccgcacattaaacggatcggggttttgttctgtacttataaatctctgtatttctttacgcggcggacttttttgtttttacggttcatcaggatggcaaggatagcatacgcggcagccaagaccagcaaaatggtggccgtaacgataaaccacgtggaggtgagcacctcctgcccctgctgcaaaacctgcacgatctcgctgcgttccacgctttccgcggcgacgagcgcaacggtggaaagctccgcgccgttataatagaacgtggcggtaccgacgtaatcgccctttttgatgggcgctttcacgctttcgggcaaatcgagctttgtggtgatggcgccgctttccagactgctcggcagtgttgcggtgagattgccctgcgccactacctgcaggcggtctttgccccacgcgtatttgaggctcacctcgccgagaagctcgccgtccgtaacgagcgttttattctcgatattcaaaaatgcccaacggaacagcgtcgcggcatcgtacatttcgccgtgataatcgatatggttgccctcgctgtcgatatacgggctgcccatgcaaacgacaaggtaactgtacccgtcatacgtagccgtggcggaaatgcagtagccggattcattcaaggagccggtctttacgccggtggcataggtgtaatacgcatcgtcatagctcaaaagcatgcggttcgtcgtggtgacggtgcgttcctcgcttgtcatgttcgtcggcggctgcgtgtaatacgtctgcgaggtgacgtccgtaaaatacggcattgtcagcgcatactccgtaatggtcgccatctcgcgcgcggtggtgtagtggttttcatcgtacaggccgtgcgggttcacaaaatgcgtgttcgtgcagccgagcttcgcggccttcttgttcatcagctccacacagctcattttgccgtcaccgtcttcgtcatactgcgggtcgtcggccgtgatattcaaagaatccacatattttgcaagcgtcagtgcggcatcattgccggagggcaccatcatcaggttcaaaagctcatagatggtaaagctttcgcccgtttgaatttccgccaaagacgagcccgtgccctcaagctcctcggcaacgctttccggcaccgtagtgcgcgtgttttgcaggtcgctgaccgtttccgccgtgacgatatacgtcatgatcttcgtcatggaagccatggggcggcgctcatccggattatatgtatagacaacggtatcggtgtcgaggctcaccatatagatagaagcgctgttcgggtctgtgagcttatcgcacggaaagcccatttcgctgcttttggccacgaccgtgtttgtcgttgtgtcggttttcgaagtcgaggtatcggaagctgtggaattttcgctcgcggtgctttcggctgtatcggccaaaacgccggtcgtcaaaacggaaagcgacagcaaaacgcttgcgcatatcgataaaaatttatgttttctcactgtttatcctccaacggacatgatataatactgttaactattttattattatagcacggtttggcacccctgaaaaggtgctcgccggcaaattcagaaaaaagtcagattatcagattaaaaatttaaaaggagacgctatgcagcttttacatattgcagacctgcacttcggcaggcttttgtacggtcgcagcttaatggacgaccagcggcattttgtgcggcagtcgcttttgcctgcgctggatgaatataagcccgatgcgctgctcattgcgggcgatctgtacgaccggcagattgcctcggtcgatgcgattcatttattcgacgagctcatcgatgcgctgtgcgaacggaacatccccgccgtcatcatttccggcaaccacgacagcccggaccgcattgcggtgggcaaaagcctgcttgcgcggcacggcatccatatcatcacggagcttaaagacgcgtttacgccggtcgagatcggcaacatacagattttcccgctgccgtactttgaaaacgcccagatgcgcgattttttaggcgatgaagcgctgcgcggcgcgggggcctgcatgcgcgcggcggtggaaaaaatggaaaaagcgtttgaccccacgaaaaagcacgttttggtcgcgcactgctttgcggcgggagcctccacctccgattccgaaagccgcattttcgtcggcggcgcgggcgatgtgccgacggatgtcttctccccgtttgactatgcggcgctcgggcacctgcacgcggcgcaaagggcaggcgacacggcgcgctacgcgggctcaccgctcaaatattccgtagacgaagcgcaccagaaaaagagcatgacgctcgttacgctcggcgacacggtggaaacaacgtgcatccccgtaacccctctgcacgacgtaaagcgcatagagggtacgtttgcggcgctgctcgaaaacgggcaggcggcgccgaatgaagactatgtggaaattctgctcaccgacgacgagccggttttccgcccggccgaccgactgcgcccctattacccgaatgtactcggcgtgcgcagcacgtggtttttaaagcagcacgcaggcacgcaggcggaagccgatctgcacagccgcagccgcgcggagcttttccgcggctttttaaaggaggtctgcggtgaggaagcgcagccggaggacgaagcgctgcttgcggaaattctaaaggaactggagggcgatgcaacgtgagaccgatccgtttggagctttcggcgtttgggccgtatctggagcacaccgtcatcgattttgaaaagctgaacgaagcggggctgttcctcatcaccgggcagacgggcggcggtaaaacgacgctgctcgacgccatgagcatcgcgctcttttataaatcgacgggcgggcggcgcacgtttcaagatatgcgttgccttgccgccgcggacagcgaccgcaccgaagtcgtctatcattttgcgctcggcgaagacgaatattgcttccgccgcgcgctgtaccgccgcaaaaagcgcggcagcgacgattttatcaccgaggaagaaaacgagtgcaagcgccgcacggcagacggctgggcgcttgccgcttcgggtgcggcgcgcaatgtgacaggctacgcggaaaacctgctttccctcaccgccgagcaattttcgcaggtcatcgtgctgccgcagggcaaattcatgcagcttctgcgcgcgaattccaccgaaaaagcagccattttgaaaacgcttttctcctgcgagctatgggaacgcatcgcgatgaaatttacggagcggcaaaaaaagctgtacgcaaagcgcgaaacgtgcgagacaaaactgaaatcgctgctcgaaaagcatggcgcggagaccgccgaggcactcgccgtgcaaacggaagcgcttcgatcagaatgcgcccgcaccgaaaaggcgctcgccgctgcgaaagaagcactgactctcgcacaaaagcaatacacccgtgcactgcaatttgagcagtgccaaaaagccgagattgatgccgaagcgcagctgaaaaccgccgaaacgcgggcagcttccgccaaagcgcagtatacgcgcgccgagcagaaccgcgcgggacttacaaagctgaccgccgaaaaagacacgcttttaaaacgaagcgaacagctgcgtgcggagcaggaacgcagcctgcaaaaggagcagcttttaaaagaactgcgcgccgaggaggagcgcgaacgcgccgtgcagaagcaggcagaggacgaccgccaaaagctgccggaggtgctgcggcgcatcgcggtaggcgaagcattcaccgaaaaggccgatgccgcaaaagaccggctcgcgtcgctcttacagacgcagaccatcttaagcgaacagcttgctgcgctgaaaacgcgcagtgacgccgccaaagccgaagcgcagtgcaaaaaattgtggggagctgccgaagacgcggcgcgcaccgcgcgtctgaccgtcgtggggcaggataagctgctctcggcggcagaagccaaatggaaccaaaacagcgccgccgcgctcgccacagggctcacggacggcacgccctgccccgtttgcggcgcggtgcaccaccccgtgctcgccgtgccgtgcgcgggcgaaacgacgaaagaagaacttgatgcgctgcgcaaaaagcttgaagacctgcggcaggagcaaagccgcgccgagcagacggccgccgccgcaaaagcgcggcacgaggtcgctttcgcacaattaaacgccgcaaacgatgccgcaaaaagcatcacagaaagcgaagaagtgctcaccgcggtctacattgcggcgcaaacggcgctcaacgaagcgcaaaagcttgcagcgcaggcgcaggccgcacacaagaaacttgagacactcaaagcggaacgtgaagcgcttatgcaggtcgaaagccgccacaacgctgcgcttgccgcttgccgcgccgctttagaagaaaagcgccgccaattaagcgccatggacaccgtgcgcgatgcggcgcaaatcaccttggagatgaccgaaatacaaaagcgcattcgcgtacttgagcaggaaaccgcagcgctcgatgaagcgttccacgccgcggaaaacgcgctttctgccgcaaacgaggccgtaaaagctgccgcacagcagatgttcgccgcaaaggaagcgaaaaatgccctcggcgcagcgccggaaaaggacctcccgcaaagcaaagcggagctggacgcgaaaagcaccgaaacgcagacgctttccgtgcagcttgggcgctttggctctgacctgcgcaccattgcggaaagcgccgccgccgtgcagcaatacacggaggaagccgccgcgctcgacgtacagtacagccgcgcagcaaagcttgcggggtacgtgtccggccgcagcaacgccttgcgcgtgccgcttttgcagtacgtgctcggcatgatgctcgacgagaccattcagagcgcaaaccgctttttctccgttttaagccgcgggcgctacgccttgcagcacaagcagggcaaaagcggcgcgggctacggcgggcttgacattgaggttttggacggcatgagcggcacgtgccgctccgtagagacactttcgggcggcgagcagtttttggcatcactttccctcgcgttcgggctttcggacgtcgtgcagagctactcgggcgcggtgcggcttgattccattttcatcgacgagggcttcggctcgctcgataccgacacgctcgataccgccatgcgtgcgctcgagagcatccgccaaagcgggcgcgtcgtcggtatcatctctcacgtttcggaactgcaaagccgcatcccgacgatgatccgcatttggaagaccgcttcgggctccgccgcagcaaaagtcatcgcggaagactgaaccgttttgaacaaaatgaaaaagctgaaatgcaaattgcaaatccgcctttattatgctatactgaaagcaactaagcgcaggattttctgcgcggccatgcaatgctaaaagaaaggatcgcttccgggctccttcggaagcttcggtgaatgaatatggtaaagctttatgacggcggcgtttaccttgtgaacggcacagagatcgtgccggaagccgctgcacccgagacctatcaaaaagacacggcaaaacagggtaccattgcctattccattttaaaagcgcacaacaccgcagaggatatgcagaacctgcgcttaaaatttgatgcgctcgcctcgcacgacatcacgttcgtcggcatcattcagacggcgcgcgcctccggcatggagaagttccccattccctacgtgctcacaaattgccacaacagcttgtgcgccgtgggcggcaccatcaacgaggacgaccacgtgttcggcctttccgccgcgcgcaaatacggcggcatttatgtgccgccccacatggcggtcattcaccagtacatgcgcgaggccatggcgggctgcggcaaaatgattctcggctccgattcccacacgcgctacggtgcgctcggcaccatggccatcggcgaaggcggcggcgagctcgtcaagcagctgctcgaaaacacgtacgatgtcgcgtatcccggcgttgtggcggtgtacctcaccggcaagccacgcccgggcgtgggcccgcaggacatcgcgcttgccatcatcggtgcggtgtttaaaaacggctacgtaaaaaacaaggtcatggagttcgtcggccccggcatcaagagcatgacgaccgattaccgcaacggcgtggacgtcatgacgaccgagaccacatgtctcacctccgtctggtgcacagacgacgacacgaaggcgtacctcgcaaagcacggccgcgcggacgattaccgcgagttaaagccggccgacgtgacatactacgacggcttggtctatgtagacctttccaccgtaaagccgatgatcgcgctgccattccacccgagcaatgcgtttgagattgacgagctgaacgcgaatctcggcgacatcctgcgcgaagtagaaaaggaagccgcgcgcttgacggaaggcaagaatatcgaattcagtctgacggataagatcaccccaaagggtttgcaggtgcagcagggcatcattgcgggctgcgcgggcggcacatatacgaatgtcatggcggcagcgcacatcttaaagggcgcgcagtgcggccagggcgaattcacactggacgtctacccgtcctcacagccggtgtttatggacctgctcgcaaagggcgccatttccgacctcatggcgacgggcgccattgtgaagaccgcattctgcggcccgtgcttcggcgcaggcgacacaccggcgaataacgcgctgagcatccgccacgccacacgcaacttcccgaaccgcgaaggctccaagccaggcgcaggccaactgagcgccgtcgcactcatggacgcacgttctatcgcggcaacggcggcaaacggcggcattttgacctccgccgaaaagtatgcggacaactatgaggtgccggaatacaactacgatgattcctcctaccgcgcccgcatttacaacggcttcggcaaggcagagccggaggataagctcatctacggcccgaacatcaaggattggccggagcaggaggcacttgcgcagaacattctgttgcgcgtctgctcgaagatcatggataaggtcacaacgaccgacgaattgatcccgtccggcgaaacgtcttcgtaccgctccaacccactggggcttgcggagttcacactctcccgccgcgaccccggttatgtgcagcgcgcaaaggctgtccgtgcactcgaaaaagcgagacttgcgggcgaagcacaaagcgatgaagctctgaaaaatgcactcgggaaagtgaaaaacatcctgcccgacgtcgatgaaaagacaatcgaaatcggcagtgtcatttactgcgtgaagcccggtgacggctctgcgcgcgaacaggcggcaagctgccagcgcgtcttgggcggccttgcgaatatctgctacgagtacgccaccaagcgttaccgctctaacgtgatgaactggggcatgctgccgttccagatgaagaatgaacccgccttcgagatcggtgattatatcctcgtcccgaacgttttggacgccatggacggcgatatgcagagcattaaagcgtatgtgctcggcgatgaagtgaaggagatcgagctttacatcgccccgatgacggaagacgaaaagaagatcgtcaaagccggctgcctcatcaattttaaccgcaagaattaaagtaaagcataagaaaacggcgagtcctgttcagggggctcgccgtttttgtatgcatttttcgtcttcatagagaagcgacgcaaaaagtttttgatcgaccttttttcaaaaaggtcgcgggttcttagggcagcgccctaagtcgtcgtccgcagacaacgaaatctatttgccttccaaaaaatcaggacgggagagggaacagtccagtggactattccctcgtgggagacccaattagggggtctcccaaaaaggcggcatgccgcccttttgctatgcaccgccttattgcttgctttcaaaaaacgcaataaaccggttccagtcctcgcggctgaaatagtgcagaccggggcggcggtgatagccgatgcggcccgcgtgcaggttaaaatcgtagtctttcgacgtttcttcatagggaaacgcctccttgtcccccactgccgccgcatagcagctcaaaagctcggacgcggggtctgcccagtcgtcgcccgccgcagacgccacgtatacatagcgcggcgcaatgctcgcgagcaagtagtgctggtcaaacggcagcgcgtccgttttgccgacatactgcccgaacgattcaccgaaccagaacggaaactgcctataaatatcgtcaagctgctcgccttttttgccgcggaacagcgccgcaccggcacagccggaatcgttcgagtagccaaacgcgaagcgggtatccagcgcagcagtgagcagtgccgttttgccgaggcgcgaatgcccgcacacaacggactttgcacagtccagccgctcgtcgtgctcggcgtaatccatgcagcgcatcgccgcccacgcccacagtgcgattttacccgcgtcatgcggcgcgcgtttgccgttttcatacagaacacccgcaaggccggaggtgaagtcgccgtcgtcgcgcgtcacatcctcatagccgaacgaaagcaccgcaaagccgttgtcgatgagctcctccgtcggcatatagcggtccggcacatcgcttctgaaattgatgtggacaaaaaacgggtgcggcccctctgcggtcggcacagccaaatacaccgggaacgcgaaatctttgccgtttaccacaacccgaaacgtcagcttttccagcgtcgccttgcccgcgcagaaattatccgcaacgccgggctccgcttcccaaacgaacgattccggcgccttcggcaagcagccgtattcctcccgctgcaaaagctccagcatctccgcgcgcgattttaaactcggcacattcctctttttcagttcatccaaaaacatacaaacgcctcctttatgcggttattgtagccgtccttttaggcgtttgtcaatcttcaaaaccaccaaaaaagctgccctctctttgtcagagaagacagcttcgttttgttttacaggcgttttacgcgctttcctctgcgtgctcgaactggctgttgtagaggttggcgtagaagccgttttttgcgagcaattcttcatgcgtgccctgttccacgatgtcgccgtccttcatgcagaggatgaggtcagcattgcggatcgtcgagaggcggtgcgcgatgataaagcttgtgcggccgcgcatcaggttatccattgcagtctggatagaaagctcggtgcgcgtatcgacggagcttgtcgcttcgtcgaggatcatgatgcggctgtcggacaaaatcgcacgggcgatggtgagcagctgcttttgtccctgcgagacattcgtcgcttcttcattgaggatcgtgttgtagccgtccggcagtgtgcgcacaaagtggtcaacctgcgccgcttttgccgcctgaatgacctcctcgtccgtcgcgtccaagcggccgtaacggatgttctccatgatggtgccgctgtaaagccacgtgtcttgcagaaccatgccgaattcttttctgaggtcgccgcgggcaaactccgtgatgtccttgccgtcaaggtagatcctgccggatttaaggtcgtggaagcgcatgagaagctttaccatagtcgttttgcctgcacccgtcgggccgacaatagcgatcttctggcctgctttcacatcggcggagaaatcgtggatgacagtctcgtcggtgtcttcgtagccgaagcaaacgtggtcaaagcgaatgtcgccgcggatattgctgttttccacggtgtatttcggtgttttttcaacgatctcgggttcatcaaggaaattgaaaatgcgctctgccgccgccatggtgcgctgtacctgacttgagatgcttgccatctgggtgatgggctgcgtgaaactgcgcagatactggataaacgcctgaatgccgccgatggtcatgctgccgcctgccgccatagatgcgcccaaaatgcacaccacaacgtagccgaggttgcccacaaagcccatgatcggctgcatcaggccggagaggaactccgacttccagcccgcgttatagagcttttcgttttcgcactcaaatttctccatggagcgcgcttcgccgttaaacgccttcacgacgacgtgcccgccgtacatttcctccacgtggccgttcaccgcgccgaggtattcctgctggccgacgaaatatttctgcgaggatttcacgatgcgtccgacaaacagcagcgaaatcgggacgatgcacagtgcgacaagcgtcaactgccagctgatggaaagcatcataataagcacgccgatgatggagcacacagacgtgataagctgcgtgatactctggttaagattctgactgagcgtatcaacatcgttcgtgatgcgggaaagcacgtcaccctgactcgttttgtgaaaatacgagacgggcaggcggtcgatcttctccataatggcacggcgcatgttgtacgagaccttcgccgaaacgccagacatcgtaaagccctgaatgtaggagaacagcgcgctcaacgcatataaccccgcaaggaacagtaaaactttcgcgatatagccaaagtcaatgccctccgcagcgccggtgatgatgcgcatcaaaccggctgtcaactcatcggttgcttttgcgaggatcttcgggccgacgatcgtgaacacggtggaaagcgccgcgaaaatgacaacgatgagtattttaaacttaaacggagaaagatacgaaataagctttttaaagctgcctttgaagtccttggctttttcggtgggcatcatgcctctgccgggcccgtgcggacgcggtgcgtttcttttcggttcgctcatgccaattcctcctttgaaagctgactttccgcaatctcgcggtattccgggcacgttttcaaaagctctttgtgcgtgcccttgccgacgattttgccttcatccagcacaatgatctgctcggcgttcatgatggtggaaacgcgctgcgcgacgatgagcacgacagcgttttccgtgtatttcgtcagcgcacggcgcagctttgcatccgttttgaaatcgagcgcggagaagctatcatcgaaaatatataccggcgcttttttcacgagcgcacgggcaatggcaaggcgctgcttctggccgccggaaacgttgctgccgccctgcgcgatggagctttccacgccgttcggcaattcgctgacaaattccgtagcctgtgcgcaatcgagcgctgccagcacctcgttcacatcggcatcttccttgccgtacttgatgttggaatcgattgtgccggagaacagcacggccttctgcggcacgtagccgatgttatcgcgcagttccttttgcgaaagcgtgcggatatccttgccgttcaggtaaactgcgccgccggtgacatcgtaaaaacgcgggatgaggttgatgagcgtcgattttcccgcacccgtcgcgccgataaacgccgtcgtttggccgggctttgcggtaaacgaaatgtggctcaaggtatcttcctcggcgttgccgtagcggaaggaaacgtcgtcaaaacgcagctcaccgctttcattaccgagtgtaaccgggttttccggctctttgatggaaagctccgtcgtcagcacctcctgcacacggtctgcggaaaccatggcgcgcggcaccataatgaagatcatcgcaatcatcaggaacgacatgatgatctgcattgtgtactggatatacgccatcatgtcgcctacctgcatggtggattccgcaatggcgtgcccacccacccacatgatgagcagcgtgacaagattcatgatgagcatcatgatcggcattgtaacgctcatcacgcgctgggtaaagcggtttgtgcgggtgaggtcttcattcgccttatcaaagcgcgcctcctcgaatttctcattcgtaaacgcgcgtaccacgagcatgccgctcaaattctcgcggctgacgaggtttaatctgtccgtcaaacgctgcaagctcttgaatttcggcattgcaacgtttaaaagtacgacgacaagccccagcaaaacgatgaccgcgagcgcgatgatccagcttagcgaaacgcttttttgcagcgcgaaaataatgccgcccacgcccatgatcggcgcgtagcacatcaaacgcaggcccatggaaataagcatctgcacctgcgtcacgtcgttcgtcgtgcgcgtgatgagcgatgcggtggaaaatttatcgaactccgtgttggaaaagctttctaccttgcggaagacatcgctgcgcatctgctttgccacgccggacgaaatacgcgacgcgaagaagccgacgagcaccgccgccagcacgccgagcagcgcgataccgagcatctcgagacccttcatcacaatgtagcgcatctgctttgcgtccagatcgacgccgagttccttatagaacagctttgtaaacgttgcgcccacctgcgagccgatcatcgactgcgcgttttcggcagaatcaatcgcttcgctgaacgtctctttcggcatctgctgtaacatggggataacagcataaagctgacgcatatccatgtcctgcacgccgctttcggtgtccaccgcctggccggtctgcgcgccgtaatccttcaggaacgtcatgaacgcatacgctgctttaccgtaggcatcgcccactgcctgcacgtctgcatcttcgcttaaagcgaccgcatcaatgtccttgatattctcgtaggttttcgcaagcttcgtctcttcatcgctgccgtgctccacgggcgtgtaggcggttttgaacgtctccgcctccgtgttgttcataaacagcgtcaataagtcaacggcctgtcggttcaaaaccgcaggtgcggcctcatccacgccgccaagctgaatgccggtgttcacaatgtcgctcatcaggttcggtaaggtcaagtcacacatcgcctgcccgaaaagcagcagaatgcacgccagtaccagcgccgcaaacggctttaggtacgttttcagcaatttcattcggttttctcctttctcatctccgggtatctgcctgtctcggtaaagttttcaaggtttcgccgcatttgctctatgacgcggcggaagacctgcatgtcttccgggctgataccggcgcacattttttcataatattcatgcttcagctctctgcaccgcttaacagccggctcggccttcggcaacaaaaccaaatgtaccatgcgacggtcgttttggtccggttttgtttcaatccatccgccgcgcacaaggtggtctaccgccttactcatcaacgagcgcgaaacacccatgcgccgcgcaatgcgcccggccgtatcgacctttgttgtggaaaggcacatgatcacaccggattctaccgcggaaaggtcttcatccgccagcaccttgcgcagctccgtattgatgatgcgcgcgatctgcgttaagtgctccgcaagcccgtcgtgaaacggcacagccgtacacgcttgctcgtctcgcttcattcctcgcacctcctgttgcttactgctgaacatcgccaaaagttcttaacgatgaccattttcaaaaacagtttaaaattgaattgttcatttttgaactgttaaggaatgaacatattatagaccgataaaaccaaaaaagcaatgactattttgtgaacaaagatgccaaattatatttcagaaaaacatataaccgaaaagaaaaaagacccgcaaacacagcgaactgcatttgcggatcttgaatcaggcaattataaggtgaagtaaaaaattacttcagttcgacctcagcgccagcctcggtgagcttcgtcttaagagcctcagcgtcgtccttggaaacgccttccttaatggtcttcggagcctcgtcaaccatagccttagcttccttcaggcccaggccggtagcttccttaacaaccttgataacgttgatcttgtttgcgccagcagacttcagaacaacgtcgaactcggtcttctcttcagcagccggagcagcagcgccagcgccagcgaccataaccggagcagcagcggaaacgccgaactcctcttcgatagccttgaccagctcgttgagctcgagaacggtcatggacttgatttcttcaacaaactttgcgatatcagccattgtaatatcctcctaaaattttaaattgaaaattatcctgcaaacttatgcagtttcctgagcctttgcaacttcactaagtgcaatagcaagaccacgcgggccggatacgagaacgctaagcagcatctgaacaagaccttccttgctcgggagatctgcaattgcagcgatctctgccggagacatgaccttaccgtccatgtagccggacttaatcacgaacttaccgtcggaatcctttgcaaacttgttcaggattcttgccggagcgatctgatcctcgtgggaaacagccagagcggttgtgccttcgagaacctcggacataccctcgatctcggtgccttcgatagcacgcttgagaagagtattcttaacgacagtgtactcaacgccggcttcacgcagttccttacggagctttgtgtcggcctctgcagtgatacccttgtagtctacgaccacaccggatacgctgttagcgaccttatccttcagctgagcaacaagtgcctgctttgtttccaaaacgcttttactgggcaaaatattcacctcgcctttcagttatgattcggaaaagcgccaaaatgaacgattttcctcggtgcgaaaactaaaaatgccttcccacttaccgcaggaaggcataaaaagtacaaagtaacttttccgctccctcggcaggcggtaaaacctttcagcccggaaaaccggtgcacctgctgtcttaggtaaacagctttgtaattatagcatggcagaagaactctgtcaagccttaaatttaagattcagacgaatcttagccaaccttgttcgggttgatcttcacacccgggcccatcgttgcagcaacaacgcaggaacggatgtactgacccttagcagcagccggctttgccttgttgatggcttccagcagcgtgttgaagttttccgtcagcttctctgtgccgaaggaaaccttgccgatcgggcagtggatgatgttggtcttgtcgagacgatactcgatcttaccggccttcgcttcggtgattgcacgtgcaatgtccggagcaacggtgccggccttcgggttcggcatgaggccgcgcgggccaaggatcttaccgagacggccaaccatacccatcatatccggggtcgtgatgaggacgtcaaaatccatccagccttcggactggatcttctggatcatatcattgccgccgacgaattcagcaccggctgcacgagcctcgtcttccttctccggcttgcagattgcgagcacgcggacggtcttgcccgtgccgtgcggcaggacgatagcaccgcggacctgctggtctgcatgacggccgtcaacgcccagctttacgtggacttcaacggtttcgtcgaactttgctgtaccagtcttgacacagaggtcaagcgcttcctgcgtatcataaaggcggctgcgctcgatgagctttgcgccatcgacatactttttaccgtgtttcattcatgttcctcctaaagtggtagatatcggattctcagagagtttcctcccacccgggtaaaatcaaatcaatcgactacttcgatgcccatgctgcgtgcagtaccggcgatcatgctcatagcactctcgatggatgcagcgttgagatcaggcattttctgctcggcgatcttctttacctgctcgcgggtaatctttgcgacctttgtcttgttcggtgtgcccgaagctgtttcgatgccgcaagccttcttaataagaactgctgcaggcggcgtctttgttacaaaggtaaaggaacggtctgcgtatactgtgatgacgaccgggatgataagaccagcgtcgcccttggtgcgctcgttaaattcctttgtaaatgccatgatgttaacaccgtgctgaccgagagccggaccaaccggtggtgccggggtagctttaccggcaggtatctggagcttaataaagcccgtaaccttctgagccatttgtttgcacctccaaaattcgtggttgatggcggaacgtccgtgaaaattcaggcgttcctcccacagggggacgtatccccctcaataaaaagcggattaccgcaatttaccgtgtgttattccaccggctccgcctggtcaagttccaggtcaaccggggtttcacgtccgaacatcgaaaccgtgacgcgaatgtggttcttgtccacatcaatctcttccactgttccgataaagccctcaagcgggccgtcggtaatctggacgctgtcaccgacattgtaggagacttcgacattcctcgtctccacaccgagtcgctccacttcttcatccgtgagcggaatcggcttggaagacgggccgacgaagcccgtgcagccgcggatattgcgaaccgcgtaccacgattcatccgtgaggatcatctttacaatgacgtaacccggaaaaatcttgcgttccacttccttggtcttgccgtttgcggcaacttctgtgaccttttcggtgggtacgcgaatctcaaaaatcaaattctgtaaagagtggttttccaccgtcttctccagatttgacgcaaccttgttctcatacccggaataggtatgaaccacataccattttgcttcgtccgacatttcgattcctccgcttctcaaataaacgcgcgatcattcgcgctgcttatttcgccacttgcatgacgagacccagcaaattcatgaagacggtatccagcaggaaaatgaagagaccaagcaggatgatcgtcgcaagaacgacacccacatttttgaaaacgttcttcggcgtaggccaaacgatctttttgatctcgcccttgcagtcgcggaaaaactttcccgctttcttcataaagcgaacaaagccgttttctttttttgctttttcggccataacttcgttcctcgctttacttcgtctctctgtggagcgtgtgcttcttgcagaatctgcagtacttgttcatctcaagtctgtcgggatcattcttcttgttcttctttgtgttgtagttgcgctgtttgcattcagtgcaagctaaaacgacctttactctcatgacggcacctcccgttttacggaaaaaatttgggatgttctcccagcctccctcaaaatttgggcgcaaaaaaatagcccccaacttgaggtatacctataatagcataggatatactctgctgtcaagagctattttgagattttatgcggtttttcagttgctcaggcgtgcctccacctttttgcccttcttctttaccttttcgggcttgatgttcttgccgatgagttttctggagtgcttatacaccttctgcaagtcgcagccgtccgtaaagttcgcgatgatattccggatggccgcctcgtccttaatattattcagaacgccgaactgaatgactgcacgggtgtccatatcacccgcggcgtacatgtcgcagaaaatggtgcacatgcgcttcatgggctcgctgtccttataattcttcgcaagattctcgcactttggcgcaaccttctcagcagcaaacagtgccgtgcgcacctgaccgtacacgatgcgttcctcgttcatttcgtcgcgcagctccgggaacaccggcaccaagcggttgagaaagaactgcggatccgcgttgttctcttcgtccttcttgcggcgcttcttcgcggtctgcacgagctcgcggcgcttagagccctgcacgagctcaagaaagtcgttcgcaatgctctccgcgtcctgcatggtgttttcaccttcatcgaacagccacatggaaagctgacgccagtcgcccggctccttcggggtcttcatcgtcgcgctgcgcagcacaaagcgccgctgcttcgtctcatagaaaaggccgtaggccacttcgcccgtcgtaaacattacgccgcggccgttgtcggtctccagcgccacagcttcgccaaagccctgctcatttaacgctgcctgcaatttttcctgtatcagttcaaaagctttctgctccaagttatgatcactccgttacattagtaatttagagtatagcacagttttcgcgcattgtctatgaaaaatccatgaattcccggaacttattttttatcggaacataaatccattgccatcgtgcattttatatgctaatataggctcgtattgaaaatatgcgggctcggcccgaaacagaaatgaaggaaatcgattatgacagaatacggcggcgctgccgctttaaaacagaataacctcgccgctctgcgcagcgcgctgtaccacacggatttcgccacaaaaaaagagcttgccgagcaatgcaggttaagccttgcggcctgtacggcgctcctcggcgagatgatcgacgacggacaggtgttggagcttgcctttgccgcatcgaacggcggccgtcccgcgcgccgcttttccatcaacccaaactacgcgcacattttgtgcctttataccgataataacgacgtggaaaggagcggcatcgccctgcgcgtgtgcgatttaaaaggaaacagcttgcaggaaaaattctgcccgctcgacgacattctgccggaggacctcacgctgttcatcacacagatggtgcaggcagatccgctcatccgcgcagtcggcatcggcatttccggcgtcaccgaccgcgaaggcgccattgaatccattgcgttcccggcattaaacggcttcaacccgaagaaggtactcgaagaacagctcggcatcacggtcatcacggaaaacgacatgcacttcacgtcctacggcttttacgtgcgcaacccctgcgaccacccgtactccctttccgttctctactggccgagccaccgcagcgccggtgcgggcaccgtggtggacggacacatcatcgtcggcagtacaaaatatgcgggcgagctcatcagtctgccgctcatcaactccaccgctacaaaagtcgagaccgtctcgcgcatgattcacggcgagaatatcgtaccgctgatgcagaccgccgccgtatgcaccatcgcgcttttgaacccggacattctcttcctcaccggctctgccaccttgaacgtgcgcgaaaaagacatcatcgattactgcaagcagagcatcccggaaaaccacatgcccgttttccgtatgcaggcggacatccacgaggaatacatgaccggtatcttctctctgacgcgtcaggctttgaaattcaaacattgagcctctttttgaaatgtacagacaacgcccttcaaaatttcctaaatctcgcaaaaacttttctgctgcttttttgcaaaatgtttaaaaaggggctttacaaacggaagcgaatgtgataagataccttttgtcagaaagtgacgaaagtgtccgatccaaaagggatgaaggacaatggggagtttatacgggcgcgacacgctggggatttgcccacaccgcacccataaatgaagaagacaggacaaagcgttttcagatgcgctttgtcctgtctttcgttttacaaaatcatttctttacaatctgcgctgcttcgcgtgccagcgcctcaatggcgtcaaaatctccggcgtccaggagcccccccggcaccatccagctgccgccgcagcacagcacgttcggcagcgcaaggtactccgccgcgttctgcgcgctgataccgccggtgggcatgaatttcatattgccgtaaggaccgccgagggccttcagcatcttcacgccgcccacaacctccgccgggaacagcttcacaaaatcgagccccatgcgcatgcaggcttccacctccgtcggtgtcgcgcagccggggatgaccggcacacggtgcgcaatgcaccagcgcacgacctccgggttcgtgcccggactgataatcgcggaagcgcccgccttcacggcgcgctctgcggtctttacgttcaaaaccgtaccggcgcacacgcacacgtccggcacctctatcttaatacggcgaatggcttcctccgccgcgtctgtgcgaaatgtcacctccgccgcgggcagcccgccttttttcagcgccagcgccagcggcactgctttttccgcatcgttgatctgaataacggggatgatcccgatcgattttaacgtttcccgaaaattcatagaacaccctcccggtgattttcttcaatttattgtatcatgcgccgcaaaactttgcaatatatccccatttcaaaagaattccgttttatttcaaatttgcgcttgacaaatgaaataacattcgatattttatcctcatcagctgaaccacacccgggaggaaactatggcaagaacaccgcgcatcacggcggaaatgctgcttgaggcaggcgccgccatcacactggaaaaaggcgcagatgcactcaatgtccgcagcgtcgccgctaaactcaattgctccgtgcagcccgttttccgcaacttcggcagcatggaaactttccgccgccccgtcatcgaatatttggacggcacatatcaatccttcgtcgcgcagtatctcgataaatcggactacctgttcacgatcagccttgcgcacattctgctcgcccgcgacagacgcaatctgttcggcgtcctgtttttatcgaacgaatacggcagccgcaccgtgccacagatcatctcgagcccgtggaaccgcgaggccatcgactgcacggcggtgcagtacgggctcacggtaaaggaagccgaagctgtttatcgcgacgtgcgattttatacattcggcatcgccgaagcgctgtatgcgggctcgcttatcgcggaggaaaatgagctgcggcagctgctgcgcggcgccatccgcaaattctgcgcaaaataacgcagtgttctcatttaaagaatttggagaaaaaacatggacatcaatgcacaaaacaaagaaaaatatttggaagacttaaaaaattggctttgcgagctcgaaagcgccccgcttgaagaaatgggcgcgtttttccgcaagcgcctgccggaatacgaagcgcgcatgacaaaattctggggcgaagactacaagcagtttgcccgcgctgtgccagaaagcgccaagcgcattttagacctcggctgcggcacgggtctggagctcgacgcgctctacaatttgcgcacggatatttccgtcaccggcattgacctttcgcccgatatgctcgacgccctcatgaaaaagcatggggataaggacctcacgctgctgtgcggcagctactttgccgtgccgttccccggtgcgttcgacgccgtcatctcgtttgaatcgctgcaccactttctgccggagaaaaagcgccggctcttcaaacgcatctatgactgtctcacgcccggcggcatgtttgtaaacggcgattacttcgcctgctgtgacgaagaagaaaacctgctgcgcgaaacgtggagccgcaagcgccgcgaagaaaacattcccgacgacacattcgtccactttgacatcccgctgacaaaagaacacgaagccgaactgctgaaaaaagtcggcttcaccgtcacggtggaaaacggtaacgattgtttgattgtaaaagcggtgaaataacgcacagcgaagcgacgaataaagtttttgatccaacttttttcaaaaagttggtggggtctcggggcaaagccctgaggcgcgctccgcagagcgcgaaatccatttgcctaacctaaaactaggaaggtaggagcgaacttccagtggacgttcgctccgcaggaaacccagttgcatgggtttcctgataggcggtcaaaagaccgcctatttaaagcgccgcacccacgctttcccgtgtgagtgcggcgttgctattcgttttacttttccgcgctcggtgcactgacgctgaaaatcgcacctctaacgccgtccagcttcacggttgtgccggagcgcagcaggtcggtcgcgtgcgccgcgccgacgatggccggtttatccagcgccatggcggcgatggctgcgtgagagttcacaccgtccatttccgtcacaatacccgaagcctgacggatcagcggcatcgttgcgttcgtggtcttcggcagcaccagaatatcgcccctgcggaacttttgcagcgcttcctcctccgttttgcacacgcacagcgggccgcaggtactcagcacgttcacaacggtgccggagacaagcacgtcgcccacaaggtgtaccttcagcatgttcgtcgtgccggaaatgcccagcgggatacccgccgtgataacggcaatgtcgcccgcctgcacaagtccgtgctcctccgcaacagccacgatgtgctcaaacagctcgtcggtgctggtcttttcctccagcatcacggggattacgccccaggaaaggcccatctggttcagtaccttgcggtcggtcgtgccgctgataattgggcacgctgggcggaatttcgaaatcatgcgcgccgtaaagcctgttttcgatacggtcatgatggccaccgcgccgaggtcgtgcgccgtcgtgcacgttgcgtgcgaaatggcagaggtcacgtccttttgcaccggcacatcccactgctccagctgacgcacgtagtcgatatcgttttcggtgcgctccgcaatgcggaccattgtgcgcacagcctccaccgggtacgcgcctgcagccgtttcgccgctcagcataatggcgctcgtgccgtcgtagatcgcgttcgccacgtcggtcgcctccgcacgcgtcgggcgcggattcttgatcatggagtcgagcatctgcgtcgccgtaatgacctgcttgccggcgacatacgccttgtggatgagctgcttttgcagcaccgggatctcctccatcggaatctcgacgccaaggtcgccgcgcgccaccatgatgccgtccgaaacgcggatgatgtcgtcgatgttctccacgccgtccgtgttctcaatcttcgcgatgatgcgaatgtcgcggcagttgtttttttcaagctcgttgcggatcatcacaatatcctctgccgagcgcgtaaacgaggcggcgataaactcaaaatcttccttcacgcagaattcaagatctgcgcggtctttttcgctgatatacggcatggaaagcgtcacgcccggcacattgatgcccttataagacgtgatggggccgtcattcaaaaggcggcactcaatgtccgtgtctgtcaccttttccacgatcatttcaatgaggccgtcgtcgatgaggatatgcgagccgcggtgtacgtccttcggcaggtccttaaacgtgatagagcagccttccgcgtcgccggggcgctcgttcgtcgtcagtgtgtacttctgcccgtgggtcagcatcaccttttcggcaaacttccccgtgcggatctccgggcccttcgtgtcgagcagaatggcgaccggcacgtcaagctcttttcgcagctttttcaccatatcggcgcggcgcttgtgctcctcatgcgtgccgtgcgacatattcaggcgcgccacgttcatgccgctcaaaatcagctcgcgcagcacagcctcgtcatcggtagaaggacccagcgtacatacgatcttggtttttctcatctatatcgacccctttcgttttcgcagaccccatggcctgcacaccagtgtgggctatttttccttattatagctgaaaaaagaaaaggaagtcaatatgacggctaaaaattaaaaaagtaacaggctatttgttgaaaatgactcgctttttcacaccggaagtcatatttttcacttttgccgtgcgagaaagtatccttttctgcatttcgcagatcggcagaggcagcaaagcaaggattgccacgatgccccactgtgtcaaggtcagcggtacggaaccaaacagcgccgccgcttgcggaaacacgaccacgcccgccatcaatgccgagcaaatcaaaaacgatacgttcagaccccggtttttaaacataccgcgtcccaaaaccggccccgtactgcgcatattatagctgtgcacgagctgcgaaaggcttaggaccgcaaacgccatcgtgcgccccacggcgggctgcatgggatcggcgtcaaaaaacacgcgtcccaccgtgaacgccaaaagcgccagcgcgccgatcatcataccctccgccgccatcgcaaaaccgagcccgtttgaaaacgcactgctgtcccgcgcggtaggcgggcggcgcatcacgtcgccctgcggcgggtcactgcccagtgccagcgcaggcaaagagtccgtcacaaggttcacccataataattgcgccggcaaaagcggcgtcggcgtgcgcagcaaaaacgacacaagcaccaccaagatctcgccgatgttgcacgacatcaaaaaatggatggtcttgcggatgttgccgtacaccgtccgcccctcccgcacggcggaaacgatcgtcgcaaagttgtcgtcagtcagcaccatgtcggcggcgtttttcgcgacctccgtgccgtttttgcccatcgcgcagccgatgtccgccgctttcagggcaggcgcgtcgttcacaccgtcgcccgtcatcgccgtgacgagcttcagcctgcgaaacgccttgataatgcgcattttgtgcgccggagaaacccgcgcgtacacggaacacgtctgcaccgtctgcaaaagtgcgtcgtccgaaaggctttccagctccgcacccgtcatcacatctttattttcaatgccgagccgtccggcaatggctgaggccgtagcgggttggtcgccggtgatcatcaccgggcgaatgcccgcacacttgcactcggaaaccgcctccgccgcctccgggcgcgggggatcctccagcccgataagtcccaaaaagcacagcccgctttccgccgcatcgtccgtctcggggcaagcttccgtgcgcttttccgctgccgccagaacacgcagcgcgtcgtttgccatgtcgcggttttttgcgctcagtgccgcccgcatctcgggtgttaacgtaacgttcctcccgtttaaaagcacatacgtgcagcgcggtaaaatcgcctccggcgcgccctttgtgatgatcctgtatccgccctccgttcgcagtacgactgtcatacggcggcgttctgccgtaaacggcacctcagccgattttatgcgctgcttttgcagacgctcccagtccgataccgccgcgacaatcgccgtttcggtcgggtcaccgagcagcttctcgccgctgcccaccacgctcgtgcacagcgccgccgcagataacaaagcgtctctatcctgtccgttcagctcgcccgccgcacccgcgcagcgcactaccgtcattttgttctgcgtcagcgtgccggttttgtcggagcaaatgacctcgcagctgccaagcgtctccacggcaggcaaatgccgaatgatggctcgctttgccgccatgcgccgcacgccgagcgccaagacgatcgtcaccacggcaggcaggccctcgggtatcgccgccaccgcaaggctgatggagatcatgaacatttcaagcggttctgtcttttggataagcccgatcaaaaaaatcaccgcacatatcccaagcaccaaaagcccgatgagcttgcccgtgcgccgtagccgcagctttaacggcgtgtcgggtgtttcttcgtcgccaagcatcgccgcaatgcgacccatttcggtttgcatgcccgtcgcggtcacaatgcccacgccctgcccggcagagatgcccgtgccggaaaacagcatgtttttgcgctccgccgcgccgcacgtttcgtcacataccgcattcgcgctcttgccgctcggcacggattcccccgtcagcgcgctttcctcggcctgcaaatgcatgctctccaaaagccgcaggtcggcgggcaccacgtctcccgcgcggatatatacgacgtcccccggcacgagcgcttcggcggaaatgaccgcgcgtttgccgtcccgcagcacatcggcgtgcggcgcagaaagcgtgcgcaacgcttccaacgcccgttctgccttcgcctcctgcaccgtgccgacgaacgcgttcgcaatgacgatgcccaaaatcagcagcgggtcggccagattcgcttccccctgcatgcacgagacggcaaacgacactgccgacgcgatgagcagaatgagcaccataaaatcgccgaactgcagcataaatttctttgcaaagctcgttttcttccccttttgcagccgattctcaccgtaaacgccgagccgctttttcgcttcggatccgctcagtccacgccccgcgtcgcttcgaagggttttcacagccgcctccgccgtcatggcatagaattttgcttccgctatgggttttgacattttcctgcccccttttccggtaattctatgcgcgggcgcgtccgtttagaattttgaaagaattctttcatagaaatccactggcatttttagaaaaattgcagtatactataactcaatcaaagcattggaggtttactaagatgagttttcccggcatcccgtcgcttgacgccgccgtcatggcctttatacagacgcactttcataacaccgtgaccgacacggtcttccccatcatcacatcgctcggcgaagcgggcattgggtggatcgtcctttcgctcgttttgctctgctttaaaaaaacgcgccgcaccggcggtttggtgcttatcgccatgacggtcacgctgcttttcggcgagctgacgctgaaaaacatcatctgccgcctacgcccttgcaacgtgttcacgaattttccgatgctcatcgcgcgccccacatcctattcgttcccctcgggccacacatcgtcaagctttgccgcagcgcttattttgacgctccgccacaaaaaagtcggctggctcgcgtacattccggcagtgctcatcgcgttctcccgcatttttctttttgtccactaccctaccgatgtcctcgccggcatcctcctcggcaccatcgccgccctcctcacctactttgccgccaaggcgattcaaaaacgacaggcagagaagcgcacggcacaaatttgaaccgtttatttcgacaaataaaagcagcgcgcaggtttcacagcctacgcgctttttctatctctgttcagttctttcttgtccattcttccaacactttccgtacattatgcgcggcgtcttcctgaatctcaatgacctttgcaccggcgtgctttgctacgtcccgcaggtcgcacgcgatggcggtgtggtacgaacagccgatgacaaggaacacgtcgccgggctttaattcagccaccatttcgtatgctttcacatagttcggcgcggggtcaccgtacagcacgggcttattataaagcgcccacgccttgtccatttcgtcgtcctccggcaggccgccgtgcagctccagtgcgtcgctgcccgcttttttatgcagcccgtcaatgttcatcgtgatgaccggcaccttgtattccgccagtgcaaaatgcgcgtcgttcggctctgcgccgttcatattcgctttcaattcgcgaatgacctcgttatacgcctcgtggtgatgctccgcgaacatgcggaacagcttttcgcgcacgtcgggtcgctccataaatgtcggaatgttgctctgcttgctgatgcccgcgcccgtaaacgccagaattttcataaagaccgcctccttggctctcaatttaaaggaacggcgcagattttaagcctgcgccgttctttttatataaattcaattttactgcgctttgccgatttccaaggcttttctgttgaaaccgagcatatccgcttttcttgcgggaatgcacttttgcagcgctttgtcgagcgtttcttccgtgcagaacgcaagctccttgcgcaatttgccgaccaagatgatgttcgcaaggcctttcagtccgttttcctccgccagttttgatgccgggacatagaaaacggtcacgtcgtcgcgctctacacgctcgtcgatgaggctgctgtcgagtaagatcgtgccgccgggctcgacctcgttcacgaacttatcgagtgacgggcgattcatggcgatgagcacgttcgggttcgtcacaagcggcgagccgatgggttcatcggagagacaaatgctgcaattcgcggtgccgccgcgcatttccgggccgtaggacggcagccaagagagctccctgccctcgataaggcctgcatacgccacaactttaccggcgaacaaaatgccctgaccgccgaaaccggcaaaaacgatgttcaagtctttcatttcagcctgtccccctttgtgccgtctttatacacgccgagcgggtagtacggaaccatgttcttttcgagccaatcgagcgcctcaaccggcgacatgccccagttcgtcgggcaggtggaaagcacctctacaatggagtagcctttaccctcaatctggttctggaacgcctttttgattgccttttttgcgatattgacattcttcacgttatcgacggtcacgcgctgtgcaagcgccacgccgtccagtgtggagagcatttcgcaaatacgcaccgggtagcccgccgtgttcacatcacggccgtacggggtggtctgcgtgacctgattcggcagggatgtcggcgccatctggccgcccgtcatgccgtaaattgcattgtttacaaagataacggtgatgttttcgccgcgcgttgccgcgtggacggtctccgccgtaccgatggctgcaaggtcgccgtcgccctgataggtgaacacaacgtcctccggctttgcgcgcttgatgcctgttgcgaccgcttgggctctgccgtgcggcgcctgcaccatatcgcaggtgaaataatcgtagcacataacggagcagccgaccgaggccacgccgaccgttttgccgtcgatgccgagctcttctatcgcttccgcaacaaggcggtgaatgatgccgtgcgtgcagccggggcaataatgcagcggcgcgtctgttagcgtagacggctttttaaatacaactgccatttgattctatcctttcgccttatttcaaaagtttatcgatctcgcccagaatttctttcggggtaggaatcacaccgccggtgcggccgtagaagtgcaccggcacacggcactctgccgcaagacgcacatcgtctaccatctggcccatgctcatctccacaacgagcagctctttggcatggtctgccgcgcgcttgatcgcgtccttcgggaacggccacagcgtgatgggacgaattaaaccgaccttcttaccggcttcgcgcgccttattcacggcgctgcgcgccacacggctcgatgcgccgtaagcgacgacgatgacatctgcgtcctccgtgcggtattcctccgcacgctgctctttttcttcgacgatcttatagcgctcgtagcgggcacgcacaaggtcttcaagggcgttcggcgtaaggtaaagggagttgatgatgttgtgctctcttttattttcatggccgcaggctgcccacggcttttcgggaagctttctgtctttatgctccggcagctccaccggctccatcatctggcccagcatgccgtctgcaaggatcatcgcgggcatgcggtattcgtcggctttatcgaatgcgtcggaaacgaggtcgaccatttcctgcaccgtggacggcgcgaaaacgagaatctggaagtcaccgtggccgagggctttcgtcgcctgccagtaatcggactgtgagggctgaatgccgccgaggcccgggccgccgcgctgcacgttgatgatgagcgccggcaagtcggagcctgccatataggaaatgccttcgcccttaaggctgatgccgggcgagcttgaagacgtcatggcgcgcacgccggccgcagccgcacccagcaccatattgaccgccgcgatctccgattcagcctgcaaatatgtaccgccgatcttcggcatacgctttgccatataagccgcaagctctgtctgcggtgtgatgggatagccgaagaaatgatgacatcccgcctgaatagcggcttcggccagggcttcgttgcccttcatcaaaactttttctgccatagtttttaactcctctctcagcgttccaccgtaatcgccgaatccgggcacatggtcgcacatgccgcgcagcccacgcacgctgcctcatcggtcagctctgcggggtgatagcccttcgcgttcaaacgatccttcgcgagcgcgatgatctttttcggacacgcgtgaatgcacatggagcagcctttacatactttttcgtctacaataatccttgccattcggtttcctcctttatcctactcggtttcgtcctcccagacgaaacgtacatatcgctttaccgccttaaatccctcgggcagcgtgttttccaccgcaaaatccggcacggtggaatagagaagcggcagatggcataattctgcggcttttttcgcaaacggcacagcattaagcaccgtttgcatatcggtctgcacagcgaggtttgaattgttcacgaccgccgtcgctttcaggtgcgatgccgtttcgatctcccgaaggagcggaagcgtttcttccggcttcgtggaaagcacgcgataccggtttacgacgtacagcatcttgtacccggcagtctcgatttgccgatgcagctgcccgagcgccgtagcgcccacgtcgtcgccgcccgcatcgataaaaatatcggcgttctccatattaaagatggagaagatctccggcggcagcacaggggtatcgagcgttgtgttcgcgaacaccggcgcgatgagttccacgccgagttttttgagcagcgcggaataatccgacgagcggaaatacgggttcacgacgtccatatcgacaacaacgctgcgtctgccgcgctgcgccgcctctgctgccaaattcagcacgagattggtctttccgcagccgtaatgcccgcaaatgaccgtaatggagcttttcatgcgctcaccctttcttctataaaataaagcggtccggtactcatcatcataccaccggaccgccaaaaaatcaacctttcccgccgacttcgccgctttattcataaatttttataagtcttacaaaatgtgggattcgtgaaaatcttctaggctttcggttctttggcggtgttgatggaagaaatcagcattcttcggatggtgccgcataatgtatacagctcccgcgccgcctcttaacgatagaccgatgcccgtggatcgtttccgttaactttatcgccttgaccgcaaagtccgtcgataggtcgcgcaatttggattctgacacgctatcaccttcctttttaggaaagtatagcataactttagcgatgagaaatatatttaaagaaaatttgatgctagcatcaagtgaaatgaaat

SEQ ID NO: 1725 - DNA, 27860 bp, Unknown
  gut microbiota DNA sequence
cgtatttcacgtgcgaagcacatttcacaaatccgcaaggatttatttcgttgaaaaagagacctgacacaatgtgtcaggtctctttttctggagcggacgacgaggctcgaactcgctacctccaccttggcaaggtggcgctctaccagatgagctacgtccgcatttcggatttcgtgtcacttgtttcgcaacgtgatttattataacggagatgactcgatttgtcaagcctatttttgaatttttccgacttttttcgtaaatgcttgcaatccgtgaaaaaactgctatactttatgcaatgattttcggcagcactgtgcgaatacggagctgctttctgttatttttagaaggagttatgtttatgtattgtaaaacctgccgtcaaccgctgcctcacgatgcccgccgctgcccaaactgcggcgcacctgttgaaaacaccgttttgcaaagcggcgcacgggatttcaccgccgactacgacccgcgcgacattcaggagaatcgcggctggggcattctttcctacctcggctttttggtactcatccccattttcgctgcgcgcaactcgtattttgcgcgtttccacgcaaaccaggggcttgtgctgtttcttttctacgcgtgctattcggtgctgacgcgcatcatcacgaacatcttaaacctcgcgctcggctttataccgtttgtgccgggcatgatctccgccgcgctgcaatttatcggcatcatcttctttgtgctgatgatcctcggcatcgcaaacgccgcttccggcaaagtaaaggagctgccgttcatcggccgtattcgccttttgaaataaccgtacatagcaaaattgccctgcgggattttctttcgcagggtatttttatacgcgaatttcgcaaaaccgttgcgcacaaagtcgatatatgctatactgcgtaaggaaaaattcagcgttcggcggattttaatcaagcggcaacgcgggggagcgcccgatttgccgtgccggactgctttcacatagcgatgggactccgtgtttcggattgagaggaagcaattgagcttcgaccgcccggcctgaatttacattcgggcgcgcttcgctatgtgcatttgtgcgcctcttttaaacatgggtcggaaacgcttatatttagagaggtacaaaaaatgaaaagagaacacattctgaaaatggtcatgcttgcaatgctcgtcgccatcggcgtcgtcatttcgccgattttgcgcgtggagggcatgtgccccatggcgcatctcatcaacattgtctgctccgttttcctcggtccatggtattccctgctgtgcgccacgcttatcggcatcattcgtatgacgctgatgggcattccgccgcttgccttaaccggcgcggtgttcggcgcgtttctttccggcgtattttaccgtctttcgggcggcaagatcctttgcgcagtgctcggcgaagtgttcggcaccggcgtcatcggcgcgctggcttcttatccggtgatgacgtacatcgtcgggcgcgaggggttgacatgggctttttatattccgtcgttcatcggcggcacgctgattggcggctccattgcgttcgtgttcctcatggcactgcgccgcaacggactgcttgcaaaattccagcatgatttgggggcgaaggtctatgacaccacagctgcaaaacgcgctgctcaaagcgcgaaatgatctgcgtgagacggcgccgctcatccactgcatcacgaatccgattgcaatcaacgactgtgcgaacgggatcctcgccgtgggcggaaagcctatcatggcggagcatcccgacgaggtggaggaaatcacgtgcatagcgggagcgctcggcgtaaacatcggcaacatcacagacgcgcgccgcacctccgttttgacgagtgccaaggcggcgaaaacggccggcgtgccggtctcttttgacgcggtgggcgtgacgtgcagcgctctgcgccgcgacctgacgcacacgctgctgcgcgaggcctgcccggaaattttgaagggcaacgacgcggagattcgcgccattgcgggcgcacattttgaaagtcgcggcattgatgttttacggacaaacacggcggaaacgattgaaattgcaaaaatgctcgcctctaccctgcactgcgtggtgcttgtcaccggcaaaacggacattatcacaaacggcgaaacaactgtgctgtgcgaaaacggcacaccacgcctgtcgctcgtcaccggcacgggctgcatggtacacgcgttgtgcgcttcatacagcgccgtgacggatccgtttacggctgcggttttagccgtttccaccatgggcatttgcggcgagctggccgaacggaaatccaaggggctcgggtcgttccgcatcgcgcttttggacgtactctcgctgctttcggacgatgattacacgcgtttattaaagctgcgcgaagtttaaaagaaggagtttttctatgaaattcgatcctaccttataccttgtgaccgacagcaccggccgcacggacgatgactttctttccatcctcgaaaaggcactcacgggcggtgtgacgctggtgcagctgcgcgaaaaagagcgcggcggcggtgaatacctgcgccttgcgcgccttacaaaagctgtttgcgaccgctaccgtgtgccgcttatcatcgacgaccgcgcggacatcgccatggcggcagatgcggcgggcgtgcacgtaggtcaaagtgatctgcccgtctgtgaagtgagaaagcttttaggtgaagataaaatcgtcggcgcaacggcaaaaaccgtggagcaggcgcagaaagcgtaccgcgaaggcgcggactacctcggcacgggcgcaatcttcccgacgaccacgaaggtgaaaaccgtgctgacgccggtttcgcgcctgaacgatgtctgccgcagcgtgccgatcccggtcgtggccatcggcggtttaaatgccgggaacatggatgttttgaatggcagtcccattgacggcatagcggtcgtttcggccatcatgaagagtgcagaccccgaagctgccgcgcgggagcttttcgcgcgcgtgcgggtgattcaagagaataaccgctgaaagccatagaatgctgcactttgtgctgatttcacaaattgaaacgacatttggcggtgaaatcttttccgaaatgacacacggtttttacgcgcggtttattgactctgcgttttaccggtagtatgataatggtagaaacaaaattccctataatttgcgtacaagccccttttcataaatccacaccttaaacgaaaaaatcaccgagtttttcctcggtgattttttcgttataaagcgtcggcaaaaagatttttcgttctttttgccgtcgctctctgtttattcttaaaaacttttacagcgtaaacgtatacgtgcccgcggtgagcgtcatttcttccgtggtaccgtcttttttcggcagatagacttccgcttcggcgtcaaacgggatgacgacggtgtacgtcacttcgccgttatcctcgtactgccagccggtttcatagtagcctgcggcggtattgaccttagcttttgccgcgccgagtcttacatcgggctgcgggcggatgacggcctttttataaccgggcacgtccggcacggggttcaggccgcagacgttcttatacacccactcgaacaccgcgccgtaagcgtagtggttcatggagttcatgccgatgccgctgatcttaccgtccggattgacggagttccagcgctcccagatcgttgtggcacccatgttgacctcatacagccagccgggattttcctcgttcaaaagcagcgtataggcttcttcattcgcgccgttatcggagagcgcgcggcacagcacaggcgtgccgaggaagccggtcttcagcttgcctttattcatcgcgagcaggccgcgcagggtttcggtgatcttctcgcgcgcgaactccggcgcaagcccgaatgaaagcgaaatggcgttgccggtctgcgttgcggccgcgcatctgccgcccgcggtgtaaaactcgcggcggatggcgtcgagaatttcgtctgcacgctttttgtagacgtcgtactcggtcgttttgccgagcgcgcgtgcggcgtttgcaacgcacatggtgctcttatagtagtaggcggagcacaggaatgtaatgtccgtgccgccgagaacagactcgggattgaagccggattccgggccgtccagtgcgagccaatcggcaaagtggaactcaatgcccggccacaggcgtgttgcgccgtgcgcttcgtcgtagcggtagatccaatctgcccacagcttcatgctctcaaagccgtttttgagcacgctgatgtcgcccgttgcaatgtaggtttcccaagggacgatggctgcggcgtctgcccagccgcagtgaccgccgccgtttgcgagcattgggtttgcttcgcccggcttgcggctgatgagcagcggggcgacatccggcaccttgccgtcgaggcgcttctgttcctccaaaaggtctcggatatacttcgtatagaacgcgccgcaatccatgttgtagttcgccgtggggcagaacgcctgcgcgtcgcccgtccagcccatgcgctcgtcacgctgcgggcagtcggtcggcacgtcgaggaagttatcgcgctggctccagacagagttcaagtacaggcggttgaccttttcgtttgcggtcgtgatctcgccggtctgctcgaggtcggaataaagcgcccacgcctgaatatccgtgatgccggtgaggtctgccacgccggagaatttgatgtagcggaagccgtagaaggtcgcaatcggtcgaataaaggcttttttgcccatcgaaatatagcggtactcggaaagtgcggtgcgcaggttatcgcgatagaagcagtcatcctgcaacagctcgccggtctgcacgcgcagctcgacacctgcgggcaggtcggccataaacgtgaaccaacccgtaatgttctggccgaggtcgaacacaagctcgtttttcggcgtggtgatctgcttcggggtgatgatatgcttcgcttttacgggcagcgagaggcgcgcggaaattgcgccgaggttcgtcgtggtgttgcgcttcaccggctgccaatttgcataggtgcaggacggcgcgcaccagttttcgatttcaaggttcgcatcgtagcgctcgccgtcgtagatgttgccgaacgtcagcgggttcggagcgcactgccagctttcgtccgtgacgatgacggtctcgccctgcgtggtggtgacgtgcagctcaccgaagagcaggtattcctctgtgtacatattgcagggttttcccgggaaattcgtttcgtaatcgccaacgacgccgtcaaaaccaaagcggcctttcgcccagccgttgcccaaaatggcaccgatgacgttttcgccggtgtgaatgaggtcggtcacgtcgtaggtctggtactgaatccagctgtcgtaggcggtgcagccggggacaagatactcatcgttcgccttttcgccgttcaaatagagctcgtagatgccgagacccgtgaagtatgcgcgggcagagagaacttcgccggtgatttcaaacgcgcggcgcatgtacggggcggtgtccggcgcaagacacggagaaatacgctgtgccgtgaatggctcgtcgagctttgcggtctcgaaccacgcagtgtcgcttgtgaccgtctcaccgttatcgcccataacggtaacgcgccagaagtagcgcgtgcggggctcgagggcgatttccaccggtacaccgagggacgacgcggttttgcacgcgccggtatcaaagataacgtcggcaaaatcctccgttttggaaacctccacgcgcgcccaaagctgctttttcgcttcggtatccgtgactgtccacgagacgtgcggcgttttcagatcaaaaccgagtgggttgacgatacggtttgttttcattctctgaattttcatgttccgttcctttctgtgcgtttgcacatgcggctttttcctttgccgctttgtattccggccgcgtaaagctgcggcattttgttctatttcacagaatatcagatatgaagataaaaaacaaggactcaatttccgcaaaaatacgtccttattttcagtaattgcatgcgaagatgttgaactaagccgttttcaaaagttcttatcggttagccgcgactttagcttgacacgagtctatatttgtggtttaataagcaaacaagattatcggtgcagcaaagcggcactgcgataagggagtagtcggcgcgaagcgctgtatggtcgacacacttgaggaaactcacggctatgcatgaaatgacgagacttatccgaaaggcatctccggcttttcgggtgagtcttttttattgcccgcgcacgtatatttttataacaaaacaacggaaaacggtgattaaaatgagcttatgggaactcttcattctggcggtagggctttcaatggacgcatttgcggtttcggtatgtaaggggctttcggtgaaaaagctgaaagcgaaacacatgctgattgtgggtgcctattttggcggatttcaggcactgatgcctcttttagggtacattttgggtatacagttccagtcaatgattcagcagttcgaccactggatcgcgtttgtgctgctggtgctgatcggcctgagcatgataaaggaatcgcgcgaggaagcggagagcctcaacgattcgttccgctttaagacgatgctgccgctcgcggtggcgacgagcatcgacgcgctggcggtgggcgtaacgttcgcgtttttgcaggtcaaaatcgtaccggccatcagctttatcggcgcaacgacgttcattctttcggcgatcggtattcgcatcggcaacattttcggcgcgaagtataaatcgaaagcagagcttgtcggcggcatcgtgctgatcttgatgggtgtgaaaattttgttagagcacctcggcgtactggatatgattttcggttaagaaccggaaacaagaaagcgccccgcttccttttatggaaagcggggcgctgttttgttttaatttacgaactaaagtaacccgttaaattacttctttgcgtcgtagtaatcctgatatgcggtgtagccctggagctcgatgttcgatgcacgcttatcggtgtagatcttctcaatgtcatgaacctgattggactcagcaaagtctttcagatcctgaacgagcttatcgaacgttgcgtcgtcggaagccatgatgatctgcgggatacgcatcttgcactcgtcggtgatagcctgtcttgccataccgaggtcttcggtcggatcaatctcaagagagaggccggtgttttcgtcggtcaggaacttctggccggggattgccggatggatggaatcttccggagtgaagacgtgatcctgaatggagataacccagcttctggatccttccggctgctgctcgttaactgcatactttgtaaggtcaacgttgtcggagtgagccggctgagaccagaaccagcaacctgctgcgttcttttcgtcagaggtgagctcttcttccggcttcttgaggatcgggttgccctcttcgtccttgccttcccagaggccgccctcaggaccgtacatcatgttgatggagccgtccttcgtgagcatccaagtatagaggtcaaagatacgctgcgggttttcagcctttgtggtgatgcagttgacgttccaaccaaccgtgccgccttcttcgccgtagacatagtcaacgccgtcagctgccgggtagatcggagaatccttaagctcccagccgaggaggtcataggtgttgccgtccttctcctggaggagggtacggaagtggttcgtatcgtcctgagagaagtcatagtaggtaatagctgcacggccgttggaaagcttctcaacgaactgatcgttgctgtcggtgtacgtggtctccgggaagaggccttctttataccactggttagcaatcttcagagcggagatgtagttgtcatcataaacagccagcttaacgtcgttatcagcctgagaccagtatgtatcaataaggttcgggttgccgtaggaacgatagatagcggaaacggtgtagaagccgttatcgtcctgtctcgggagccacgggaagatgctctgatcgtcggaagtcttaacgcccttttccttagcatccagcatgaactggtgcaggtcttcgagcgtcttgagctccggagaaccgagctgctcataaacgtcgtggttgaccatccagctcatgttaccgccggttgcgcccttacgagcccagttcgggataccatagagaccgccgttaacggacagcagcttctgggtggattcgaggatgtcctcatcgaaggagcagccttcatacttcaaggtgttgatatcgacgagcttaccgaggttgatgagcttcagccagttcgcgttacggtcgaggatgataacatccggcaggtcgtcggaggagatcatcaggttcagtttggaatctgcgtcagcttccgggcaggaataattgaccttaatgttgaacttttcgttcatgtacttcgatgcagcgtcttcgccccagggtttaacggaaccctgatagctgtaatacgcatcgaactcatacggttcggtggtatcgtccgggccggaggaaccggttacctcggagcttgcgtcaccgccgtctgtggattccgccgcggaagattccgttttggaagatgtgctgctttcagccgtggaagagcttccgccgccgccgcagccggctactgtcagaatcatggatgctgccatgactgctgccagagccttcaagagagagtttttggacttcatactttgcctccttaaagaatgcttcgtcaatacacctgcattgacaatttattttatgattagcccttaacggaaccgatcataatgccttttacgaagtagcgctgcaggaacggataaacgatgatgatcggaatgatcgtaacaaacatcgtagccattgtgatggagcgcacgttggtctgcttgcccttcaaagcgttgccgtcgatggtgacgcccatgcccgcagaggacatctgttctgcgaacttcgcttcgttgacgattgcaagaaggacgttctgcatcggcttcaggtaatcctgtgtaatgtacaggtttgcctggaaccagtcgttccagtgctgcacaccgaagtacagggcaatcgtcgcgatgatcggtgtggagagcgggaagtaaattttaaagaagatggttatgtagtttgcgccgtcgatgagagcggattcttcaagcgcttccggcagagactggaagtagctgcgcatgaggatcatgttccacaggttgacgagtgccgggatgatgtacacgaggaagttgttcttgagaccgagattgaggatcaagaagtaggtcggcatgaggccgccgccgaagtacatcgggataagacacagcattgcgtaaacttttttgcctacgaggttcgttctggaaattgcgaacgccagcataccggtaatgagcacgccgccgaccgtaccgatgacggtacgtgcgatggtgatgaagtacgccatccagatcttctggtttgtgaaaaccagctcgtagtttctccacgtaaacttacgcgggtagatggtcaaaccaccaagggtggtatcgttggaatcgttcaaggaaatcgcaagggaattcaggaacgggtacagcgtaaggacaagaaccagaacgatggtgacgatcatgatgatatcgatcacgtagtcgctggccacgcgcttggcgcggattttgttcggattttttgccatctctctgttccccccttagaaaagctgtgcttcgccgaatttacctgctacgtagttggaaccaaggagcagtgcgaagttgacgatggacttaaagagaccggccgctgctgcgaaggagaaacgaccctggctgacacccaaacgataaatgaaggtatcgagcacgtctgcgtattctttcaacatggagttgcccatctgcttggtgagcatcatgatctggtcgaagtttgcattcaggatgccgccgacctggaagatgaacatcaggatgatggtcggcttgatggacttaattgtgatatgccacatcttctgtgcgcgcgttgcgccgtcgatatcagccgcttcatacatatcctggctgatgctcgtgatagcggagatgaagatgatcgcgttccagccaagctccttccagatatccgtacacaatgtaatgccccagaagtacttgccttcggtgaagaagccgattggttctttaatgacgccgatccacatgaggaactcattgatggcgccgccgtcggtggacatgaggtcaaacatcaacgttgcacatacaacccaagagatgaagtgcggcaggtagctgacggtctgaaccgtttttttcagcggctggaagttcatttcgttcagcagcactgcgaagagaatcggcagcgggaagccaatgaacatcttaagggcgctgatgaccagcgtgttgcgcatggccagtccgaagtacttatcggcgaacatggtctggaagtgtttgaagcctacccactggctgaagcccgggaaatcaccgagctggaaatcctggaagcccataaccacgccgtacatcggtacgtagctgaacaggaggactaagaggataccgggaacgagcaaaatttgcagatcccactgggcaagcattctggaaaagacgttctttttgcgtaagaccgtatttccactcgcttgtgcttgtttcaatctcatcacgctccatttccacaaaagatggaaaattttttacaaaaagcagaactcaaagcctgcttaaagccaaaatttttttgaaacccgactgccttttgcagttttacggttttctcgtcgaaagccctgaacgatgttcggatggtttccaaatttgtctaaatctccgcaacaacttcttcaggaattgttcatattatacacacgcatttgtaacaattcaaggacaaattgtgcaaagcatattgacaaattatgcaaaccgtgtacaatataggtacaaaaggtaaattttatggtgaagttggtgggcatatgttacaagacactatcttagacacacaaaaatgcgagcatgaaaccgcatccattttgaacaattttactatagccttcggaaaggtgcattggggcctcccggatcttgaaatattcgacagtttatttgaagatcagcagttcttgctgctgctctgcacagagggcaaggcaaaggtcgagttgaatcatcacatttcgaatatgcttccgggaggacttatttgcgtgcgcaaaagcgatgctttccactttgcggaatgtgaaatgcacgatatgcagtttttgtggctgccctttacctttaagcgcatttgtgaatgctcctgtgccgatgcggcggtgctgaacgattttctttgtggaaaattgagcgctgttggttatgatgaacaacttgtcgattacagcatgttcctgaaaaagcgcatttgcggcggcaagcgttgctgccttgagccggtgctctccggctttatattagattgtatattcgccttggcgcaaaaccgtgaggcgctttctgaccgcgagaagcttgtggcctatttaaaagagcatgcaaaggataaaatcagcgtgccggagcttgcaaagatgatgtccgtttccgagcgctcgcttttctatttctttaagaagaatttccagacctcgccgaccgatttcatcaactgcgtgcgcatgaacgccgccgcagagcacatccaccgcgggttatccgtgaaagaagtgaccgaaatgtaccacttttctgaatcttctgcgttctgccggttatttaagaagtacttcggcatcacgccgacggaataccggcagctggcagagaaatcgcagctgaaaatcgtctcgcgggacgagctgaaggattaaccgtatatctttcacgcgatccatagataacaaaacaccgcccgttcggaaaagctccgagcggacggtgttctttatcttatattatattgtattcgatcagtcaatgaccttgttgtcgcgatccggaacaatcttttcaaggaactgctctacggtcatggcgccgaggtcgccctctttgcgcttacggatagagatggtgttgttttcgatgtccttatcgccgacaacaaccatgtacggcaccttttcgagctgtgcttcgcgaatcttgtagccaatcttctcgctgcggtcgtcgacctcgcagcggaagcccttgtcttccaactgcttcttgacttcatagagatagtcgaggtggcggtctgcgatgggcagcagcttcacctgtaccggggcgagccacagcgggaacgcgcccgcgtacttttcgatgagcaacgcgagggtacgctcgtagcagccgatggaggtacggtgaatgatgcacggggtcttctgcttgccgtccttatcggtgtagaccatgccgaactgctcagcgagcatctggtcgatctgaatggtgataagcgtatcttccttgccgtacacgttcttaatctggatatcgagcttcgggccgtagaacgcagcttcgccgatgccgacctcgtacggaatctcgaggtggttgaggatgcgctccatgaggccctgtgcctcgttccactgctcttccgtaccgatatactttgcgcggtcattcgggtcccattgcgagaagcggtaggaaacgtcctcatacagaccgagtgtcttcagcatgaagattgcaagctccaggcactttctgaactcgtcttccagctgctccggtgtgcacatgaggtggccttcggaaatggtgaactggcgcacacggatcaggccgtgcatctcgccgctcgcttcgttgcggaacagtgtggaggtctcgttgtagcgcagcggcaggtcgcggtaggaacgcttgcggtttaaataagcctgatactggaacgggcaggtcatcgggcgcagggcgaagacttccttgtccttctcctcgtcgccgagcacgaacatgccatccttataatgatcccagtgaccggagatcttatacaggtcgctctttgccatgaacggggtctttgtcagcagccagccgcggcgctgctcctcgtcctcgacgaagcgctgcagaagctgaacgatgcgtgcgcccttcggcagcaggatcggcaagccctgaccgataacgtcgcttgtggtgaaaagctccagctcacggccgagcttattgtggtcgcgcttcttggcttcctccagcatggtgaggtgctcttccagcaagctctgcttcggaaacgcgatgccgtagagacgctgcagcatcttgttgcttgcatcgccgcgccagtaagcgcctgtgatggaggtgagctttacagccttgacattgccggtgcgcatgaggtgcgggcctgtgcagaggtccgtgaaatcgccctgcttatagaaggagatgtgctcgccctcggcagcgtgctcacggatgagctcctctttatagtcctgacccttcatgagctccagtgcttccgctaccggcagctcgaaacgttcaatctcgatgtcttccttgatgatcttcttcatctcggcttcgatctttgcgaggtcgtcgttggtgatggcctgcggcagctccatatcataatagaagccgttatccacagccgggccgatggcaaactttgtgcccgggtacaggcggtttaccgcctgcgccatgatgtgggacgcggtgtgccaatatgcctttttgccctctttatcgtcaaacgtcaaaatctctaccttgcaatcttcgttgagcacggtgcgcaggtcgcacacctcgccgttcacttttgcggcacatgcggacttataaagacccatgccaatgctttttgcgacttccgctacggaaacgccgctttcaaattccttttcgctgcccttcaggtcaaccttgatcatgattctcaatcctttcctaattctctgataaaataaaaagccccgggatccctcaccgggatctcggggcgacactgcgcggttccacccgagttcctgcgtgttaaaacacacttgtgttaacacacagctcgttcttccgccttaacgcggcggcaacgtccgccttttcggtaaaccgttcggcggcggctcaaaggtggtatttcggtttcgctttccgcggtgctttcagccggtggcaaccgctctcttttgaaaagacctgaacccgaacttccttatcaaagcccttttcttgtccccatactatcaccgtttttctgaaatgtcaacacccagaaaagagtttttcacacaaattcgcaaatatctatcatcatagacaataaaatatctatttacgcatacaatttgcgtagaggtgatacacttgctttgggaaaataatattgtggggcaaacaacacggtctgtgcgcaaagcaaaaggcatgtcgcaagaggttttaagcggctttgcgggcatcgcgcgcacgcatctgacgatgatcgagtgcgggacaaagcaggcgaatttctcgacgatatgcaagattgcggatgcgtttgatatgcgccccagcgagcttgtccgcaaaatggaagaagcggaagaaaagcgggataaatagacccgcagaaaaaatttttcttctaaaaagcaaaaaaatcggcttatatactgggctcttgtataaaacagaaagaaaccgtaactatttcttaaattctttggttgacatatgcaaggaaaagagataaaattgtacatggagtgttttacactttttaagtcagccgtgttccgagcagtttatgcggctgctttttgtgtggagccttcacagggaataacgcaccctgcataacctaatttagtaattgaatatcgaaaaccttagcgaaggaggtgcccaatgccacaagtaccaatttgggtttgtgttctgatcgcagtgttggcagccgccgtgtgcggtgctgtcgctttctttgcgggtgtgaatcatcgaaaaagagaagcggaagctgccatcggttcggcagaagacgaagccaagcggatcatcagcaacgcgattaaaacggctgccgcaaagaaaaaggaagccgtgctcgagggcaaggacgaaattcaccgtctgcgcaacgagtccgaacgcgagatgaatgatcgcagaaaagaaattcagcgccaggagcgccgcgtttcccagaaggaagaatctttggataaaaagatggaaaatctggaatccaaagaaaacgcggtcgaaaataagatgcgcaaggcggaggaacgcctgaaagaggcagaatccgttaagaaaagtcagatcgacatgttggagaggatctcttcctttactgtggaccaggcaaaagagtatttgctcaagttacttgaggatgatcttgtgcatgaaaaggccattaaagtaatggagtacgaacagcagacgaaggaagaatgcgacaagctggcaagagagatcatttcggtcgccattcagcgctgcgcggcggatcacgtatccgaagccgccatcagcgtcgttccgctgcccaacgatgaaatgaagggcagaatcatcggccgcgaaggccgtaacatccgcgccattgaacagcttaccggcgtggatctcatcatcgatgacacacctgaagccattacgctttcgagctttgagcccgtaagacgtgaagtggcaagaatcgcccttgaaaagctgatctcggatggcagaatccacccgaccagaattgaggagacgattgagaaagcccgccgcgaagtggatgcgaccattaaagccgagggcgaacgcgccgtgcttgctgccggcgtaaacggcattcaccatgagcttgttaagctgcttggtcggctgcgttaccgcaccagctatggacagaatgtcctcaaccactctctggaagtttcttaccttgccggtatgatggcttccgaactgggtcttgaccccaccattgcaagaagagcaggtttgctgcatgatatcggcaaggcgctcgaccacgagattgaaggctcccatgtggagatcggcgtggatgttgcaagaaagtacaaggaaagcgaagccgttatccacgcaattgccgcacaccacggcgacattgaagcgaaaacggtcattgcctgcctagtgcaggcagccgatgccatctcggcagcacgccccggcgcgcgccgcgagaacatcgaaaactatatcaaacgtcttgaaaagctcgaggccgtggctgcatcgtttgacggtgtggatcgctgctatgccattcaggccggccgcgagatccgcgtcatggtaaagcccgaagtgatcaacgatgagaaaatgacgctgctcgcccgcgacatctgcaagaagattgaggaagacctcgaatatccgggtcagattaaggtcaacatgatccgtgaaagcagagcggtcgatttcgcgaaataacatagttcgtcacaacgctcaaccgaatcacaagcaaagccctccgggaggaatctcggagggcttttgttatgtaaaaccgcgcgtcggtgagttctcccccgcctcggcacgcgattttgctgtaaaaaaagcaacacctcttaacctgccgacaagatcaagcataaatgctcggattttcggtgctacggtcaaaaggtgttgctttgcaaaatgcagttttaattgtgtactgaaatttgtgttagctttgataaatggggtgcacgaaatatgtgtaaaaaattcacattttgtcgattaagacgcattgtccatctgcaaacacagtttatcggaaatcatggcgatgaactcgctgttcgtgggcttgccccgcgtattgtgaatggtgtaaccgaaatacgaattcaacacatccacatcaccgcgatcccaagcgacttcgatcgcatggcgaatggcgcgttccacacgggagctcgtggtctcgtactgctttgccacactcggatatagctgttttgtcaccgcattgataatctccgggtcttcgatggccatgatgatggaatcccgaagatagtggtatcccttaatgtgggccggcacgccaatctggtgcaggatctccgtgacctgaatgcgcaggtcgctgcggctggtgccgtttgacggatgctgtgccgcaccggccaacgtaaagatgcggtcgatgatctcggttttgctgaacggctggatggcgtaataatctgcgccggcctccatgatctgccgctctaaagcgtttgaggaatacgctgccgtgatgataaacaccggctttggcagtccctcgactttcactgcgtgcataacgcccagcgcatccacgcccgccataaagagatccattacaaccacatccggtttttcatcccgtattttggtcagtagcgctgttccgttcctgtttacggtcacaacctgtgcaccccgcgaagccaatgcgtcggtgttttcacggttccattcgccgtcatccgcacaaatgatgacctttatttgcttttccatggcttacctcctgcgtgatttaaattgtgaacaaattttaccatatcatacacgctatttcaagagggtaaatgaaatttctttaatttatttgtttcctaacaaaaatatgtaacttgattttgttagctttcatcacgctttcggttgatacacttctaatttcgacaaaaatcagcagataatcaaatatttttattacagccaatatttcggcgagtttcttaccaaaaagatgtataaaacagaacggaaaccgattctgtaagattgtgtcataccttctgtgagaaacatggcaatgcggcgcgaaaaagggacgcgtgcgccgcagcccaccgtccccctcgtcttaattttcgttcaggttttcgagcatcgtttcagcaaaaataccatagccgcgtgtagcatcatctacgaaaacgtgcgtcaccgcaccgaccagcttaccgtcctgcaaaatggggcaaccgctcatgccctgcacaatgccgccggtacgtgcaagcagctccgggtcggtcacgtgcagcacaagggtacgcgtttcctgcttgccgtctgtgctgacgcgctcaagctccgcatcaaacagccgcataccctcatcgtcgatcgtggcggcgatctgtacggcacctgtatgcacatttccgcgcggcagcacctctacggtctcgccctcgtgcggttcggagagtttgccgtaaagcccaagctccgtgttctgcgtcagcgtgccaaggctcttgccgcccgtaaaatacccgcgcaggcggcccggccgaccgctgctgccgcgctcgatgccgcagacggaaacggcagccggctcgccgctgcggatctccaaaacatcgcgcgtgtcggcatcgcaaatgccgtggccgagtgcgccgaacgctttgccgtcttcggtgtaaaacgtcacggtgccaatgcccgcagcgctgtcccgcacccacatgcccgctttgtacgagccctcgcacaaaacggaagtaacctgcgccgtgaacgtttccgtgccgcgccgcagcgtaagcgtgttcgtttcgttttcggaaagcacagcggaaagcgccgcgttcgtctctacgttattgccgtttacggaaaggatataatcgccgggctgaatgccggcttcgcgtgcagggcattttaagccaccgtctgcataaatttccgaaagtgcggcaacaataacgccgtccgaaaaaagttttatgccgaaaacatcgccgccaagctgcactgtacgcactgtctccgcttctgccgtgatattggaggtggaaacggcgtgcgccgctgcgttttccggcagcggcaaaccgatgagcccgcacacggaaagcatcagtaaagccgccgtgcccacgcttgccgcaaatgtgcggatgccctcaaaaagcgagatgtcgcgtcgttttggggcgtgcggttgcggttcattttcaaaattcaagttttctcatctccttgcagaaaaattcagaaagctcaaacgagccttctgtttttacttttccacgcggagagaaaagtatttgcggcaattaaaaacacctttgcacaacgaaggaaatcgttacgcaaaggcgatcgtttttggtctgccgcactgccgggctcgcagcacccggcagaggacagtagggtaaaaaaaggggtaatatcggaagaaacgaactgtttccgattttcggctccgcgtaaacgctgtggggaagcagcgcccggctatcgacccggtgcggaacgttttaaagaaatgaaggaagtaaaaaatgaagaagtttgtaactcattcggttctctcttgttcctcctgagtacattacgtagtatagaggaagaatatgaaaacgaaattgatatttcgtgaaaaaaagagaaagtttttttgaaaaacatgtgaacaaaaaaggccgcatactccacaaatttagattgactttcggcggaaaagctgttatactttggatagtgtaataaacaatgtcaatgtctcacaggttttctttgtaagtcattctttgggtggtttacaggacctgtgtttttttgtatggcgtttacgaacacaatctttatttttatatggaggtaccacaatgaacaacggtacagtcaaatggtttaacgcagaaaagggctacggcttcatctccaacgatgagggcggcgaggacgtattcgtacatttctccgcaattcagggcgacggcttcaagacgctgaacgaaggccagaaggtcacctttgagaccgagaccgacccgaagaacggcaagctccgcgcagcaaatgtcgtaaagctctaattgtaaattagaacagcgagataaaaggtacctgtgattgatttcaccggtgcttttttcttttgcataagcttcgcttttcggcgcacaatactgtgggaaggaagggatgccaaatgcaaaagaaaaacgaaaagaagttcacccacggcgagcatgtgacgatttaccctgatgcgccggagagcgtcgcaagcgccacggagtgcaccggcctcatgcccacgccgccgcaaaacgacgcggagtttacgtcgtaccaagacctgcacagcatggagatccccaaaaagctccccggcaagcggaacttcgagcttggcgtgtacgacgataagccggaagatattcagttataaaaagtcagcctcatcggtcggattcggcgcgatgaggctggttactttttagctttatattcgcttgttttactcttccagctgtgcggtataaagctggtagtagtggcccttctgttccatgagctcgtcgtggctgccgctttcggcaatgcccttattcgagatgtacaggatgcggtcacaatttttgatggtggacaggcggtgcgcgatgatgaagcttgttctgccctttaaaagcgcctgcaagccttcctgcaaaaggcgctcggtcttcgcatcaatggaggacgtggcttcgtccagcacgagaatcttcgggtcggaaagcaaagttcttgcaaacgcaataagctgcttttggccctgcgaaaggcgcgagccgcgctcgtttacctgcgtatagtagccatccggcatttcgctgatgaactcatgcgcacgcacggtctttgcagcggcgatgatctcctcatccgtggcgtccaagcggccgtagcggatgttatccatgatggtgccggagaaaatgaagctgtcttgcagcatgatgcccatttgcgcgcgcagcgagtgcagcgtcaccttggagatgtcgtgcctatcgacgagcacccggccggaattaatgttgtagaaacgcgagatgaggttgacgaccgtcgttttgccggcacccgtgggaccgacaagcgcgatggactcgcccgctttcacatcgagattgaagtgctccagaacgttgatggagccgtcgtaggagaatgtcacgtcgtcgaacgtcacgtcgcccttaatcggcggcagctccgttgcgtccggcgcgtcatcgacaagcacgggctcatcgatcatctcgaagatgcgctccagatacgccacggcgttgatgaacgtattgtagaggttggaaagctgcaaaatcggctgccagaagcgccacgcatacgcggaaatggcgatgagcgtaccgatttgcacggcgggacccaaaagcgagaagcccacaaggtacatagcgccaacgacccatgtggagatgttgttgacggaaaaccacacgaggttcgaggtgtactgcgccttcatccagcttttgtacatcttggtgttaagattattgtagatcttcgcattttcctcttcacgcgtgaacgcctgcgtgatcttcataccgtcaaggctctcatgcaggtaggcgttgaggttggagctcttattggagacatcctgccaagcgcggcgctgtgcaggcttgataacgagcacgatgatgaggaacagcgggatgcccgccatgacgacgagcgagagcctgacatcacacatgaacatgaacacggcgatgagaatgaggttgaaaatttcgagaatgaaattgatgatgccgttggagagcgcatcggaaacagagttcacgtagttgatgacacgcgtcagaattttgccgtgcgggcggtcgtcgtagaactggaacgaaagccgctgcaaatgctcaaagagatccttacggatgtcgtagatgatggcctgccccaccaccgtcatgtagcgtgagcgcttgacggaaaagaaaatagaaagcagaatggataagagcatgatgcctgccagaatgaacagcattttataatcgcggttcggcacggcgacgttcagggcggtctcgatgagcttaggacctacgagcgcgcacgcggcggaaatggcggagaaaatgagcgataagatcattttctgtttgtgccgcttgatatacacgcctgcacgcagcaagtgtttgatattaaatggggtttccagcgtttcgtcaacgtcaaaacggtttcttgccattacgcagcaccccctttcttttcaccggcaatgccgttttgcagctcataaacctcgcggtaatagcccgggcgggaaatgagctcctcgtgcgtgccgacatccacaacgcggcccttatcaaggatcacgatgcggtccgcgcgcttcgtggtggaaatacgctgcgcgacaatgatcttcgtgcagtcgaaatcaaggtgcgcaagctggtcttgaatatatttttcggtctccatatccacggcggaggtggtgtcgtccagaatgagaatggacggcttgatggcaagggcacgcgccagcgcgatacgctgcttctgaccgccggaaaggccggtgccgcgctcgccgataaccgtatcaaagccttcgggcagcttatcgacgaaatcgacgcaggcgatctttgcgaagcgcttcacatcgtcctcggacatttcggggtcgccgtaggcaatgttgccgtctacggtatcggagaacaggaacacgtcctgcgtggcgataccgacggagccgcgcagctttttgagatcatacataccgacaggcgtgccgtccacggagacggtaccgccggatacatccgaaaagcgcgggataaggctgataagcgacgttttgccgcagccggttggtcccatgatggcgatggtctcgccgggtttgatgtcaagattgatgtcgtgcagaacctctgtgccgttgcgctttaaggttacgtggtcaaacttcacagcgccctgcacgcggccttccttcttcacggcatcctggcgcgtgacgatggtggagcgcgcgtagtagagctcgatgaccttcgacgcagaggcaaagaaacgctgcaggtcgttgatgagcatgccgagcgtgctcatcgggttcgtcagcgtccaacacagcgagttaaagagtgcaaacgtgccgattgaaatgcggcccatgatgaggaacgagccgccgacgagcagaacggcgatggaaagcgactgcgaaaaaccgtcgatatacggcgagaatttgaaccacagcagcgacgctttgaggttcgctttgcggtaatcctcgtttttcttatcaaactgctcgatctcgtagtcttcgcgagcaaaggctttaacgacacggttgccggcgatgttctcctgcgcggcggtgttcatgcgcgaaaggcgctcgcgcaggtcgacatacagcggatgcacctgctttgcgaaaaccttcgtcaggatgaaaataatcggcgttacggccagcatggcaagcgcgaacagccagtccacacaaaggaatgtgatggatgtggtgagaaacagcaccacgcagtcgatgatcatgcggatgacatagcacgtagtgtggcgcaccatgtcaaggtcgccggtcaggcgggtcatcagatcgccggtgcggttctttgagaagaatgagctatcctgtgcctgcatgtttgcgtacagatcgcggcgcagcttaaagagcagcttctgcgagcacgtctcgtacgtcataaccgaaagatagttaaagcacattctgaacatcgtgaaaccgatcagaatggagacgagcacaacgagccgatgccaaagctccggcgtagtgccctgcccctcttttaccggcgtaaatacggtgtccatgatctgcgcggtcaaaaccgagttgaccagcgccatcatagaaagaaccgcggtagagcacagcgcgaaaacatatcgctttcggcagccttccaggtttttccaaacccatttcagctgaaacatagcgttccctttcctttcaatgcatatcctgctttctttgtacccttggtacagttgtacctttggtacagtccgcaccgtacgtgcggtttcctcctcaggcgcatggaatatttacacagaaacacttcatacgcttgtttagactattataactgtattctgttaaaatggaaccctttttcgcgattttctctccgtgagaacaaacaaactttggttgagatttttaggcaataaaacaaccccgcaaatcggacttttcatccgtttgcggggcatgctctatatgcttttattatatatagtatacgtacttttgtaatttagatttcaaagaccgtgtaggcgtactcggcttcttcgccgggctgcaaagtgcgcatgccgtgcttcttttcaaacacgtcgtcctcctgtacggcggtggcgcagccggtccacggctccagcgcaacatacgggccgtcgtttgcggcagaccagataccgagcatcgggaagccggaaaactccatcatcacaccgcggccggactggcggcttttgagcgaaacgcaggtggagttgaggttctcgaacacgagcgcgtccctatagaacaggctgtgctgcagcgggatggtatccgtatcgtcaagctcgaagttcgtcttctcaaaatcgatcaggcagctttccatatcgagcgtcgggcatttctgctcttccttttcctcgaacacgatgtcgtaatcctcaaaaacttcatcggactgaatcgggatattaaagcccgggtgaccgccgatgcagaacggcatgggcttagtatcggcatttttaacggtaaatttcgtcgtgatgctgctgccggtgaggtaataggaaaccgtcagcacaaaatcgaacgggtactgctttttcgtctcctcgttcgccgtaagctgcagggtgacgtagtcctctccctgctctgtgacggtgaattcctcgtggcgtgcgacgccgtggcgcttcatctcgtaccactcgccgttgatgcatgtgcggttatcgcgcagcgcgccgacgataggaaacaaaaccggcgcgtggccgccccaatatgttttatcgccctgccaaatgtgctcaaagccgtcatcgcccataaaggagacgagctcggcgccgagcgtatcaatggcggcagtttcgttttcgttttttatgtggatcagcataattcgtcctttcaaatcgcggcgcttttgcgccctgtctttttgcatgcacataacctgattttcaatcaacagtattataacaaacaaaaccgcttgaagcaagagcgaaagcctgctataattgagaaaacaccgaagaaatctcccgttttatcggtcaaaatccaccaaccggaaaggaatttacaatatgagagcagttattcagcgtataaacggtgcagagatcaccataaacggcggcgagacccgccaagtcggcgagggcctcgttgtcttcatctgcgccatggagggtgacacggacgcgcaggcggattttctcgtgcagaaggtgtgcggcctgcgcgtatttaaggacgaaaacgacaagatgaaccgctcactcgaagacatcaagggcgatattctcattgtctcgaacatcacgctgagcgccgatatgaagcacggccgccgcccggatttcagccgttccgcttccccgagtgaagctttgagattatataactactttgtggaacaggtgaaaaaccagcctatcggcaaagtatgcacgggtgagttcggcgcgcacatgcacgtaagtgtggaaaacgacggccccgtgaacatcatcatcgacacggaacgcatcggaaagtgacggtgtgcctatgacgcgatttttaacgctgtttgacacggttgtcaccgacccgcttgaggacattcccaccgtgaacgagcttgaaaaatggctgaaaaacgtcggcgaacaggcgttttactttctcattcgcttagccgccgccgggctgcttttgtttatcggcagcaagctcatcaaatttttgatgaaccgcttcaagcgctcgaaactatatcaaaaaatggacccggggctcgcttcgttcatggcgagcggcagccgcatcgtgctgtatatcatcctcattttgatgtgcttcggcgttcttggcatcgagaccgcctcgttcctcgcactgttcacctcgggcggcgttgccatcggccttgcgtttcagggcgccgtgacgaaccttgcgggcggcgtgatgattttgctttttcacccgttccgcgtgggcgattacattgaaacgacggaaattgccggcacggtgaacgccatcagcgttttatacaccgtggtgctgacaccggacaacaagcgcgtgaccgtgccgaacggctcgctgacgaacgccgccatcacgaattacagcgcggagggacagcgccgtgtggagctgacattctccgtctcctacgattgtgacattgacaaggtgaagcaaattttgctttccgttgccgaaagcgacccgaaatcgctgaaagaccccgccccgctggcgcgcctgaaaacgcaaagcgcgagctcgctcgatttcgtcctgcgcgtttggtgcgccccggaaaattactgggacctctattttgacctcaacgaaaacgtgaaaaaggcgctggatgaagccggcatggagattccgttcccgcagatggacgtgcacatgcggtaaagcacgtacgaaaatacgaatattcccgcagcagcgccgtgaaacttccgtttacggcgctgaaattttcgtagacttttccaaacagaacccccgaagggagatttatccggtcttccttcgagggttctgtattattcaatctctatattcttgatgccgtattcaagtatcacgttgataagctcattgcgtgaatagttgctttcgctcgcgattttatcaagactttgcaaaatatcttcccgaatacgcacggaaatgattctgttcccgtcctctccgcgctttttaatcttcaaaggttcatttttcacaaattccacctcacaatctatactaattatagattgacagccgaattatagtatgctacaattaggtttgtaatatgatatttatttgtattacaaaaaatatcgagaggtaatatttatgagaaaaaccttatctgctattttggcagtgctgctcgcggcattgctgtgtgcgtgcggcagcaaaaccgtggaaaacacttcgtcgccggagccaaccgctacagccgaagcaacagctacaccgtcaccgacagctacgcctaccgcagagcctacaccagaggcaacgccgagcgctccgcagcttcagttaggtgatacaattgaaaacgacaactttaaaatgactttaaactctgtcgaagttgttgaccgtcatgaattttcgacttctgaaaattctactatgtattctgttccagaaaatggttactgttttctccttttacgtggccattttgaaaacaaatcaactaacgttattccaagctcaagtatcgcctgcactgttctgatcaacgatgttttcactgtaaattgcagccgtgccgaatttgtttttgagcgagagcgcaattgggaaatagatccttttaccgattttaattactctatccgtgtcagcatcccgcaaaaacttgccgacgatttaaaaagtgcggtatacactattcagtttaacgatgatatgtc

SEQ ID NO: 1726 - DNA, 29015 bp, Unknown
  gut microbiota DNA sequence
ctctgtaaagcgatttgtttcgggattgaagaaatcaatcattttaaccgtattttcaaatccatcgtgggcgtttcgcccacccagtaccgttctgcaaaccgcgaggaagcgcagaactgatttgatttttgtaaaactgttttgggttgacacggtgaaaaaaagcggtatataataatagaaaatactgcgaagcagaaggttttgtgaaccgtctgctatcctgccaaactctgtctctcaaaatcaaaacacacctcgcccgcatcacgaaaagccggaaaacgcatccggcagagaacctccccgaagacgacctcgaaaagctccgaaaatatctcgttgccgaaattcaaaagtgagggaaaatatgaaaggctccaaaacgctctacgtctccgatttagacggcactttgctgcgccatgaccaaaccgtctcgccgttcacggcggaaacgatcaacacgctaacggcgcgcggcatgctgttttcctacgccacggcgcgctcgctcgtcaccgcgaaaacggtcactaaggggctcaacacgcactttccgctcatcatctataacggcgcattcgtgcgtgataacgtcacggaggaaattttgctcgcaaattactttgacgcttccgtgtacgcggttttagatgaactcttcaaggcaaatatctaccccatcgtgtacgcaaatgtggacggaaaagagcatttttcctttatctatgaaaagtgcacgcccggcctgaaaggctttgccgatacccgtgtaaacgacccgcgtactcgcgaggtgtatacgacggaagagctcacgcgtggagatcttttctacatcacctgcatcggcgacccgcaaaaactcgcgccattttacgaaaaataccgcgaaacctaccacgttgtctactccaaagatatttactccgacgagcagtggctcgagatcatgccgaaaaccgcctccaaagcgaacgccgtcttcgagttgaaggagaagctcggctgcgaaaagctcgtcgtgttcggcgacggtaaaaacgaccttgatatgttctgtgttgcggacgaagcctacgctgtccaaaacgccgacgaagaactgaaagccgccgccactgccgtcattggcggcaacaacgaagacggcgtagccaaatggcttttggagcatgctaatttttaaaattcggaggaaaatatgtacatttattacccaagctgtaactttagcgctgcaagtcccgcaacggcaaaaaaagtcaaagcgtattttgaaaagcaaatgccggttgccggctgctgccgcgtcgataaaagagagatttcccccgcggatatcgcgctttacatctgtcaggcatgccgcgaaacgctcgaagacaaagtgaaaacgcagtcgatgtgggaatatctcgatgccttagaagatttcaactttccgaacctaaacggtcaaaaattctatgtgcaggattgctggcgcgaccgtaatcacccggagatccacgaagccgtgcgcagccttttaaagaaaatgcacgcggaagtgatagagatcgagcataaccgtgaaaaatccatattctgcggcaacctgcattacgaaacggatgatccgcgtctcaaaaactacccgaacactccactgtacaagctgcccgaagacctgcaaacctctctcatgcagcattatgccgcgcagtttgaccccaaaatcccggtgctgtgctactgcaaccgctgttatgaatgccttcgcatgggcggtgcagccgccgttcacctgctcgatatcgctttttctgaaatgtaaagacagatttgtttcctttcagacaggaaacgaaccgcaaaatcgcctatactgaatacagcgacagaggaaaggggagagcgtaaatggagtggctgacgatcatcaaggatgcgattgagtacatggagcaaaacctgctcaccgtcacgggtccggaggaggtcgcaaagcacgtgcacatctcaacgatctacctgcagcgcggctttcaggtcttaactggctacacgctcggcgagtacatccgcagccgccgtctgtttgaggccggcttaaagctcacgcagaccgacgaaaaggtcatagacatcgcgctcgaatacggttacgaaacgccggaaagcttcacaaaggcattcacacgctttcacggcacgacgccgatcgaggtgcgccgcgatcgctccaaaatgcagctttttctcccgcttcatgtcagcatcaagattcagggaggcagcaaaatgaattacaccgtagaaaaaacagaagcattcaccgtcatcggcttcgagcgcctgttctcgtttgagacatcgtataaggaaatccccgatttctgggcggaaatgtacaaaatccacgcgccgaacatcctcgcgggcaagggcccgaaaaccgaagttgagcacgccatcatggaaaactacatcggcgaattcggcgtctgcattgaggatgcgcctgcgcccggcaagttccgctacatgatcgcgggcccatatcagggcggcaaagtgccgcagggtatgaagctctacaccgtgcccgcaaacacgtgggcaaaattcgcgtgcgtcggcgccctgccgaacgccatgcagagtgtgaacaccaagatctggagcgagtggctgcccggcaacaaggagtacgaccttgccggcaagtacaacatcgaatggtattccgcagacggcgacccggacagcaccgactacgagtccgccatctggatccccgttatcccgaaaaagtaaaatcttatcacgccataagaaaactgccctgccgatgtgcaaaacggcagggcatctcctattttatgtcggttcccgggtaaaaccgtgccaaaatttcgtcaaccgtcatgccgccttccgcaagcgttatggcggccgcttgactcatgcccacgccgtgcccatagccgagcgtcgtaaatgtgaacgcgccgttttcatacgtcaccgtaaaactcgcgctgcgtaagccgagcgcctcccgcacatgcacgcctgtcatttccaccccgcagaccgtaagcttttccacatatcccgtgtcaaaatattgaatatccgagaaccactttcccggcgcatcgtcaaatgaaatttccgagaaagcggctcgtatctcgtcttccgtaaacgttgtcgcgctctgaaactcctgcgccaaaaggtcgctcgggcacgctacagcggtgaggtacgggtagcttttttccggccacacgttctcaaacggctgcgtgcacccggcagaaatcgcaaaataacacgcatcgatcggctcgttttcaaaataaatttccttgtcgagcaccgataagcacagcgcccgcacgcggttttgttcttcgtccgtcagccccgcgtcggtcgtgtagatgctcttttccgcgctgtcacaggtaaaatcaaaatctttccccgtgttttcccgccgcttgcggtcatagagcgtgtgtatcgcgatgatttgtgcctttaatgcctcgtcgggggcagaaacagccatctcacacggcagcgccccgcagagaaaatccagatcgtttactgtgcggaccgtctctgttgccgtgtcgtaaatgcgaaaaccggattcactttttgctgtgccgctctccgcaaacagcagcggcgttaccgtgcaaaacagatacagcgcacccaaaaaagcgaaaaacctgcgcaccggccattttaatctcagcttcattttacacctcaagatgaaaaaacttattgtcactcatgcaatattttgtgctaaatttatttttagtagaataaatcaagataaaaatgaaaggtattgagtttcataattcaaaacacttgacgaaaccacaactctgcgctattatgtatctactacgcgaaaatgtgcggaacgcagtgcgaagagccgcgcaggaaaggatgagcagttttggaaagattgataaacgaaagtgcaagcagcacaacggtcagcgagctttgcgccgagtatcgtgccaataaccagattacaaaggatgaatacgagctttaccacgtcaaacgcggcctgcgcaaccgcgacggcaccggcgtcatggccggccttacgcacgtctgtaacgtgcacggctacctcatcagcgacggcgtgaagattccggatagcggccgcctcacataccgcagcatggatgttgtggatattatcaacggctgccgcgcggaaggccgtttcggctttgaagaagtcgtgtggcttttgattttcggcaagctgcccgatgaacgccagtataaccgcatctgtcagctcctttacgaaaaccgcgagctgccggaatacttccccgaggacgtcattatgaaaaacccgtcgcgcgacgtgatgaataagcttgcgcgtgctgttttgacgctctattcctacgatgacgacccggacgatctctcgctcgaaaataacatgcgccaaagcatctcgctcattgcgcgtatgccggccatcatgacgtatgcctatcaggtcaagcgccgccattacgataaacagaccatgtttttccacccgttcgagccgcagcacaaaacggcggaggcgattttgaatgccctgcgcgaggatcgccaattcacgcacgaggaagcccagctgctcgacctttgcatggtgctccacgcagagcacggcggcggtaacaactccacatttaccacgcgtgtgctttcctccgcgcaaacggatatctactccaccatcgccgcagctatcggctccctgaagggcttccgtcacggtggcgcgaaccacaaggtacgccagatgatgacggacatcatgcagaatgtgcagcactgggacagcgatgacgaagtggaaaactacctcgagcgcattttgcgccgcgaggtgggggataagagcggcctcatctacggcatcggccacgccatttacacattgtccgatccgcgtgctgtcgagctcaaaaaacaggcgcgttccctcgccgccaaaaccggctacgccgaccagttcgcgctgtatgagcgcatcgagcgcttagcgccagacgcgttccataaagttacggggaacgagaaagtagtatgcgccaacgtcgatttttattccgggctcgtctatgagatgctcggcattcctgaggatctctacacgcccatgttcgccgtttcgcgcatttccggctggtgcgcccaccgcatcgaggagctcacaacgggcggccgcatcatccgcccggcgtaccgcgcgctgcctaccggtcagacctacatcccgctcaaggaccgtcattacgatacaaagtccgttttgtaaataaaacggcataaaagcccaaaacggcttgctttttgccgttattgcccgtataatcaaattcagaaaacagcaaggtgtgtgcgatggccctgtcttcgcccgcacctttccgtttgtaggattccattaaatctcgtttctctacgaaaggaagagggggtaaaatccatgaaagcacccatcacatttgccatcgccggcttcggcgaccgcggcagcacatacgcttccatgcagaagcttttcccggaccgcatgaaggtcgtcgccgtggcggatatcaacccggaaaaggtacagaaagcgaaggagctctacggcatcaaggatgagctttgcttcacgagcgcagaggaaatgctcgcgcaggataagcttgccgatgtcatggtcgtttccaccatggatcgccaacacgtcaaccacgccattccggcgcttgaaaagggctataatatcctgatggaaaagccgatctccccggatcttcaggagtgcaagcgtatcatcgaggttgcaaagcactgccccggcaagatcatcgtatgtcatgttctgcgctacaccgcgttctataatacattaaagtccgttctcgacagcaaaaagatcggcgatgtcgtctccgtctgtgcaaacgaaaacgtcggctactggcatcaggcacactcctttgtgcgcggcaactggcgcaacagtgaccagacaagccccatgatcctccagaagtgctgccacgatatggacatctacacctggctgctcggcaaaaagtgtaaggccatttcctccgtcggcgatacgcacctcttcaaaaaggagtgcgcaccggagggcgcaacgccgtactgcctcggcggctgcaaagcgaaggaaaactgcaagttcgacgccgagaagatctacatcacgaaccccgcaacgggcatccgcaacggcaatacgtggatggcgggcgttgcctgcggcgtgaacccaaccgaagagcgcacctatgaagcactgaaaaacggtcagtacggccgctgcgtctatatgtgcgacaacaacgtcgtcgaccaccagcagacgaacctcctcttcgaggacggcaccaccatgagcttcaccatgtgcgcgttcaccgaaaagtgctaccgttatttcaaggccatgggcacgaacggtgagatcgaagccgatatgctctcgaataaaatccacgtccgcgtcttcggcgagccggaagaaatcatcgacgtcaagctccttgcaaacgacctcaagggtcacggcggcggcgacagcggcatcgtgaacgacttcctcgatatgctcatcaacgggaccgaagccaccgagcgcaccaccacgctggagcactccctcgaaagccacttcatggcgctcgcagccgaagaatcccgcctccgcggcggcgagctcatccacatggatgcgttcaaaaacggcaaataatttaacaatctgaacataaaaagtcctgcacgcattataagctgtgcaggactttttactatattcaatttaatatttcatcacaaatacgcgtccacaacggcctgcgtctcatcgcgctttgcttccatttccgccacaaggtggaactggttgcgtgcgcggtctaagttgtgctgcgggtacttcgtcttaaagtacacatcgccgttcaggtagtccgcaaggaagcggatgcccacctcaaacgtcatcagcttcgcgccgtccggcagcgtgcggatttccgtctcggtcagcgccttgccggcttcgccgaggaagccttccgtgtacgccttaaagagcggcacgctgaagtgcaccttcgtcagatcggtctcgtcctccgcgccggtggaagcgcccgcgcggatggaatcaccgaagtcaaacgccgcaaggcccggcatcaccgtgtcaagatcgatgacgcacaccgcatcacccgtcgcgttatcgatcaaaacgttgctcattttcgtgtcgttgtgcgtcaccttcagcggcagcttgccctcctcaagcaggttcatcaaaagcccgcagtccgtttcgcgtgcctttgcaaattccagctcggccgcaacattctttaagcgcccggctttatcctcacataccgcgtccatcagttgccggaagcgcgccggggtgtcgtgaaagtgcgggatgacctcgtgcagcgtctctgccggataatcagagagcatgttctgaaacgcaccgaacgccgcgccggattttttcagcatctccggagattccgcaaagtcatacgctgttgtgttctccaaattgatcgtcgagcgccagtagttgccctcactgtcgatataataatccttgccgtcgtttgtctttaaaaccgtcagcgtgccgcgcttcgggtctttgccggccttttcaagcttctccgccaaaaatttcgtcacgtgcaccatgttgtccatgatctcatccgggtgcgggaacacatacccgttcacgcgctgcaaaacaaagttacccttttccgtgcgcgccagaaacgtgtcgttgatgtgcccgccgccgtacggttcaatggagcttacacagtcgccgtaaaaatacgcctttgcggcctcgttataaagaattccctttttgtccgccatgttttatccccttagagtaaatttaaaaccgtcaattattgatgatgatgcgcaagatttcggaaccgcccgccgcggaaagatccatcgcgccgctgtaccgctccaaaatgccgcgtaccacttccatgccgagcacctgcggctttttcggctcaaacagcttatgtacaaggtcgttcacggagctcttcgtcgccggtgtgcgctttttctgttttttctgcgccgagtacaccgcctcaaacgtgatgcggttttccaccggcagcgtcgtgatgcgcacacgcggctcctctgcgccggagtgctccgcgcagtcgatggcgtgcgtcagcatgtcgttcagaatcgcgcagaattcaatggttttcagccgcaccgcgccaagctccacattgctttccaaaacgatgccgcagtgtgccgcgtaggccgccttgcccgccagcactgcattcacatacgggttttcgctgtatcgctgtaaatacggatcgtgcaggactgtttcctctttgaggatattcagcacgccctcgcagctgccgtcctgcgcctcagccgcgatctcatgcaaaacaaaatcatggtgctcctgcgcgttctttgcgtttgtcacgttgcccaccatcgcacggaaataatccgcctccgcgccgagcagctgctcgcggtgctccgccgtgcaggcactctcctggtactttgccgcgttaaacgccgcacgcaccgtaaacgccaaaacaaggtacagcgccgctgtcagaataaggcgctgcgttacgctgttcagtccgaaaaaagtcggcaaaattccgttagcgcagaataaacagacaacaagcgccgcacaaagccccacagacagcaccgaaacgccgcgctgtgcaaaatagcgaaacgggtgtgccagcgtcatgaaagagaggaatgtcagcacaatgtacagtaagctgccgatgaccgccgaccatatgccgtcgcccgcaaacggcagcgctttcaaaagcgtggtcgtcacgggaagcaaaaaggcgtaattgctgatgagcagcaaagataagctcagcttttgcgctaaattgttcgtgtagaggaataccgccgcaaccagcaataagagcacattcatgccgttgccgaattgccccgtcgcgtcgttaaaggcaggggagagcagcagattcagcaaaatagaaagcacaaacacgccgcccgaaacaatggcctccgccagcagccgaaagcggctgtttaaaaccgtcaataataaaagtgcattgcacagaaaaacgaccggtaaaagcattttaaaacgcctcacttttccaagtttgtatgcgcgaacccctaaatcgcacacaatttttttcagtataccatatttggccgcttctttcaacaaattccacaaagaaatgttccgcagcacgaatttttcgacactacggaacacatttatgccttatacaattctatatttcttaaaaatcaccccatgcggcggttctgcttgccggtgacagattcaatctcaatgcaccacacacccgtcgatttcggccccgtctccacgcagccggtttcctctttcgtcaaactcggcacaaaacggtcgcaaagcagacgcagcgcacggcgtttttcatcgaaatcgattatttctgtcactttgccgcgcaccacagtggaggtatagagcgtcgtcagccccttttcgtagatcgtcgggctttccacaaacagcaggcaaacctgcggattttcgcgcagagagttgaccttcagccccgctgtcgcgctgtggaagaacagcttctcgccgtcacgcaccacgttcagtgccaccgcatacggcgtgccgtccgtcgcaataagggaaagtgtgccgtaagcgcagcggtcaatgaccgcaagcgcatcctcgcgggaaatcgcgcggtcggcgcggcgcattttggtcatgtctgatttttgggacatatccataataaataaacaactccttgtcctttattggcttcagtatagcattgcatagtgccgaaaacaaccgttttcaaaaaacacgcgaattttcgacgagaaattgcaaaatttcgcataagcccttgttttattccgggttttacagtatatttaattgatatgactttcggaaaggagcgcaatggactgcacggcagtccatatctgtatatatggaaaacacagaagcaaaaagaaacatcaagctcatcgcgttcgatctggacggcaccacgctgcacggcttcgcggagctttcagagcgcaaccgccgcgccatggaaaaggcgaacgaggcaggtattctggtcgtcccggccacaggacgcgtgcgcaattttattccgccgtgcctcaccgaactgccgtttatccgctacgccatcacctcaaacggcggcgccgtgtgggatattctggaaaacaaagtgctctgcaccgatctcattcccaccgagaccgcgctcgaagtgcagaaaatttttgacgattacgagctttatgtggaatactacgtgcacgggcgcggcgttacaaagcgcggcaacccggataaagcccgcaccgttttcggcttcccggaagaaaaatattacttcctcacaaaagattatacgttcacggacaacctctccgcgtatttaaaagaaacgcacgccgagccggaaaagatcaatatgatgttcatcccggaaagcgtccgcccggaaattttggcccgcctgcaaaagttaggcggcatcgagcttacattctcgaacgtcgataacatcgagatcaataaaaagggctgcgataagggcactgcactgcattccctctgcaaggtcctcggcatcgatcccaaaaacaccatggcggcgggcgataacggcaacgacctcggcatgctgaaagctgcaggcttcgccgccgttgtcggcaacggcatagaggaagcgaaagcgattgccgatgccgtcgtcgcaccgtgtatcgaagacggcttcgcggaagccgtggagcggtttgcactgagataaaaaggaaaatataaaagcaccatgtgaaaggaaccaaactatgctgaatgtcaacggggtcgccatcaattttgatggtcagaacctcttttcaaacgtcaatctccagtttttgccgggcaactgctacggcatcatcggcgcaaacggcgcgggtaaatccaccttcctgcgtattttgtccggcgatttagagcccagtaagggcgaggtcacgtttgaccccaaatacagaatgtccgttctgaaacaggaccacttcgcctacgaagatcaaaccattttcgataccatcatgcagggcaatgcaaggctgtatgagattgcgcaggaaaaagacgcgctgtacgcaaagcccgattttgacgaagaagacggcaaccgcgccgccgagcttgaagccgagttctccgagctcaacggctgggacgctgagaccgaagccgcaaagctcatgcagggcctcgggctcgacagcaacgatatgtataacaccatgagcactctgaaccagaccgaaaaggttaaagtgctcttggcccgcgcgctgttcggccagccggatatgattctccttgacgaaccgacgaacggcctcgacgccaaagccatcacatggttagaggattttctcattgagtacgagggcaccgtcatcgttgtctcccatgaccgccactttttaaataacgtctgcacccatattgtcgatgtcgattacggcaagatcaaaatgtacgtcggcaactacgacttctggtatgagtcgagccagctcatgcagcgcatgatgcgcgaccaaaaccgtaaggcggaggaaaaaatcaaggaactccagaacttcatccagcgcttctccgcaaataagtcgaagtcccgtcaggcgacgtccagaaagaagctgctcgataagatcaccgttgaagaaatgcccgcgtcctcccgtcgctacccgtatgtcggctttacgatggatagagagctcggcaaagacgtcctcaccgtctcgggcctcacgaagaccgtagacggcgtaaaggtgcttgataacgtcacattcaccgtcggccgcacggataaaatcgcgttcaccgcatcaaacgagttcgccgtgccgacgcttttcaaaatcttaatgggcgagctggagccggacgccggcacgttcaaatggggcgtttcgacgagtcagtcctatttcccacaggataactccgcttattttaccgatacggaagattccatcatccgctggctcgagcaatattccaaagacaccaccgaaacgtatctgcgcggtttcctcggcaaaatgctgttctccggcgaagacgtctataagcccgtgcaggtgctttccggcggcgaaaaggtgcgctgtatgctctcgcgcatgatgatgttcggcagcaatgtactcctgctcgaccagcccacgaaccacctcgacctcgagtccatcactgccgtcaacaacggcctcatcgatttcaagggtgtcgtgctgttcgcatcgcacgaccacgagttcacccagaccgtcgcgaaccgcatcatcgaaattctgcccgagggcggcacgttcgaccgcgttaccacctacgacgagtacctcgaaatgcgcggctaaacccgtattgaatacggctaacccgcaaaagttgcggctgattcattcgtctccggacaagcttttatcgaaaatttcaaaatccgtgtaacctgccgatataaaacgcctacttataaagtgaaggggaagggaggacaaaagcatgaaggaagaccatgagatcatcgagctctactgggcgcgcagcgaaagcgccgtgcacgaaacggacgaaaagtacggggcaaagctccacacgctctccgggcgtattctgcccgaagcagaggatgccgaggagtgcgtcaacgatacgtatctcggcgcgtggaatgccatgccgccgcagcgcccgctcgcgctctttgcgtttctggcgcgcatctgccgcaacatcgcgtgcgataagttagacaagctccgcgcgaaaaagcgcagcgcagaggtctccgcgctcacggaagagctttcggcgtgcatcgcagacccaacagcagcaagagaagcggaaagccgcgagattgccgaagccttaaacagctttctctcgacgctccccgtcgatgcccggctctttttcatgcgccgttactggtatatggattccgtaaaagccatcgccgaaaagtacggctgcggcgaaagccgcgtcaaaacgtctctccaccgcacgcgtgaaaagctgcgggattatctccaaaaggaagatatctggctttaaagaaaggcgggaacagtatgacaggtatcgatttattcaaggccctcggcggtgtaaaggaagaatatatcgcggaagcggacggcagctgcaagctgccgcacgtaagaaaagtcaccctgcaatggtgtgccgcgctcgccgcgtgcgtgtgtctgctgctcggctggggcttcatcgcgcagcacctcagcggcatagccgattacaccggcgacgaaacgaaagtcacaggcgccgccgagaccgcgcaggcagacggcgcagatcagggcaccgcgcccgccgtcggcggcaaggtcgtgctccctgtgcgcatcacggcagaaacacagcccgtaagcgacgtgaaggtctttacggacgaggaaaaaatcgggcagatcatgccgctgcttctcttaaagaacgcggcggaaacgagcggcgatccgaacgcatacgtcggctcggccaacattttcacgctggaatacgcaaacggcgaaacgagtacgatcacggtttacggcaatctgttctataaaaaggacgacggcccgtggtgcgatattccgtacgaacaggccgaaaagctcgaagaactcgtccgcagccttgggtccgacgaataaaaccgtaaaatttgacaaaaaaggcaaataagactggattttcccgcggttccccgctataatagaaataatgtctttctccgcataatcttgcagaagaagaaaacgaaaacgctctgaaagcgtaaaaaaggggaatttgcaaatggaaattgcaattacagtcttgctgctcatcgtgggtctcgtgctcatcatcaagggcggcgatttctttgtggatgccgcatcgtggatggcggaagcctccggcattccgaagcttattgtcggcgcaacggtcgtcagcttcgcgactactttgccggagctgctcgtctccatcttcgcggcgcttgacgcacgtgccgcagaggcgctttcgcccggcagcggcatcggcatggtggatatgtccatcggcaacgccatcggcagcgtcacggcgaacctcggtctcatcatgggcatcgcgcttgttgccattcctatggcgatccgccgcaaagattacatgctcaaaatgatcctcatgctcgtggctgccgctgccactgtatgtttctcactgtttgataacggcgtcggcatggttgccagcattttgcttatcatcattttcgtcattgccatgtacgacaacatccacgaggccgtcgtcgccgtcaagggcggggcaaagggtcagcagctcgatgagcccgtcacgaaaaaagccgtcatcaccaatgttgtcaagttcctcatcggcgcggtcggcacggtcgccggtgcacagctccttgtcgataacggctccgcgctcgcttccatgtgcggcgtttcggatcgcgtcatctccgtcaccatcatcgccatcggcacgtctctgccggagcttgtcaccacgctcaccgccatcgcgaaaaagcagggctcgctctccgcaggcaacatcatcggcgcaaatatcatcgatctgaccttgattctgcccgtatgcgcgctcatctacggcagcaagctccccgcgtcgcccaccgttgccatggtcgatatcccggcatgtctcatcatcggcattctgtctgtcgtgcccacgctcatcacgaagaagttctcgcgctggcagggcgttttaatgctcgccgcctacgccgtctatatcgtgctcagcgtcattgttatggcataacttgtaacttttgtaacgaaagctccgttttcaagaaaaacggggcttttttatgcacttttcaaatcatttcctcttgacttttcagcgctctgtatgctaaaatgtaacagaagtgtaacaaatgttattgctttgtaatttttgaatgtcaggtgagaagcgcatgcaggcggcagaaatgcagataaaaaccgaaaacagtgttgaggcagcaagcgtccttcttcgcacactgcgtcataccgtgccggtgctcttggccttgcttatcgctttgctcgccgccgcacccgttttggcggatgagaccgatgaagcgataacggataccgaaaccgtctctgccgaaccgacggaagacctccgggacgattacaccgccgtcgccgcgcagctggaagccgtcgcgcgcgcagagggcagagatatggcagataaaatgctcagcactgccctgcacagcctcacggggacttcggtcgataccgatgacgccgaaagcgccgtttccgccgcggctgcgcccgaggccgcagaaccgaaggctgtcgtcgtcaacgcctccgtgcaggcgggcgccaagtggtctgcaaagggcattctgccgtttttggccgttgtgctgttggcgtttttaggtctttctcttgccgtgcgccccatgcgccgccgtcgtgtgcattcggcccgtgcttatcgccccatgcgtgaccgcactctgaatgacactgcgtttcaaagccgcgcacattccactttataaatccgatcataaggaaaaacatacttttcctctcttttcggcgccgctcggttctcgggcggcgctctttttttcgcaaacccgcataaatccctttttgacattcctgaaaatcccattttaaaaatgcacacaaatccatcgtcaaactttattcatattttacgcaaaagcggttgacaaatcctgactttttccgtaaactgaacttattgcgtttgcatctaaaaccaaataaaatcggctgttccggaaaggtcgctaaaacgggcaacacacaaagcgttgtgttgcttttatcctgttcggaaaagtgttcctgccgcggccggatcgcgggcgaaagcctgcggccgtgaaaaatcctttgcggaagcagtacgcatcatgcagccggggtgtgtgattcactaagaccgcgcaactttcgggggacaagggtcccaccaaaccgcaaaggggatgctttccatgttaaaaccaatcatcacgctcaaagacattgcagtatcgtttgacggcgagcaggtcttaaagaacttcaacctcaccatcggtgacggcgagttcgtaacactgctcggaccctccggctgcggcaaaaccacggttttgcgcaccatcggcggcttcgtcacaccggatagcggcgatgtcttttttggtgacgagaagatcaataacgtgccgccgcataagcgcgccgtcaatacgatttttcaaaaatacgcgcttttcccgcacctgaacgtctatgaaaacatcgcgttcggcatgcgtctcaaaggtaagaaagaagacgaaattcaaaagaccgtcaccgaaatgctgcatatggtcaacttaaacggcatggcgcaccgcggtgtcggccagctttccggcggtcagcagcagcgtgtcgccattgcgcgcgccctcgcaaacgagccgaaggtgctcctcctcgatgagccgctttccgcgctcgatttaaagctgcgcaaggatatgcagaacgaactcaaaaaaatccagcaggccatcggcatcacgttcattttcgtcacgcacgaccaggaggaagcgctctccatgagtgacacggtcgtcgtcatggataagggcgaaattcagcagatcggctcgccgattgacatctacaacgaaccgaaaaacgccttcgttgcggacttcatcggcgaaagcaatatcctcgacggcaccatgatcgaagactacctcgtcgaggtcgccggtcagcgcttcaagtcgctcgacagcggcttcggcaaaatggccccggtcgacgtcgtcatccgcccggaggatatcgacatcgtgcccaccggctccgccgccgcacacatcaacggtgtcgtcaccagcgtcacgtttaaaggcgtacactatgagattatcgtcgatgttgacggcttcaagtggatgatccagacgaccgacagcgccaatgtcggcgataagatcggccttgcgctcacgccggatgacattcacgtcatggcgaagtccgtttactccggcactatgggcgattacagcacgttcagtgacgaaatggaggaagcgctccaggaggagggcagcgaacatgaggactaaactcatctctgccccgtacacgatctggatgacgctgttcatcatcgtgcccatgggtcttgtggcgttctttgcctttaccgataaaagcggcgcttttacgttagataacatcgcgcgcgtcggccagtattccaacgtcttcctgcgttccatctggctcggcgcactcgcaacgtttatttcgcttctgctcggctacccgctcgcgtatatcatcgccaaagcggcgccgaatcgccagagcttcctcattttgctcatcatgctgcccatgtggatgaacttcctgctgcgcacctacgcatggatgtccctccttgaggataacggcctcatcaacaatatgctcgccgccgtcggtctgccgcgcattcacatgatcaacaccgcgggcgcagtcgtcctcggcatggtgtataactatatcccgtacatgatcctgcccatttactctgtgctcaccaaaatcgacaacagtgtcatcgaagccgcgcaggatctcggtgcaaacaaccgcaatgtcttccttaaagttgtcctgcccatgagcatgcccggtgtcatttccggcgttaccatggtgttcgtgcccgctgtttccacatttattatctctaaaatgctcggcggcggcggaaacctgctcatcggcgacctcatcgatatgcagttcctcggctcggcgtataacccgaacctcggctctgccatttcacttgtcctcatggtcatcatcctcatctgcatgggcatcatgaaccagttcgacgacggtgaaaatgtgggaggaggtatgattctgtgaaaacggcttccaaagtctacacggcgctcatcttcatctttctttacgcgcccatcatcgtgctcatcatcttctcgttcaacgatacggataccgcaagccgcacccagttttccggctttacactgcgctggtatcagcgcctgtttgaggaccgctatattctggaggcgctgctcaatacattgatcatcgccgtcgtttccgcgttcgcttccactgtactcggcaccatggcggcggtcggcatcaaccgcatgaagcgtatgccgaaaaaggtcatgatgaacatcaccaattttcccatggtcaacccggaaatcgtcaccggtgtttccatgatgcttctgttcgtcgcggcagtcagcctgttcggcggcaaaagcctcggcatggcgtcgctcatcatcgcgcacatcacgttctgcctgccgtatgtcatcctgtccgttctgccgaagctgcgccagatgaacccgaacctcttcgaggccgcgcaggatctcggctgcccgccggtacgcgcgttctttaaagtcgtgctgccggagatcatgcccggcatcgtcaccggcatgatcatggcgttcacgctctccatcgatgatttcgtcatcagctacttcacaagcggcacaacgcagacgctgcccatctacatttattccatgacgagaaagcgcatctccccggagatcaacgcgctttccaccgtgctctttgtgtgtatcatgctcttgctcatcatcatcaatgtccgccagggacgtgaagagcgccgtgccaaaaaggcagaaagggagcgtgcctgatgaaaaagaaatttttcgccgtcttttttgcgcttctggtgctctgcaccgcagtcgtgcccgtctttgccgatgaagccgacgactgggatttttccgaagaataccccaccgcagagcccaccggtgtgaccatcaatgtctacaactggggcgagtatatttcaaacggcaccgagggctcgctggatgtcaatgccgagttcacccgtcgcactggcatcgaggtcaactacaccacgttcgatagcaacgagtcactgtattccaagctcgcaggcggcggcgcaagctacgatgtcattgttccgtccgattatatgatctcgaagctcatgaacgagaacatgctcgcggagctggatttcagcaatatcccgaatttcgagtacatcgacgagcagttccgaaaccccgattacgaccccgaaaacaaattctccgtgccgtgcacatggggcaccgtcggtctgttctataataccgattatgtcaccgagcccgtcaccagctggtctattttgtgggacgagcagtacagcggcaagattttgatgttcgataacccgcgcgacgcgttcgccatcgcacaggagcgcctcggcttctccctcaattccaccgacgaaagcgagtgggagcaggcggctatgcttttaaaagagcagaagcccctcgtacaggcgtacgtcatggaccagatttttgacaaaatggaaagcggcgaagcgtggcttgcaccgtactattccggcgatgccggcacgcttgtcgaaaataacgacaacatcaagttcatcgtcccggaagagggcacgaactactttgtcgatgccatgtgcatcccggcaacggccgaacacaaaaaagaagccgaactgtacatcaacttcatgtgtgaccccgaaattgccggtgcgaacatggatttcgtcggctacgccaccccggagaccgccgcgaaagactatcttgatcccgacgccgtcgcaaatcccatctactacccggatcaggatgtgctcgaccgcacggaggtcttcgtcaatctcccgagcgagacgagcaatctgctcgatacgctctgggcagaggtcaaaatgggcggccccggccaatccgcggttctcatcgccatcatcttagttttcctcgcagtctatatcgccatcatcatctggaaaaaacaaaagcgcaagcgcgagatgatgtaacaactgcgtaaatagaagtatattgaaagctcttcgaaaatcactttcggggagctttttctctacctgtgcgttttttaaaaggcttcgattttttacgtcttcagcgtcttgcaatttcctctgcacctcggtataatgtggttagattcaaaacagaaagcaaggatgaaagaaccatgaaaattcagaatgtttcggatgccgcttttaaaaagtacggcaaagtcatcacggggctcgattgctccgatattatcgccgccatggcggaaacgccctgcccggaaaacgtcgtctatgtgcccggtgcagagtctctcgaaagctgcgcgtctgccaaagacatcgcctacacgctctacggcggcatgcccgtgcagatcggctactgcaacggcaataaccataagttaaacggtctcgaatatcaccgcgatagtgaagtaaacatcgccgtcaccgacctcatcctgctcatcggctccgagcaggacatcgaaaacggcaagtacgatacgtctaaggtcgaagcgttcctcgtgcccgccggcaccgttatcgaggtttacgccaccacgctgcactacgcgccgtgcaatgcaaacgacggcggcttcaagtgcgtcgtcgcgctgccgaagggtacgaacaccgacatcgaaaagcgcgcgccgaagaccgaggaagacaaaatgcttttcgcccgcaacaagtggctgcttatgcacccggaagcggcagaagagggtcagtacgtcggccttgtcggcgaaaacatctgcgtttgatttgcgtagaacgccgtaaaaccgaacaaccggggcataccgcacggcacggtgcagtatgccccttttcgctcaaaatctatccataataagggggagacccatgacattttatgatctgctctggtattttaccatttattcgtttttaggctggtgctcggaggtcatttttgccaccgtcaccaccggcaagttcgtcaaccgcggctttttaaacggccccgtgtgccccatctacggctttggcatgtcgctcgtgttgctcgttctgctgccgttttcggataacatccccttgctgtttatcggcggcgcactgctcaccagtgctatcgagcttgtcggcggttgggcgctcaaaaaattcttccacaccacatggtgggactattccgaccagcccttcaacctcggcggctatatttgcttaaaattcagcatcctctggggcctgtgtgtcgtcgtcgtcatccgcattgttcatacggctatcgcgtcgctcgtgcactggattcccttcacgctcggcgcaattctgatcggtattttcatcgcgctgtttatcacggataccatcgtcaccgtgcttaccatccgcaagctcaacgaaaagctcaccgttatcaacgatatgtccgcgcgtctgcgcaaagagagcgacgccatctcgaacggcctcggtcgcctgacgctccttgcagacgagaagatcaccgagcagaagcaggagttcaacgaaaaagcccgccctgtcctcgaagagaagcttcaggcacagcgcgctcagctttcggagaagtacgaagaataccgtgcgtcgctggaagaccgccgtgtgaaagcacagaagtctgccgaagacctccgtgcccagtggaacagcgttacctccaagctccagcgtcacacccagcgccgtttgctgcgcgccttcccgaccatgaaaaacgaccgcgcagacgaagcacttcgccgcttgcgtgcgtggatggatgaaaagaaggaaagctgatgcgtcgctatgtggaaaacgttccgtcctcgctcacgcaaaaggagctgcatgaccgtgcctacgcacttttgtaccgcgttttaaaggacgaatggggtattgcatcgcccgttgtggaaaaaactacgctcggcaaaccgtatttaaaaggggagaacatgcctcatatcagcctgagccacacgaagggcatcgtctgctgcgccgtgtcgcggaaaaatgtcggcatcgatgccgaatatccccgccgcgtgcgggggagtgccgcagagcgcgtctgtacgcccgcagagcttcgggacatacacagcagctccaatcccgccgcgcgctttctggcgtactggacgctcaaagagagcatctccaagtgccgcggcaccggcctttcggaatcgttccaaaactacgagatcacctttcaaaacggcatgccgcattttaacggctacacgctctttttcgagcagcatggcgtgcattttctcgccgccgccgaggaagcataaagcatagccgccccgcatacctatgaccgaaaagaaagtcttacccggttttctgcggtgaaaggtggcagcaatatgattgtatcgctcggcgcgaacaaaaaacgaattttggcggtgcttgtgctcatcgccatagccgtcagcgcgtttttcctcatcccgcgcggcgaaaagcggcagacattccccggtatgacgggggaggagcgcctcgcgtttttaacgtccttcggctgggaggcagaagcggagccgcaggatgtgcgcgaggtcgtcattcccgcaaaattcaacgatgtctatgcggcgtataatacgatgcagcaggcgcagggtttcgaccttttgccctatgccggcgaaaagtgcacgcagtaccgctaccgcatcacaaactacccgaatacgcccgatggcgttttcgcaacgctcctcgtctttgagggtaatatcatcggcggcgatgtcgcgtccggcgcagaggatggcttcatgcacggctttgcggcagacagcgcccgctatgagatgccgaagtcggtcatcaaagagagcgcgtcgcccgcgccggacaccggcgaatccacacaaaatccaacggaaagtgaaacaacatgagactcgataaattcctttcaaacgaaaatatcggcagccgcaaggcggtcggcacgctggtgcgcagcggtgccgtcgccgtcaacggacaagccgtgcgcaaaagcgatatccagatcgaccccgaaaaggacgagatcaccgtcaacgggaagcccatgcggtacagcgcgtttgtgtacatcatgctctataagccctcgggcgtgctcaccgccacgcgtgacagccgcgcagagaccgtcttagacctcctgccaccggagcttaagcgccgcgatctgttccctgcaggccgtctcgataaggacaccaccggccttctcgttttaacgaacgacggcgagtacgctcaccgcatgttggcgccgaaaagccacgtctggaagcgttaccgcgccacgctcgacctgcccgcagaagaaagcgacatcgcgcgctttgccgccggcatcaaaagcggcgaaaacgagttcgcccctgccgtgctcgaaatcagtaaggacgatccccacatcgcgtggacggaaattcgggaggggaagttccatcaggtcaagcgtatgttttcagcgtgcggtaagaccgtcacggcccttcaccgcgaatccatcggcgctttgacgctcgatcccacactttcgcccggcgaggcgaaaattctcgatccgaacgccgcagcgttggtttttgaaaaacctgcacaaataatctgaacaaaaagcgtcaagaatttttgccgtttatttattttaactaaactcaaaggaaaaagtttgggcaaataaggactgttcagagacccgattttctgctatacttagtgcattgaaaagagacgttgttcgtcacatatggctgccaggctctgacgcataacaacctatcatcaggaggaaaaatcttatggcaagtgtaacacttaaaaatgtctataaaatctattccggcggcgttaccgctgttacagatttctgcttggacatcgaagacaaggagttcatcattctcgttggtccttccggctgcggtaagtccaccacgcttagaatgatcgcaggtctcgaagagatcagcaagggtgagctttacatcggcgaccagctcgcaaacgatgttgctcctaaggacagagatatcgcaatggtgttccagaactacgctctgtacccgcacatgaccgtttatgacaacatggcattcggtctgaagctcagaaagaccccgaaggatgagattaagcgccgcgttgaagaggctgctcgtatcctcgatatctcccacctgctcgacagaaagccgaaggctctttccggtggtcagagacagcgtgttgctctcggccgtgctatcgtccgtgacccgaaggtcttcctgctcgacgagccgctctccaacttggacgctaagctccgtgcacagatgagaaccgaaatcgctaagcttcataagagactcggtaccacctttatttacgttacacatgaccagaccgaggctatgaccatgggtgatagaatcgttgttatgaaggacggcttcatccagcaggtcgataccccgcagaacttgtatgatctgccggtcaacgaattcgttgcaggcttcatgggctccccgcagatgaactttatcgatgctaccctcgttaaggaaggcgcagattactacgtcaccttcggcgcagctaagatcaaggttccggcaaacaaggctaacgctgaaatcgctaactatgttggcaaagagatcgtcttcggcatccgtccggaagacgtacacgatgagccggagttcatcgagaagcacccggagaccagagctgcggctgacgttgaagttaccgagctgatgggcgcagagacctatctgtacctcaactgcgaaggcaatgctcttaccgctcgtgttgagccgacttccaccgctaagaccggtgacaagatcacgatcgctctcgacatgaacaagatgcacctcttcgacaaagaaaccgagaagaccatcctcaactaatcggttttataaacagcatacagacggcgttcccaatcgggagcgccgtttttgcgtatcacacgtgccggtattctttctcacaagctttcggcacaggtcgcgcagcttcacaccgaatctgtctgcgctgcgcttggcatttcactatctttaaaaagcatttgcatcgcgcgaaaactgtggtatactgaaatcagaacattcagaacataagggagtgcttttacatgtttgtaacagaagatattcgctatatcggcgtaaacgaccatgacgtagacctttttgagggacagtacaccgtagaaaacggcatgtcctataattcctatgtcatcctcgatgaaaaagttgccgtcatggatacggtagacgcccacttcggcgtggaatggctgcaaaacctcgaaacggagcttaacggccgtcgcccggattacctcgttgtgcagcacatggagccggaccattccgccaatatcgccgtctttatggagacatacccggaggcgcagatcgtctcctctgccaaggcgttcgtcatgatgcagcagttcttcggcacagatttcccggagcgcaaggttgtcgtcggcgagggcagcacgctcaagctcggtcgtcatactttgacgtttgtcaccgcgcccatggtgcactggccggaggttatcgtcacatacgacagtacagataaagtcctcttttccgcagacggcttcggcaagttcggtgcgcttgacgtggaggaagattgggcagacgaagcccgccgttactacatcggcatcgtcggcaagtacggcgcacaggtgcaggcgctccttaaaaaagccgccgcgctcgacatcgccatcatttgcccgctgcacggcccggttttaaacgaaaatctcggctattatcttgataaatacaacacatggtcgtcctacgcggtcgaggacgagggcgttgtcatcgcctacacctccgtctacggccatacgaaagaagctgtggaggagcttgccgaaaagctgaatcagcgcggctgcccgaacgtcgttgtcgcagacctcgcccgttgtgatatggcggaagtcgttgccgatgcgttccgttacagcaagctcgtgctcgccacaacgacctataatgcgacgattttcccgcatatgcagagctttatcgaccatctcaccgctcgcaattatcagggccgcaccgtcggcatgattgaaaacggcgcgtgggcgcctatggcggcaaaggtcatgaaaaagatgctggaaacgagcaagaacctcacctacacggataccaccgtcaccgtaaagtgcgccttgaacgatgcctcccgcgcccagattgacgccctcgcagatgagttgtgcaagtaaactgaaattgaagctttaagcaacatcccggtcgtaaaatttcggccgggatttttgtgcaaaaagatgtcctgtgatggcctctcatgtccttgctttttgcgaaaaaatgtgttatactggctaaaagaaacaatagttcgattaaaacggtgtgcgtgagcgtgcacaaaaccgcgttttgcgtgcagtgaacgaacaggcctccgttttttaagggggatactatgcccaaaaatccgattgtattcacgctcgatggccgtcgctgcacctgccttttgccggagggaaaacccaagcggctctatgtgctgtgcgggtgggatatggaaaagctgatgactatactcgccgaagatgcgccggaggtattatttttttctacggaaatcgacggcggccgggatttcaccccatgggaagcggagcccatttggcccggtaagccgttttcgggcggcggggaagactacttaaaatacctgacagacacggcgctgccgtatttagaggagcgtttcggcgcgccgacggaacccgaaaactgtgcgctgcttgggtactcgctcggcggattatttgcgctttgggcgctgacgaaaacggaaaaattcggtgcaggtgcaagcctttccggctctttgtggtacccgcagtttttgaaatatttggagaactgtccgcctaaaaaggacaccgtaatatacttatccctcggcgaccgcgaaccgctcggcggcccgcccgtcatgcggacggtgggcgactgcacggaaaaggcgaaggagattttaagcaatcacggctgcaaggtgttcttcgagtggaatcaaggcgggcacggcaagggcgtcaccaaacgctggcagcgcgccgtgcgcagacttttgaccatgatggcaaaaacggtggaaaagtaagacagaatgcggttttaatcgttaatgatggtggaaaacggagaggtgcgaagcgtaatgcaagagcagatcgagcgggagatttcgaaaaacctgaccggcgaaatgcgggaaacggcactgaaatttactgcgtttttgaagtcgcacgggctgatgtttcaccgcgaccgctcgggcgactgggcggaaaagatctattattgggcgagatcggacaaaaattgcgtatgttttatcgcagtgaaagatcccgacgagcctgaaaatgtgtggacagtgtggtcagacgacagcgcggcgtatgaagcgccgttaggtgacgcggaaacgtcggagatcggcctgaaatacgtgaatcgctgcgaaaaatgcggcgcatgcggtggcggacgggtgaaaaccgtgttcggcaaacgcatttccggtgtgtgcatgtgtacgtttcgcgtggataatgccgatttaaatggtctgccgttcctgaaaaccatggtcgaattgcggctgaacgagattttgcagccgtgagcagtgaaatcgggctgaaaatggaggggtgtaggctaatgcgggcgttttcgcgtgttttgagctttatacatgaagacggtgtgtttttctgcggttttgaacgacgtgtggagcgaatttttgggtgaaagaaatggtaaatacagagaaaattgtgggctatttgaagaagacgtatcagccggatgcggttattgtttacggctcgtttgcagacggaagtgcgaatttgaatagcgattttgacgcgcttatcatcgcggggaaagaaaaagcacacgattcgtccattgtggacggcgtggtgctggacgtgttcgtatatccggcggaaacgtttgcagcggactatgacccggaggagtttgtgcaggtttgggatgggaaaatcgtactggacgagcacggcattgccgggcagttaaaagcgaaagtccttgactacatcgagcatcttccgaagaaaacggtgacggagatcgcgcaggaagtggaatggtgcgaaaagatgctgctgcgaaccatgcgggaagacgttgaggggtactatcgctggcactgggtgttatgcgacagtctggaaatctactttgatataaagggtctgcattattatggccccaaaaaggcgctgcggcttatggaaaaaagcgatgcagaggcgttcgggttatatgcaaaagccctgcgggaatttgacagggaaagcttatctgcatggatcgattacttaaaaagcatggtgaatatacggccgaacggggcgttggagcgataaaaaccgtggactgtgcgtgaaaatggggcactttcggagatgctgttttggcggaaagcggtt

SEQ ID NO: 1727 - DNA, 7926 bp, Unknown
  gut microbiota DNA sequence
ggcaggacatgccgcttgcgacgcggatgcggccgcggacgctggaggaatttgcggggcagcgccatttgctcggcaagggcaaggtgctgcggcagctgattgaagaagaccgcgtgtcttccatgattttctggggaccgccgggcgtgggtaaaacgacgctggcgcagatcattgcggcgcgcacgaaggcgaatttcatcaatttcagcgccgtgacgagcggcatcaaggaaattcgcggcgtgatgagcgaggcggagcagaaccatcgtatgggtgagcgcacactgctgtttatcgacgaaatccaccgctttaataaggcgcagcaggacgcgtttttgccgtttgtggaaaagggcagcatcgtgctcatcggtgcgacgacggagaacccctcgtttgaggtgaacgccgcacttttgtcgcgctgcaaggtgttcgttttgcaggcactttccgaggatgagcttgtggagctgatgaagcgcgcaatcaaagacccgcgcggcttcggtaaccagacggtggaaatcaccgatgagatgttgaaaatgcttgcagcgtttgcaaacggtgacgcgcgaacggcgctgggaacgctggagatggtcgttttgaacgggcaccgcgagggcgacaagacaaccgtgacgatggagacgctggagcagtgcatcagccgcaagtcgcttttgtacgacaaaaccggcgaggagcactacaacatcatctcggcgctgcacaaatcgatgcgcaacagcgacccggacgcggcggtctactggctttcgcgtatgctggaggcgggcgaagacccgctgtatgtggcgcggcggctcattcggtttgcgagcgaggacgtgggcatggcggacagccgcgcactggagatcgccgtggcggcgtatcaggcgagccattttatcggtatgccggagtgctcggtgaatttgacgcacgccgtggtgtatttgtcgatggcgccgaaatcaaacgcgctgtatgaggcgtatgagagcgcgaaaaaagacgcacagaaaatgctctccgagccggtgccgctcgtcatccgcaacgcgccgacgcggcttatgaaggagctgcattacggcgaggggtacgaatatgcgcacgatacggcggaaaagctgaccgcgatgcagtgcttgccggattcgcttgccggaaagaagtattacagaccgacggaacagggcagcgaagcaagggtgaaggagcgactgcggcagattgaagcgtggaaggcggagcggaggaagaaatgaggttgcgttgagcaaaacttttgacagcgattgacgagagagcgtgaaaattcggaggtattttatgttggcggttaagttttacgaagatgtgaaagacgagctgctgcgttttgcggttgttattgcgaagcatgacggaaaatgggtgttttgtaagcacaaggagcgcgagacgctggagtttccgggtgggcacagagagacgggcgaggcgattgcagagacggcgaagcgcgagcttatggaagaaacgggtgcggtgaaatttgagattcgtccgatctgcgtgtactccgtgacgggcaaaacgcgcgtgaacgaggcgggtaaagaatcgttcggcgggctgttttatgcggaaatcgcatcgtttggggagatacacagcgagatggagaaaattgtattatgcgacgctctgccggaaaactggacgtacccggaaattatgccggcgcttttgaaagaggcggagagacgggggttcggcgtataaacggacataaagaaagcacgcagagcatgaaaatctgcgtgctttttgtgtgtattgtattgacttgaagcgccggggcgtcttcagtttttcggtttgtttttttcaaagaggatggagagccctttgaggagcaggtcgtcatctaagatgatcttgttgcggcaaaggggcgcgatgacggaggaaagtccgccggttgcgacgaccgtgcagggggtgtttaattccgcgttgatgcggtcgatgaggccgtccagtgcgccggcgttgccgtagagcaggccgcttttgaggcaatctacggaatttgtgccgatggtgtgcttcggcagttcgaacgcgaccttcggcagctgcgcggtgcggcttgcgagggcatcgtgcgagacggccacacccggcagaatcatgccgccgcggtatccgccctccgcatccagaacggagacggtggtggcggtacccatatcgatgatgatctgcgggaggggatagtggtggatgcccgcgacggcgtccacgacgaggtcgctgccgagctgggcgggattatcgatgtggatgcgcaggccggttttgatgccggggccgacaacgagcggcgtgaggtgcaggtatttgtgcaccgcgtcgcgcatggtgagcgtgacggccgggacgacggacgagagaatcgcgccgtcaaccgcggtgatgtctgcgcggttcatatcaaacgccattttgagcatggcggcatattcgagcaccgttgcggtggggtttgtggagacgcgttcgcggaaaatgacctgtccatcggcacagcagccgatgacaatgttggtgttgccgatatcgatggctaagatcatgggaggacctccttttaatctgcttttttagcgggtgtttgaataaacccggcttttaaaaggacgctgccgacggcgccggtgatgacggtggacgcgagcatctcgaacacggcattgacgccgacgaacgcgcagacaaacagcagaatgttttggccgttgatcaagccctgcatgtactcggtttgcccgaaaagcaggatgagtgcggacatgaagaaaagcgtatttaagaacgcagcggcgaagcccgtgacgaagcacgcggcgacgcgattcagcttactgacgctgcggaagatgtaaccgagcaaaaagccgtccagcatacgcgggacaaagcacagcaaaatggagaaaaacgggttgatgctaaaaagcgtggacccgagcatgctcacaccgccgatgccaatcgcctgcagaaagcttgtgaggccgaagacggatcctgcgatgagaccacctacaggtccgagggccagtgcggacacggcgaccgggataacgttgaacgtgatggcgagcggcccgatgttcagatagccgagcggcgtaaaggacatcagcagcaaaagcgccgtcatcaggccgagcagagtgagctgctttgcgttgaatttcttgttcatattcaattttcctttcttgttattattctccgtaggagatacaatacaatacgaaaaaagtatagcacagattttgaaaaatcgcaatgttttctattgactttgacgcggcgtaaagtgataaactgggcttagcccgagaggggaacgaaagatgaaaagtgagcccaatctcgccacctcaagcagggacgagaaattctgtattgcgatactgaaaagctgtgctatactgaaattaagaaattcagttgtattgaaaagcttgattttggaggtgcacagtggaaaataaggatattttaaacgctttgcagaattatgaaatgacattcggaacggcagaaaacatatttagcggcggacttttgacagatgcagagcgcgattttgtgatgcgggatagcaacgcatttttgtttgggcttatcgcagatcaatcggtgaaagcggagaccgcatggtcactgccgtataaattggcgcagcggttagggcatttttccatgcagaagattgccaaagaaagctcgtcggaagaaataggcacactgctacgcacaaagccggcattgcatcgctatcctggcaatttggggcggtatttgtggtcggcagccgaaagacttacatcggaatacgacggctgcgccgagaatatctggggcaatgtgactgccatggagatcgtagagcggttggaggcgttctctggaatcagccacaaaaaggcttcacttgcttgtttgctgctttggcgcgatttgggtgtcgaaatatcagataaagaaaatatagatattgcgtatgatgtgcatattcggcgtatttttctgcgcgccgggttctgcgaaaaagattcattgaaagacgtaacggaagcggcgcggcggctgaaccctaagtttccgggttatttaacttcgccgttctgggccttaggccgaaatatctgccggccgacggagcccttgtgcggacaatgtccgatacgacccttttgcgcacggcgtttggataaaactgaaaatctccgtgcttgaattttgcacagtcaggaaagcgggagattcagcaaatcgatttgctgattccggtgaaagagaagacataaaagagaacataaaaaaactacggtgctcgcgggtaccgtagtttttcttatatatagggtttacagcgttttaatgcagcgcttttttgggacagaccttggtgcatgcatagcacaggatgcactccgtggcgtttttgcgctttcggctttctttgttgacctcgacgttcatcgggcagaccttcaggcatttgccgcattggacacatttgctttcatcgcaatgtacgcgcaggagtgaaaaatagctcatcggctttaagaagaccgtgatcgggcaaagatatttgcagaacgcgcggttatccttaaaaataaacgcgaacgcgatgccgccggcatagtaaagaatgttgccgatgaggaacagccagaacatgatgcgctcgaggttcgagaacttcatcaggaacagggcggagacgagcgcgaacgagagcgcgaacatcacatagcgcagcgcacccagcttttctttgcggggcttttgcggcactttgaacgggagcaagtctaagaccatggctgtccagcaggcataaccgcaccagccgcggccgaaaagcagcgggccgaaaatttttgcgacggcgtagtgaatcgtcgccgcctcgaacacgccggaaaacagatagtaccaaaagccctcaatctgcatgttctcctgcgacatcagccccagatacacgagcatgtaaagaccgactgcaagctgcacgaactgccgcgcatagtgttttcccgcggtgaaaagcgccaagccgaccgaaaggcaagaacctatgtagctgaaattgaataaataaaacaggttgctttttgtgagccacagcgtaaccgctacgccttcaaaaagcagaaacatcaaaaccgatgcccgatactttttcaagatgagcctccttgtaactgtgctttgcacatgttgtgcgtttgaaaatttaattttacgctttcattctaccatatcccgtataaaacacaagggaaatctatcgcataacggaaaaggcattttatgaaagaagcggggctttgtgcggcgtagggcgggaatgggggaaatgagcaaagatgaggcggaaaaacggcttattctgtacacttttccgccttaaaaaacattgacatttggtaccaaaatcgctataataaagaacattagtgtacgcatttacccgtttttcggaattacaaataaaggtggtttatttactatggcagaaaaggcatattatgttacagaggaaggccttgcggcattgcaggctgaactggaggatttgaaggtcaaccgcagaaaagaagttgcggaaaaaattaaagaagcgctttctttcggcgacctttccgagaacagcgaatatgacgaagcaaagaacgaccaggctatccttgaggcgcgcattgccgaccttgaagtgatggtgagcaacgcacgcgtcatcgagaaggaaaaccttgcggcggataccgtgcacatcggttcttccgtatttgtaaaaacgaagcgtgcggacggcagtgaagccgagcgcagcttcagcattgtgggctctaacgaagcaaacccgcgccagggcaagatctccgatgaatccgccgtgggcaaagcacttgttggcgcgaaggtcggacagaccgttgaagtggagacacccgcaggcatcgtggagtacacgatcatctccgtatcttaattgagaatcaggcggtgcggatggaaaatccgcccgctttttttgtgaccgccgtgcggcggggaaaggaaggcagaaaatggcagaaaagaagaccccggaaacggaagcggaactgaccgaagtgctgcgcgtgcgcagagagaagctcgctcagcttgtagaagacggcaaagacccgttccagatcacgaaatttgatgtgacgcaccacagcgcggaaattaaagacgattttgacgcgcttgagggcaaagaagttgtggtggccggccgtatgatgagcaagcgcgtcatgggcaaggcatcgttctgcaatgtgcaggacttaaagggcggcatccagtgctatgtggcgcgtgacgccgtgggcgaagacagctacaaagattttaagaaatttgacatcggcgatatcatcggcgtgcgcggcgaggtgtttaagacgaagaccggcgagatttccattcacgcttcggctgtgacgctgctctcgaagagcctgcaggtgctgccggagaagttccacggcctgacgaacaccgatatgcgctaccgccagagatacgtcgatctcatcgtgaacccggaagtgaaggacacgtttgtaaagcgctcgaagatcattaaggagatccgcaatttcctcgacggcagaggatttatggaagtggagaccccgatgctggtttcgaatgccggcggtgcggcggcgcgcccgtttgagacgcattataatgcgctgaacgaagacgtgaagctgcgtatttctctggagctttacctgaagcgcctcatcgtaggcggccttgaaaaggtttacgagattggccgtgtgttccgcaatgagggcgtcgatacgcgccacaacccggagttcacgctgatggagctttaccaggcctacacggattattacggcatgatggagctgacggagaacatgttccgttaccttgccgagaaggtgtgcggcagcgcggttatcacgtataacggtgtggaaatcgacctctcgaagccgtttgcgcgcttgacgatgaacgacgccatcaagaagtatgcgggcatcgactttgacgaagtgaagaccgacgaagaagcgaaggcgcttgcaaaagagcaccacattgaatatgaggagcgccacacgaagggcgacatcatcaacctgttctttgaggaatactgcgagaaggagctcattcagccgacgttcatcatggaccacccgctggcgatttctccgctgacgaagaagaagccgagcgacccgacgaaggtggagcgctttgagctgttcatcaacacgtgggaaatgtgcaacgcgtactccgagctgaacgacccgatcgaccagagagagcgttttgcggcgcaggacgcggcgtttgctgcgggcgacgaggaagcgaaccacacggacgaggacttcctgaatgcgcttgagtacggcatgcccccgacgggcggtatcggctacggcatcgaccgccttgtgatgctgctgacggactccccggctatccgcgatgttttgctgttcccgacaatgaagtccttagatggtgtaaataagaaaaatgatgtaaaaaatcagcctgtcgaggaaatgaaagcagagcctgaaaagattgatttctctaatgtaaagattgagcctttatttgaggaagaagttgattttgatacattcagcaagtcagatttcagagctgtaaaggttaaagagtgtgttgcagtaccaaagtcaaagaaactgttacagttcactcttgatgacggaacaggcacagacagaaccattttaagtggtattcacg

SEQ ID NO: 1728 - DNA, 1259 bp, Unknown
  gut microbiota DNA sequence
caattcttttgatcgcgctcaaattccgctcaatcaagcttttcgatggcctccatgatctccttctgatctttgcagacctcttcaaaaagcgattcgtccgtcagcggaacggcgccgcgcacagcctccgttaaagcggatgccgatttttgcaggcggtcgaagccgaggttctgtgccacaccctttaaggtgtgcgccgcaaggaaagcatctttccagtttttggcttccacagctgctgtaagccggttataggtcgggtcggttgcgtatttgcgcacgaacttgccgatcatcgcctcattcgggatgcgtttcatcacgtctttgaggtcgccgccgattttctgatataattcttcaagcttcataatctgtcacctttctgcaattcctatctgcatgccgcatgatttacattcgcgtgtttcgctttattttcgtacatgcgcaggtctgcctgccgaatggcttcggagagcgggtgtacgcggtatacgccgccaaggctgacatcaagcttcacctcggggtaatccggcaattttgtcttctgcacggcgcgtctgagctgctctaaacgcgcatagaaaacctcttcgccgatcttggagaagatgaggaggaactcgtccccgccgtagcggatgagcgtatcgctgccgcggatgccggactggattgtattcgcgatggttttcagcgcttcatcgcccacagggtgaccgtatgtatcgttaatctgcttaaaaaggtcaacatccacgattgccacggcatctgcgttttccaaattggactggaaactctcaagatacagtctcgtgtacgttccggtcagggtatcgcggtagaagttcataaacgaagaacgcgttggcgcatcgttgtcgccgccgcagcgtgcgcactccgcttcgtcttcatgcgaagcaatctccagtgtgcaggtacgtccgttgacgttgatatgtttagaaagcacgaagtacatttgcctgtcacgcatttcaagcttggtgacccattcttttccttccagagaacgggaagaaatacagttttcgcacggctcgcttctaccccaaatttcatagcagtgtatcggcgtagggattactttgtcgccttcatccagctcaacgatctcgtttgttttcggatcaacaaggcgcaccacttcaaacacacggctcaagtcacccaagaggtgcgctatgttgtcttccatgcacttttcaagcgtttcttct

SEQ ID NO: 1729 - DNA, 10827 bp, Unknown
  gut microbiota DNA sequence
catactgtctaacaaatggggtgcagttcagtgaacggggctgtttttgcgcagcaaaaaactccgcttgctcatcagcaaacggagttttcgtttatcgctttgaattttacttattccagctcgaatgcgccggtgtagaggcggtagtaggtgcctttctgcgcgatgaggtcgcggtggctgccacgttcgatgatgtggccgtggtcgagcaccatgatgacgtcggagttctggaccgtcgataggcggtgcgcgatgacgaacacggtgcggcctttcatcaaggcgtccatgccggactgcacgatggcttccgtgcgggtatcgatggaggacgtcgcttcgtcgagaatcatgacgggcgggtctgcaacggcggcgcgggcgatggaaatgagctggcgctggccctgtgagaggccgctgccgtcgccggaaagaacggtgtcatagccctgcggcagcatgcgaatgaagccgtcggcgtttgcgagctttgcggcggcgatgcactcttcgtcggtggcatcgagcttaccgtagcggatattctccatgacggtgccggtgaacaggttgacgtcctgcaaaaccacgccgagggaacggcggagatccggcttcttgatcttcgtgatgttgatgccgtcgtagcggatcttgccgtcagaaatgtcatagaagcggttgatgaggtttgtgatggtcgttttgcctgcgcctgttgcgccgacgaacgcgaccttctggccgggctctgcgtaaagcgtgatgtcatgcaggacggtcttctccggggtataaccaaaatcgacgtcctcaagctctacgtgaccggtgagctccgtataggtgaccgtaccgtccttatgcggatgcttccatgcccaaaggccggtgtgcttgtcggtttcggtgagcacgccgtttttcttctcggcgttgacgagcgtgacgtagccctcgtccttttcgctctcggcatcgagcagagagaagatgcgggaagcgcctgccatagccataatgatggacgagatctgctgcgtgacctggctgatcggcataacgaagttgcgggagagctgcaggaatgacgcgatgccgccgagcgtcatgacacccatgccggtgagggtcaggttcggtacgccagcaagtgcgagaccgccgccaagcacagcgatgagcacgtaaaggaagtagccgagtgcgttcatgatggggccgaggatattggcgaacttattcgcttcggaagcgtttgtgaagaggtcgtcgtttcgtttgtcgaactcgacctttgttttgtcttcgtggcagaagaccttgatgaccttctggccgttaatcatttcttcgatgtagccgttcacattgccgagggattgctgctggcgaacaaagtagctgccgctttttgcggtgaccttgccgacgatcttaaacatgacaaagaggaacgcgaccaggaacagggtaagccaaatgctgagcgtcagcatagaacagaacacggaaacgaccgtgaagatggaggaaagcgtctgcggaatgctttgggaaatcatctggcgcagggtgtccgtatcgtttgtgtagaagctcatgatgtcgccgtgggtgtgcgtatcaaagaatttgatgggcagcgtctgcatgtgctcgaacatctcgtcacgaattttctttaacgtgccctgtgaaacaactgccatggtgcggttgtagaacagcgtagagaacgcgccgatgacgtaaatgactgccatttggagcagcgcatacagaagaccgctgaagttcggattggattcgagcaggagcggggagatgtaatcatcaatgagggactttaaaaacagggaggacatgacgcttgcgaaagcgctcaccgcaatgcagatgaacacgaacacaaggtgcagcctgtacggtttcatataggaaagcaggcggaataaggtcttcttatcgagctgcttcatgctttctttcatggagagtctgggaccattaggacgcggtggcattgtcaggatctcctttcgtctgggattcataaacttcgcggtagatcgggcttgtttgcatgagctcgtcatgcgtgccgcagctgacgatcttgccgtcatctaagacaaggatcatatcggcttcctgtacggaggcgatgcgctgggcgatgatgatttttgtcgtgttcgggatttcctttgcgaacgcgccgcggataagtgcatccgtgcgggtgtcgactgcgctggtggagtcgtccagaatgagaatcttcggcttttttagcagcgcacgcgcgatgcagaggcgctgcttctggccgccggagacattcgtgccgccctgctcaatgtaggtatcgtagcctttagggaaggtttgaatgaagtcatcggcctgtgcgagttgacaggcatggcggatctcctcgtcggtggcgttttcatcgccccagcgcaggttgtccttgatggtgccggagaacaggacgttcttttgcagcaccatggcgacgtcgccgcggagggtatccaggtcgtatttgcggacgtcgatgccgccgaccttgaccgcgccgaggtcaacatcatacaggcgcgggatgagctgtacgaagctcgatttggaggagccggtgccgccgatgacgccgaccgtggcgcctgccggaatgtgcaggttaatatcggaaagcacgggtttgccctctgtgccgtgacgatagctgaactggacatgctcgaaatcaatgctgccgtccggaacgctctttacggcattttcgggggtggtgatgtccggggtctcgttgagcagctcaacgacacgctcgccggaggtacgggacatggtgagcatgacgaagatcatagagaggcccatgaggctcatgagaatctgcgtggcgtaagacagcaggctcagaagctcgccggtggaaagaccggtcgctgcgtcaccgccgcaagcaacaatggtacgtgcgccgaaccaggagagcaggagcaccgccgcgtacatgcaaagctgcatcaagggggcgttccatgcgagctgctgctcggcttttttgaagtccttatagatattttcggaaatggcggtgaacttcttattttcgtgatcttcacggacaaaggactttaccacgcggatgccgtgcaggttctcctgcacaacgctgttcagcttatcataagttctgaacacgcgctcgaagatcgggtgcgttctcgtcatgatgaagtacaggccgagaatgagcaccgggatgatggcaaggaagataagcgagagcttggcgtcgatgccgaatgccgcgacaagcgagaaaatcgccataagcgggctgcgtaccaccatgcggatgatcatttggtaagtgttttgcagattcgtaacgtctgttgtcagacgcgtgacgatacttgcggtggaaaacttatcgatgtttgaaaatgaataattctgcaccttatagaacatgtcgtggcgcaggttgcgggcaaagccactggaggcaatggctgcgaatttaccggaaatggcaccgcagaaaagctgacccagtgcggagagcaacaggacaatgcccattttgacaatgtaccccatatcgcccatgtcaatgccgtaatcgatgagattcgccatcaaaagcgggatgatgacctcgaagacgacctcaccgctgatggtgaccatggccaatatggaattctttttctgttcgcggatgctttccatcagttttttaaccatctgcaccgctcctttctttcttttgctgcttttcggcaaaggcagcatctacatttatttttgcgcgccgtaaataagtgagcatggtttctttttcattttgcgtgaagcctttcgttaaaacggcttccattgcttcgtggtcggcgcggatatcggccaaaaggttctctgacttttccgtcagggtcagacgacgcagacgggcgtccgtttcgccggtgtggcgctccacaaaaccgtttcgcacaagcatatccaccactttggaggcggtggaacgcgtaatgccgaagcggcgctcaatatcgcgcaaatacacgggcccgtctttgtgatcggcgatgaactggatgacccatgtgtttgtgccggtgaggttttcgtgttcctttttatgggaatacgtatcaatataccggcgcatggtggtatccagcacatgcaatgcatggccgatgggctctttttcgtgattgtgcattgttaccatcctttcatctgttttcgcggggagaaggccccgccgtacagcaggatcgaatctgctcctatgtgaacaatcatgcgcttaattgtttactctggcatatattataatcacttgaaagtttgttgtcaacaggaaattaaaaatcttttttgcggggtgttttcatcttaggcggaatgtgctaaaataaaacacagtgaaccgatgtgccgcaaattcggacggcgaatgaatcgatgaaaggaaagcccagaggatgtgggcggtgtacgatatatgaataagaaagtgaaattggcgtttgttttggcaggaatcggcatctttgcggcggctgcgctgcgctgcgtgcagatgctctgcttttttgattatgacacgggctttgtgacggacagcggactgttgacgtatatttactgcggtgcggcgatcggcgtatcgcttctctgcatgcttttgtgccgtgtggacaaaaagctttgcgcgcgcatagagacgaaaagaaacgcggcggcgggtgcttctgcgcttctgatgtgtgtatttttgtttttgtgtgcggcagcgcttctgcgggacttttacttataccgcaacaatcagccgacctactttgtgcaggcttcgcacgtgacgacgcatttgccgtttgcggtcttaacgttgcttttcgcgatcgtttctctcatttttgccattatatggctgacgggcgagggctttccgagcggcacgggcgggctttgggccatcggttccgtttggggcatttcgtatatgatcgtgacgttcatgacgtattccgctgtggcgacgacggaggagaatatctttaccgtgggtggcggtgcgatgatgctgctgttcctgctttccgaaggcaagctgctctccagcgcgggcggcaaaaaggcgctgcgcagcacgtatgtgttcggcctgccggcggcggtgctttggatgacgtatgtgatctcgaacacggtgctcatcattgcggggcgcgggtatgcaacggagatgccgtatgtgatccagcttgcgatgctgtgcctttctgttcacagcctttgcctgctgcttacggtgagcgggcagcgcgcttctgcgaaagcggagagcaatttagaagaaaatgctttaaaagacacgggaaacgcgtgaattttctgaaaattacggaaaaagtttgcatttttagcagttagcccttgtaaaatcctgcgaaatgctataaaatagaattgcaaattatgcatccacaattatcaggaggtatacaatcatggcagttaaagttgcaatcaatggtttcggccgtatcggccgtctggcgttcagacagatgttcggcgctgagggttatgaggtcgttgcgatcaacgatctgacgaagccctccatgctggctcacctgctcaagtatgacaccgcacagggcggttactgcggcaagatcggcgaaggtctccacacggtttccgctgacgacgaggctaacaccatcacagttgacggcaagaccctgaagatctacgctgagaaggacgctaaggaccttccgtggggcgagatcggtgttgacgttgttctcgagtgcaccggcttctacacctctaaggctaagagccaggctcacatcgacgcaggcgcaaagaaggtcgttatttccgctccggcaggcaacgatctcccgacgatcgtttacagcgtaaacgagaagaccctgacggctgatgacaccatcatctccgctgcttcctgcaccacgaactgcctcgctccgatggcgaaggcactgaacgattatgctccgatccagagcggcatcatgagcacgatccacgcttacaccggcgaccagatgatcctcgacggcccgcacagaaagggtgacctccgccgtgcacgtgccggcgctgctaacatcgttccgaactccacgggcgctgcaaaggctatcggccttgttatcccggagctgaacggtaagctcatcggttccgcacagcgtgttccggttccgaccggttccaccactatcctcaccgctgttgttaagggcgctgacgtaaccgtcgacggcatcaacgcagctatgaaggcagcttcctctgaaagcttcggctacaactgcgatccgatcgtttcttccgatgttatcggcatgagattcggttccctgttcgatgctacccagacgatggtctccaagattgctgacgacctctatgaggttcaggtcgtttcttggtacgacaacgagaactcctacaccagccagatggtcagaaccatcaagtacttcgctgagatctaatttcggcttaggcgctggaaaaatcaggtgttttgacgctgcatcatgcagcaaaagactgaattgattttcgcaccctttcttccgtggttcatggaggaaagggtgttttttatccgaaatacgtacacacggcaaagaaaggcagggaaaatatgagagaactgcacacagaaagacttttactgcgcacgccgcgggagagagatgcggcggagatcatggccatacgcaacagcgctttcgtaatgaaaaacaacgtaatggaagtgtttaataaagagcagatggttcatttgattcatagggaaatcgattatgaatacacatggtatattgagcgaaaagaggacggcgctttgcttggtatgattgcggcggaggaggacggcgttcggttcgatgtgcgctcgagatgtctttcgtattatctcggggagcaatatacgcggcagggctatatgaaagaagcactgcgggctgtgctgcatgaactattcaccgaagaagatctggaagttgtagcagcgcgtgttttcacggggaatattgcttcggaaaagttgctgagatccttggggtttgtgtatgaagggtgtatccgccgctgcgtgcgtacgtcagaaagcgaaatccgcgacgacatgcagttttcgctgctgcgggaggaatatttcgaggcggaaaaataattttacaaaaaagcttgacttagagtgtactttaggttgtaagatatagaaagcaaaatgcttggaattttttacataaggagtatgagtaaaatgtctggaaagaaattaggcttcggcctcatgcgtctgccgtctctggacccgaacgacccgggcaagatcgacattgagcaggtcaagaaaatggtggatacgttcatcgagcgcggctttacgtattttgacacggcgtggatgtactgtgcattcaagagcgaaaacgccgtgaaggaagcacttgtttcccgccacccgcgcgacagcttcacgctgacgacaaagctgcattcggcgttcgtgaattcgtttgaagaccgcgaccgcatttttaatgagcagatggaaaagacgggcgtaacgtattttgattactacctcatccacgacatcaacagccacagcattgagacgtacaataagttcgattgcttcggctggattcgcgacaagaaggaaaagggccttgtaaagcacatcggcttctcgttccacgacggcccggagctgttggacgaagtgctgaccgcgcaccccgagtttgagtttgtgcagttacagcttaactatctcgactgggaaagcgccggtgtgcagtccagaaaatgctatgaagttgccgaaaagcacggcgtgccggtattcgtcatggagccggtgaagggcggcacgctcgcaaacgtgccggaagaagtgacgaagctgtttaagggctataattcagaagcttccgtaccgtcttgggcaattcgtttcgcagcgagcctgccgaacgtgaagatcgtgctttccggcatgagcgatatggaccagcttttggacaacacatcgtacatgcaggattttaagccgctgaacgatgaggaaaaagcgctcatcaaaaaggcgacggacatcatcaacgcgagcatcgatattccgtgtacgggctgttcgtactgcacggacggctgcccgatgcagattgcaatcccgaagtatttctcgctgtacaacgccgatatgcaggagctgcgcggcaggggaatctctccggacgagggctggacgccgcagagcgagtattacgagaacgtcgcaaagcacttcggcaaagcgagcgcgtgcattcagtgcggccagtgcgagggtgtatgtccgcagcatttgccgatcatcgagtacttgcagacggtcgcaaagcattttgagagagagtaaacacaaggctttctataacgatagttaaaagtttcgcccgcctattgaaaaaggcgggcgaaactttttacgttgcaaactgtgctttacagcggcagatatggcaatatgagttcacacacaagcacggtggcgctggcgataatggcgacggtgagcaggcttttaccgcggaatgctaaaatcaaagcggcggcaaagccgagcgcggcgctgatggcgctgccggtggcagtgagaattgccgggaaggtcatggcggaaagcgtggcgtacggcacataatagagaaacgagcgcagtgtgcggttcgtgatcttgcggcggatgagcgtcagcggcagcatacggataagatacgtaacggccgccataacgagtatgtaaaggaaaacctcaaccctcatgcggcatctccttttccggttctgcgggctcatccgggatggggaacagcagcgctgcaccgcctgcggtgataagcgtgatgacaatgatgcggaagcccgaggaaatgctgcacagcaccggcagatacgtgaacagtgcggaaagcaccatggaaaggacgaccacaccggcaacgacgcggttctcttttgcaggcggcaggatgatggcaatgaacataccgtagatcgcgatgccgagcgcgttcgtcaaaacggccggcagaatgttgcccgccgccgcgccgagtgccgtgccgagcacccagcccggaatggcgacggcgatgagcccatagctgtaaaacggtgagagaggctccctttggctgacgctgacggcgaagatctcatccgtcatgccgtaggcgatgccgaggcggtgcccaaggggcaggctcggcgagagcttttgcgagagcgcgcacgacatgagaaaataccgcaggttgatgatgagctgcgtgaatgcgagctcgatgagcgacgcgccagatgcaatgatggtgagtgctgcgaattgcccggcggaggtgacgtttagggcggagagcacggaggcttcaaacaccgaaagtccgatgcctgcggcctgaatgccaaacgcgaacgaaacggcaaagtacccgaagcaaatgggcatgccatctttgagtccgcttgaaaaatactgttttctggtcatgatgaccttctccttctttgctgccgcacccaaatgcggcaaaatttgcaaaatacaaccgtttccaaaagaaaagcacagaaaaaggtgtgtaaagtatgaaaaaaggcggttttcaccgccttgaaatgggcataaaaaaccccgcccgaccgtaacgtgctctcaataacctgctacgtaataagcaggtgggtgccctcccgcaggtttcgcgctcccttcctccggtatccggtcaagccgggccgggaggtctgcagtccgcctgcggagccgagctccctaaaagttgagtgtagggttattttgcacggtccgcgcatcgggcaggtgtctttacatgatcttgaacggggaaagaagattactcctcttcttcctccatagcctgtgcatagcgggtctcgaaaatttcggcgagcttatccagcaggtcgtcgtcttcaatctcgcaaagctgctcctctccgttctcgtcttctacgacttcaaagatgtagtactcatctgcgtctgcaacttcgctttgggcgtcgcgcagagtggggacaagtgccataaagtagccgtcatcgttctcgagttcgtcgatgatctcaaattcgtgctccgtgccttcatcgtcgatgagggtgatgagctctgcttcgtattcctggttgttgtctatactcatgggaaaagccttctttctcagtatattcgccgttctgtgatttatgcggcggagcagaaaagctgtggaaaataagcccgttgcttttgcctgcaagaataattgtatcgtgaatgcggaagaatgtcaagcttcattttgcgaaaacagaatatacaaataaaaaataaaatcttcaaaaaaactgttgacaaagtagatggatggtgctaatatataggtgaaaagagaaagaactccagaacgcaaagtagatcgggaaaaccgtaagaggttttcttggtggaggctcaaaaaagtctcggtaaaagatcgaagcggttcagcgcgcggaaagtattccgaaggggagagagaaaggcgcgggggaaactcttgaggcagtatttgcaaaggcggagcttcaaatgttcttcggcttccgggaaatgtgatgaaagagataaagggacaaaaagccgaagcggagaaacgggaacat

SEQ ID NO: 1730 - DNA, 14078 bp, Unknown
  gut microbiota DNA sequence
cgttttgaacatgtggaaacaggcaaaacgtgaaaagaggcaaagctgcatgagccgcaaaggcaaatctattgaaagaaagcgggtgaggccaatggctactgaacctcagcagcagaagatccgtggtgcgttgcgcctcggatccctgaagtagactgaatatttgcacacgagtgtttcaagctttatgaaagcgcgggatcgcaaaagcgagtcccaaaaggttttcgtggtacagcaaagataagtaggtcgaaattaacatatagaattatacatgggctgtacaaagtgtacggacgtgtgtaaggacaggtggaaaacgccaaagaaaaaatcaaatacagtttttgagaatatacatggagttgtgtccaatgcacaaatgataaactctgaaagaccgacgacattctgaaagtaatgcagagtgcaggtataaaaaagagaccgatggtttcaagcagaggaaagtccgatgtattagtatcagtttaaattaacttgagatgtgtgcgctgagcgtacaccgcacaagatgtgcaataaaaagtaaagaacgagaggctttttcgggatgccgaaagagcctcttttgttttgtgcgataggggtatgccgtgcaaggagcgcggtttgcgtgttttttggtttaagtaggagaacggagcacgtatttgattctgataaagttttcgactgcgtgttgctttgcggtagaaaaactctttcgcgccgcacggaattgtatttttcgggagaatgtgctatactaacggtgttcgcaagacggtgtgcagaaaagctgcacttcaccaggaaaaggagcggtgacttatgagcgaaaacatggaaaaggtctatgacgtaatcgtggtgggttccggccctgcggggcttacagcggcgctgtactgcgcccgcgcgggctacgagacgctggtgctggaaaaatatatccccggcggtcaaatggtgacctcgaatgaaattgaaaattaccccggcttcccggaggcggtggacgggtttacgctgacgatgaacatgaaaaagcaggcggagcgctttggcgcgaagcagacctacggcaacgtgacggcactgcggttagacggtgatgtgaaaattctggagacggaagacggcacggtttaccgcgcgaaaagcgtcgttttggcacccggtgcggcaccgaggacgctcggcttgccgaacgaagacgctttgcgcggcaagggcgtttcctactgcgcgacatgcgacggtgcgttttataaagataagacggttgcggtcattggcggcggtgacacggcggcgggcgatgcggtttttctctccgcgatgtgcaaaaaggtatacctcatccacagaagagaccgcctgcgcgcttcaaagagctatgagaagaagctcgataagccgaatatcgagatcgttttcgatacggtgacggatgagatcctcgaaaaagacggaaaagtcggcgggctgcgtctgcgcaatgtaaagacggacgaggcgtgcgagatcgaggtgaacggcgtgtttgtggcggtgggcaatgtgccggcgacggactttgtacgcgatattcttgaccttgacgaaaacgggtattttatggcgggcgagagcacgaagacgaacgttccgggtgtgtttgctgcgggcgactgtcgtaaaaagacgctgcggcaaatcgtgacggcagctgcggacggcgcggtggcggcgcacggtgtggaagaatatttatcataagaaagaagagggcgctttgcccgaaacataaaggatagaaaatatgggaaaaatcaaagaactgcttataaaatacaaagagctggttttgtacgtggtgttcggcgtgcttacgacggtcgtgagctatgtttcttactggatctttacggattttctgcacatcccgtacatggtatcgacagcgctttcgtgggtgctttcagttacctttgcgtatgtgacgaaccgcaagtgggtgtttgagagccgcgcgcacggctttgtgccgattttgacggaggcggcgaaattttttgcgagccgtattgcgtccggctttatggaaatgggcatgatgttcatcggtgtggatctgctgcacgtgaatgataagattgtgaagctcgtcgcgaacatttttgtgatccttgcaaattatattttaagcaaactggtcgtttttcgtaagaaaaagtaaattgacgaaacgaggttatgggaatataatttataagataaagacatccggcctttggccgagacggaggcttttatggcgaaaagaaaacaacgccgcgatgagtttcaggatatttccagttactcctcaaagcaggcgtataagaaaaatcaaaaaaagaaaaaacggacgggccttaaggtctttttgagcttcatctgcgttattttggtgctggtgggcggcgtgatgatctacgcttccacggtgcttttgggcgacctgaagacgacgaccatcacgaaagacaagacggaactcggtatttccgaagaaacaaaatcggaagcgggcattacgaatattgcgctgttcggcgtggatgcccgcgattatgacggcggtacctttgccgggcgcagcgacgccattatggtgatgtcgatcgataacgtgcaccacaaggttaagctgacgtccatcatgcgcgatgtgcgcgtgtatatgggcgacggcagtccgtatgactccggctatgataagctgaaccatgcctatatgtacggtggcccggagcaggccatccgtgcgatcaaccagaacttcggtctcgatattcaggactacgtgactgtgaatttctccgccatggcgaagattgtggatgcgttcggcggcgtgaatattgatttgacggaagatgaaatcagtgagatcaacaaaaatatgtatgcgctggcggcggaatcccctgaatcaatggcaggcgatgtttctacatacgcgccgctttcggcgggcgagggcgtgctcttgaacggcgacgaagctgtggcttacgggcgtattcgtgccatcggcgacgataacggccgtgtggaacgccagcaggaggtgctttctgcgcttttgagcaaggcaagttctatttccaagcttgaatacccgagcatcattcaacagcttgcgccgctttgcgagacttctttgacgtttgataagatgatcggcctggcacagattgcgctgacaggctttgacattgagcgcctttccatcccgagtgatgtggagggctatgcctccgattactgcgagggcggcggttggatgtggacgtatgacaccgatgttgcggcacaacatatccacgaatttatttacgaggatgaaaactgacccctgacggtcgcgtgaccgaacctgtacatatggcggtgtgatgccgcagacgagaaaggacaatttagctatgaaaaaaccgattttagttgttatggcggccggtatgggcagccgttacggcggcctgaagcagatcgatcccgttggcaaaaacggcgagattatcatggatttttctgtttttgatgccgtgcaggcgggcttttctaaggtaatcttcatcatcaaggagcagctttttgaggactttaaagaggtcatcggcgaccgcgtatcgaagtacgtgcaggtcgagtatgttttccagaagttggatgacctgccggagggctttacggtgccggaaggccgcgagaagccgtggggcacgggccacgccgttttggcggcacgcgactacattgatgcgccgtttgtcgtcatcaacgcggacgatttctacggcggcgaggcgtttaagaagatcggcgcgttcctccggaacgtgaaggaagacggtgaaaaggcacattgggcgatggtgggctatcatctgaaaaacacgctgaccgaaaacggccatgtggcacgcggcgtatgcgtggagaaagacggtgtgttggataccatcgtggagcgcacgcacattgaaaagcgcgaggacggcccggcttacaccgaggacgacggcgcaacgtggcacgcgctcgatgaggacacgaccgtttccatgaacctgtggggctttacgccggactttgtagacgcattgaagaaggatttcgtctcgttcctcgagaacgatgtgccgaagaacccgctgaaagcggaatacttcctgccgtttgtcgtcaacgaccagattcgcgacggcaaggcggacgtgacggttttaaaatcggcggacaagtggttcggcgtgacgtataaggccgataagcccgtcgtgatggcggcgcttgccgagatgatgcaaaacggcacatatcccgacccgctttggaagtaatttcaaaccgaaataagatacaaaaggggcgctgcggcgctcctttttgcgtatattgtgcgcttttttcgcgaaatgtgtgttttgccccttgcgaaacgcatgaaaaaaagctataatgaagaaaatcagtaaaatggctttttgcgggatgcgggcggcgctttttcgctgcggctctcttctgcgcgaagtctgccaaataaaactggaaccgaaaggagtaccacttatgaattattccaaagaagtggaagagatgtgtattgtagccaagggcccgaagcacggtccggctcccatcccggaagagggcaagtgggtacaggcaaaggaagttaaggacatttccggttacacccacggtgtaggctggtgtgcaccgcagcagggcgcttgcaagctctccctgaacgttaaggacggcatcattgaggaagcgctcgttgagaccgtcggctgctccggcatgacgcactccgctgcaatggcagcagagatcctcccgggcaagaccgttatggaagctctgaacacggaccttgtatgtgatgcgattaacaccgctatgcgcgagctgttcctccagatcgtttatggccgttcccagtctgctttctccgagggcggtcttgttatcggcgcaggcatggaagaccttggtaagggcgcacgctccatggtcggtaccatgtacggcacaaaggcaaagggcgttcgttatcttgagatgaccgaaggctactgcaccagaatggcactcgacgctgacgaccaggtcatcggctacgagttcgtttccctcggcaagatgaccgacttcatcaaggccggcatggagccgaacgaggcgtacaagaagtctatgggtacatacggcagattcaatgaggccgttaagtacatcgacccgcgcaaggaataaggagggcacgagaaatggctacatttgaaggttatgagagacgtgaggcgaaaatcctctccgtcctgaaagaatacggcatcaattccattgatgagtgcaagaccatctgcgaagagaagggcatcgacccgtacaccatcgtacaggaaacacagccgatctgctttgagaacgcaaagtgggcttacaccgtaggctgcgcgattgctatcaagatgggctgtacgaaggctgctgacgctgctgccgctatcggcatcggcctgcaggcattctgcatcccgggctctgttgctgaaaaccgtaaggtcggcctcggccacggcaatctgggcaaaatgctcctttccgaggagaccgaatgcttcgcattcctcgctggccacgagtccttcgcggctgctgagggtgctatcaagatcgctctgaacgcaaacaaggtcagaacgaagccgctgcgcgttatcctcaacggcctcggcaaggacgctgcgttcatcatctccagaatcaacggctttacgtatgttgagaccgagttcgatccgtacgcagaagaagttaaggttgtcagcgaaaaggcttattccaacggcccgcgtgcggacgttaagtgctacggcgcagataacgttccggaaggcgttgcaatcatgaagctcgagaacgtcggcgtttccatcaccggtaactccacgaacccgaccagattccagcacccggttgcaggtacctacaagaagtggtgcaatgagaacggcgtgaagtacttctccgttgcttccggcggcggcacaggccgtacgctgcatccggataacatggctgccggtccttcctcttacggcatgaccgataccatgggccgtatgcactccgatgcacagtttgcaggttcctcctctgttccggcacacgttgagatgatgggtctcatcggcatgggcaacaacccgatggtcggtgcaaccgttgcttgcgctgttgctgttgaagaggcttccaagtaagagctgcttctgaaaatcgcatattaaagcataaaaaatgctcccggtcgcatgatcgggagcatttttgcgtaaaataggatcccgggatatattgactgttcttatggctcggtatacccggggtttgctttataagatctggtcgtcatcgctggggatgtagaggaggatgtcttccactttgcagcttaagatgcggcagaggtcgttgatcgtggtggtgttgagcggtttattatgacgcagcttatcgatggtggagctggagatgtgatgatttttgatgagcgtataggtggattctcccgagctgcgcagcgtgttccaaaagggcgtgtacacgaccatagcttcccctcgctttccctgcataaaatatctatgtacctttatcttatgcaatcgttctgttcttgactatggtcgttaaatagactataatgtaaaaatgcaaggtaaagcgcttgataggcggggagagtaattatgattttgaacgcaaaggagatattaaagcagctatataactgctgtgatctcattgaggaaaggctgctcgacggcgacgaaaagccggggtgtgacctgcgaaaacagcttttaaaggacacggcttcgtttgcggcgcgtgtttcggcgcgcaagacgatcacagaggcggaagcgtcgtttttaaacgcactgacgggcagaaaagacacggcggaagtgtggcgacctgtctgctgtgagagggaaagcggcgtgccggagtccttttggtattttgtgcaggcggataaggccattatgcgccgacacgcaatgagccgtgaggcttcgatgaccgagagcttataccgctatttctgtgctgtgggagacgcgatggtcgcggaaaacttgtgcacgaaagacgctgcgcaagtggagacggagcggctttccgcttgcctgaaaacagcgtttgacaacgaccccgaactttgctaaactgaatttatccatttggtgaagcgaggggcgtttatgaacacatttgaaaagcttgaaaggttgacggagcttgcaaaaaaggacgagactttgcgcaaagctctgcttaaaacgcgcgaaaacaaggagccgattctctcattttgcgcgctggcgcgggaagcgggcgtggagctttacaccggcgagcttttggctgtgggcgaggaatactccgacaaccagtgcaagagcacaaacggcggcaaccctacgccgtatgactcttttaacgatgcctatgagattttcttggcatctgttgggatatgaagaaaaggtttgagaactgaaaaataagccgtgctgttaccccccctattagggcgacagcacggctttctgtatctgctgatctgtgaaaaagtcaggttatggtcatcatgcgtttatgtggtgactggctttgcgtgcgccatacggtacttcgcgatgaagtagttcacgagcgcggttaggcccgccgaaacggtgcacacggcgcatgtgatgaggaacacgagcagaaggcccgttacgatgacccacagcacattgccgacatcgggtgtcgtgttgttcagactgaacgcggagatgagctgcgccgcgagcaggatgagaaatgcgccgatgaagctgaactgcatagtaccgcggcaaaggaaccagcgcggaatggcgagcgcgaaaaacgcaaagacgaacgcggcgagcacgccccacagcgtatactgtgcatttggcgtgagcgcgccgttttcggccgggtgcgcgaaggtgccgagggcgacctgcacgtgtgcggcaaaggtcaagagcagaatgatcgtgccgaccacaccgccaaagatcatgacgccgctccaaaagccgtccaccggggcaaaaatacgctcctttaagtgcggcttgccgtcttttttgtcgattttatacgtgccgtagaatgcttcggaaaatgtcatagggacgctcctttcaaaaaacatcagtcttcgtgtgtttcttcttcgggggttttccgggggtcatttttcacgatcagcaggcgggaaagacgctggtcttcaatttcaagtacggtgatggtgagcccgcagacctgtacgctggggtgctcgttttcttttggaatgcggcccaaaagatcggtgacaaggccggcgatggtatcataatcgccttccggcagctcggtgtcggtaaggtcggaaatctcgtcgatggaggtggtgccgtccacggtgaactcgttttcgctgacacggaagatctcttcctgctcgttgtcgtattcgtcctgaatgttgccgaaaatggactccatgaggtcttcgagtgtgacgagacccgccgtgccgccgtattcatcgacgatgatggcgatctgcaggcggcgctccttgagctctttaaagagctggctgcactttttcgtttccggaatgaaatacgccgggcgaaccatgtcttttaaatggataaaatccggtacgggctggttgacgtagggcagaaaatccttaacatagcagatgccgacgatggtatcgatgtcttcgcggtagacagggaggcgggagaagccgttttccaccgcaagtacggcggcttgtgcaatggtgctctcctcatcgatggcgcagatgtccgtacggtgtgtcatgatctcggtgacggtggtgtcgttgaaatcgaaaatgttcgtgatcatgtcgcgctcattttcttcgataacgcctttttcctcgccttcgccgaccatgtggaggatttcttcttcggtgacggtttcatcaagcgctttggggtcgttgcccaaaagacgcatgagaccgtccgaaatgaagttgcacaagaggacaaacggatgcatgacggcgctgagggcgcacagcatggggcagagtttgtatgtatgctgcatgccgtgtgcagccttgtgcgctacgaattttttcggagcgaggtctgctgccgttagataaagacctgcgcacagcaatgtgcaaagcagtgccgaaagcacggcagcggcagccgtggggagcgcggcgcggatgaatacgttgtaaaggcgcggcgcaaagccggtgaccgcaaccgcaagagcaaagaagcccatgagcatcatgcccgattgcaggggcgaaatgatgcctgcgctgcgttcgagatactcgagcagctttttggcgcgcggttcgccggactccgcatcttttttgatgcgggattcgttagccgtttccgcggcggattcgcacatggcgaaaagcgcgccaagcacgaaaaagagcagaaacagcaacagggcgagggggaggggtaagacggacgaggacggcagtaaattgccgtaagggtcgtcgttcatagtgaaaaaagcatcctttctgaaagtttgggagcagttaaatagttttgaatgtgctttcgtgaaggcgggagaataaagttttgttcaaacttttttaaaagttcgcgagttcttagggaagcgccctaagtcgctttccgcaaaagtcaaagaaaaacgcaatatgaaaaagcgagttttcttttcaaaagcgtcacgtgatgtttagctaaaactaactgctcaccgatatataattattaaaattttaccgcaaaaaaacgctgttgtcaatattttatgccggaggcgcgccgaatcccggacaaagcggagggagaacgacgaaaagggcgaaaggcgaagcggagaaaaataaaaaatgccgaaaatctctgttaattcagaagaaatttcaaaaaatcctcgttttttcctttacatataggcgaaaaaatgataaaatttgttttgaacgacgacaggtgcttacgggagagttctgcaaacggcagggcggtgaacggggtactgcgccgtcaggtaaatccattgataatccttaaaggaggaattagttaaatggcaagaaaaatgaagaccatggatggcaacaacgccgccgcgcatgtttcttatgcgtttaccgacgttgctgcgatctatccgatcacgccgtcttccgttatggctgatgagaccgataagtatgctgctgccggcagaaagaatcttttcggccgtgaagtacgcgtaacggagatgcagtctgaggccggcgctgctggtgcagttcacggttctctggcggctggtgctcttaccaccacctacaccgcttctcagggcctgctcctgatgatcccgaacatgtacaagatggccggcgagctgctgccgagcgttatccacgtttccgctcgctgcgttgctacccacgctctgaacatcttcggtgaccattccgacatctatgcatgccgccagaccggttatgcaatgctgtgctccaacagcccgcaggaagttatggacctcggcgctgtggctcacctttccgctatccacggcaaggttccgttcctgcacttcttcgacggcttccgtacctctcatgagattcagaagatcgaagtatgggactacaaggatctcggcgagatgctcgattgggatgccgtaaacgagttcagaagacacgctctgaatcctgagcacccggttctccgcggccaggcacagaacggcgatatcttcttccaggctcgtgaggcttgcaacaagtactacgatgcgattccggagaccgttgtcgattacatgaacaaggtcaacgagaagatcggcaccgattacaagcctttcaactactatggcgctccggatgcggagaaggtcatcatcgctatgggctctgtctgtgagaccatcgaagaagtgatcgattacctcgtagcagccggcgagaaggttggccttgttaaggttcacctttacagaccgttcgttgcaaagtacctgcttgacgtgcttccggaaaccgttaagaccatctccgtgctcgacagaacgaaggagccgggctccatcggcgagccgctgtaccttgacgttctggctgctatcaacggcacgcagttcggctgtgctaaggttctcaccggtcgttacggcctcggctccaaggatacgaagccggctgacatcattgctgtttaccgcaacatggaaaagggcgacgatgcgaagaagaagttcaccatcggcatcgtggacgatgttacgcacctgtccctcgaagcaaacgagcacccggataccgcaccggcaggcacaaagtcctgcaagttctggggcctcggttctgacggtaccgtcggcgcaaacaagaactccatcaagatcatcggcgaccacaccgatatgtacgcacagggttactttgactacgactccaagaagtccggcggtctgacaatgtcccacctgcgtttcggtcatacgccgatcaagtccacctattacatctcccaggctgacttcgttgcatgtcacaacccggcttacctcggcacctatgacatggtcgaagacctgaagaagggcggcagcttcctgctgaactgccagtggacgccggaagagcttgacgagaagctcccgggcaaggttaagaaatacattgctgataacgatatcaacttctacacgatcgacggcttcaagatcggcaaggagatcggccttggcaccagaatcaatacggttctccagtccgcattcttctccattgcgaagatcatcccggaggaagacgcaatccgctacatgaaggatgcggctacgaagtcctactccaagaagggtgacgccatcgttaagatgaaccatgacgctattgaacgcggcgctaacggctacgtgaagattgatgttccggcttcctggaaggacgctgtggacgattccacgaagcacgttgcaaccggcgaccgtccggagctcgtggactatgtaaacaacgtggttatcccggttaacaccttccacggtaaggatctgccggtttccacctttgaaaagtatgcagacggcacctccccgcagggcaccgctgcttacgagaagcgcggcgttgcagttgacgttccgacctggattccggaaaactgcatccagtgcaacttctgctctatggtctgcccgcacgcggttatccgtccggtgccgatgacagatgcagagctcgcggcggctccggctgctgtgaagagcaaggccatgaccggtatgccgggcatgaactttgtcatgacgatttccaccctggactgcacgggctgcggttcttgcgtacaggtttgcccgggcatgaagggcaacaaggctctcgcaatgtccccgatcgacaacgagcgcccgggtcaggaagtattcgattacggcgttaagctggatccgaagccggaagttcttgctaagttcaaggacaccacggtcaagggcagccagttcaagcagccgctcctcgagttctccggcgcatgcggcggctgcggtgaaactccgtacgctaagctcgttacccagctgttcggcgacaagatgtacattgcaaatgctaccggctgctcctccatctggggcggttccgcaccggcaacgccgtacaccgtcaacaagcagggtcacggcccggcatggcagaactccctgtttgaagacaacgctgagttcggccttggcatgacgcttgcacagaacgcaattcgcggccgtctggagcagctcacgaatgagctcgttgcagaagaaggcgcaagtgaagaactgaaggcagcagctgagaagtgggttgagaccatggctgaccgcgctgaaaacggtccggcagctgaggcttacatcacggctcttgaggcttcctcctccgagaaggcagccgagattctgaaggataaggattatctcgctaagaagtccatgtggatcttcggcggcgacggctgggcatacgacatcggcttcggtggcgttgaccacgctctggcttccggtgaagacatcaacattctggtcttcgataccgaggtttactccaacacaggcggacaggcttccaagtctaccccggtcggttctgttgcacagttcgcggctgcaggtaagtctgtgaagaagaaggatctggcttccatcatgatgagctacggctatgtttatgttgcgcaggtcgctatgggcgccgacatgaaccagtgtctgaaggctatgcatgaggctgagagctatcatggcccgtccatcgttatcgcttacgcaccgtgcatcaaccacggcatcaagggcggcatgggcgtttccatgaacgaagagaagaaggcagttgcagcaggctactggcataccttccgcttcgacccgcgccgtgctgacaacggtgagaacccgttccagctcgacagcaagaagccgtctgcttcttaccgtgacttcatcatgggcgaggttcgttacaacagccttacccgtgcattcccgcagagagccgagcagctcttcgagaaggctgagaagtacgcagaagagaagtacgagaagttcgcacacatggcttctgaggaggaataattccgtaaggaattttccgcctgtactgaaccgtacaaaagcggcgtaaaccgctgaaataaagagacccccgatttgcagcaatgcagatcgggggtcttgctatattaaaaaccggcataattgtgtaaaagcccaacgttataatgtgcggtactggcatcacatcggtgctgatcttgtaggggaattgcgaaaagaatatatccgaaaatgatacaaatacaaagctgtgtccagtgatgcagatgggccgtttgctatat

SEQ ID NO: 1731 - DNA, 1270 bp, Unknown
  gut microbiota DNA sequence
tttgaaaggcattgaagattatctgcctgtttctcagtacgaacgcgaagagcatcagtgtgccgtagttgatgatattttggaaaactggacaaccctaagccacgacagcaagtttcatgcgatttttgctaccagtagcattccagaggcaatccagtattataaactgtttaaagcaaagggcaatctgaagattaccgctttgtttgaccccagtattgataacaatggtaatgggctttttaaagaagagggcattgttgaaatcatcaaagattacaataccagatacagtatggagttccaaatggcaacttatgcaaccttcaaaaaggacatttcctatcgtttggcgcacaaagaacaatacaagggaatcgaacatgcttccgaccagcaaattgatctactgatcgttgtcgatcagatgctgactggttttgactccaaatggatcaacacgctatatttggataagattttggtttacgaaaagttgattcaggcattctcacgtaccaatcgtctctatggtccggagaagccctttggcacgattcgttattatcgtaaaccgtatacaatgcagagaaacattgaagaagcgttcaagctgtattccggtgatagacctcttggcctatttgccgacaagctggaacacaacctcgaaaaaatgaatgcgttgtacgatgatattgggagcatcttccgttctgctggaattgagaacttcgaaaaacttccggttgatcatacggagcgcggacaatttgctaaattattcaagcagcttaacagctatctcgaggctgctaagatacagggcttcacttggaataagctgtcctatgaatttaagaacgttggcagaaaagtgatcataaatctgcatctcgatgaaaccacctacttgattcttgctttgcgttataaggaactattctctggtggtagcggagggaccggtgttgaagatgtgccgtatgaaatcgactcctacctgacggaaatcaatactggtgtaattgatgccaactatatgaactcccggttcaaaaagtacatcaaggcattgcaggatggtgcggaaactgccgctgtgctagatgaacttcacaagtcgtttgcaacgcttacgcaagaggaacaaaaatacgcaaacatcttccttcacgatgtccagaacggtgatgtggtagttgacgaaggaagaacgctccgtgattacattacagaatatatgaccagtgccaaaaatgaccag

SEQ ID NO: 1732 - DNA, 423 bp, Unknown
  gut microbiota DNA sequence
aagaataaagaactgacacaacaggaactttctgatctgagccatgtttctgtaaagcaaatcgccaatatcgaaaagggaaaaatgaatccttcctatttgattttaagagcattggcaaaggtcctgcacatctctttagatacgcttataaatccagatgtttctctggaagatgaaggtgtcaatcagatgaaaatgctttattccagctgtccgccagaaatgcgtgacaccctgttgcatcacatccaagaaacgttgaaagaactgacagagttgtccgagaaatttgaaacgaattgagccagtgagtgaaatttaacgattctctcactggctcttttcattttcggagaaaagaggcaagcaatgcctgtgttaatacacacaggcccgcagagaagaaaatccctttgtgat

SEQ ID NO: 1733 - DNA, 3139 bp, Unknown
  gut microbiota DNA sequence
atgccgaccttgactatgaggagtggaaagattggatggaggaagaatatccgacgctttccgatgacgagcgcgtcgccatgatgtatgaggaaaacgggcactaccttgaggacgaacggctcaatctggacattcaactttcccagcccattctggttgttgccgatctgggactttggaatggcaggcgcacgggatacaaagaaattcccagcggcaatatccgggactgcctttactctgattacgactacaccacatggtatgtggaccgaaacggagatttccggtgcgatgacacccaccatgacggcacaaaccattatctctatcgggtatataaggacaatgtttcccaggcgcagaaagaccagctcaaagaaaaaatctacaacggcacagccaccagggcagacattgtccgtgtcacccgcaggcttggcgatgagatcgggaaggtgtatggctggagctttccaaccaggcagagagagcgaggtgaggcacgatgaaccaagcactgccgagcgaaagttatattgccagactggactatttggctttcaacggaaaagtatgcagcagcattgcgtacagcgatgagcagcgcttcctggaagacctgaaggagtcgctctatcacggagagccgctgtgcgtcgttctctaccgagaccggaacggcaagacgatttcccgtgcgtttctgaacgacctggataccctgcccaaggggcttttcgtagaggatgatccccatagaaagccgaaggaaaggggtgaagcacgatgagggtaaatgccatgacagagaagtttgaggatgtgacggttctggggcatcccatgctttttacctgcctgcgggtagaccgtgataccgttccacagggcatgtacatgtacgaggttcgccacgatgatgaccaacagggcgagccggttcagattgctaactggatcatggtgaatcattggggaacgttgatttccaatagacccattcgcttggagccccgaccggatgggagaaacgcctaccgcgacattgatcctgaaaacgattggaactatgagggcacgcttactaccgtgaaggaatacatggagaagaatccaccggcggttcataagcaaaaagaccacgaacctgcgagataaggagaagctatggataagaagaaagccatctgcgagtatctccgtaaaaatcatattggcaaagaaaatgccatccacagcaaggagcttgaaaagctgtttctgcttgacggacgaaatattcgccgcaagatcagcgccttgcgacaggatggctttcctatttgcagcgatgaaacgggctactattacgcagataaccagaaagagatcaataccaccgtctaccggttgaatgagttggtgaccaaggtgtccaacgccagaaccgggcttttatttgcatcgatcctcggagagaatgcgcagaccgttgaggtcacgatcaaagtaagataaggagggagttcccatgccgagcaaatacagaatcattttggagatggcgtcccagactgccagggatattgcctccaatgccgaccgatataccgattttctgattacggcggcaaacaactacaagtacagctttaaggagcagctgctcatccatgcgcagaagccagatgcaacggcgtgtgcggaaatcgacacatggaataaactcggcagatgggtaaacaagggcacgaaaggcatcgcgctgctgatcgacagagatgttccctacaagctgagacatgtctttgatatctccgacaccaacagccgtgccggaaggaacatcaccctttggcagatgaagccggagtacgaatatgcggtatcggaaagccttcaggccagcttcggtgatgtggaggagccgcgagatttcccgcaccttctcatagatatttccggttatgccgtggaggataatctttcagattatctcatggagttgaacgctgtcaaagccggcagctttctggaggagctggacgacacaagccttgaagcgtggctgaaaacctcgctgaaaagcagcgtcgcttttatggcgctctcccgtgcggggtatgagccgaggcagtattttgaccgggaggatttcagccacctctttgacttcaacaccctagaggttatctccgtgctcggtgccgcagtcagcgatatttctgagatggtcatccgggaaatgggcgaaaccgtcaaggagatggagaaggaagaaagacggaagattcgcacatttgcacaggagggtgcttctgcgtatcataagaaccgaacagaaaacaaggaaaggagcaacgatcatggaactgacctatacgatgcagggggactatctgattcccgatctgaccgtgccggagagcccgaagcttgggaagtatggaatgctgcggcggacattcctccgcaaacaccgggatgggatctacaccgggatgctgctgaacggaacactgaacagtcatctggaggaagtggaccggcaagccaacgagatgatggaacgcctgacccgacagatagcagagaagcagggcgtgacggagcgcctgaaagcggaagatcagatgaaatgggtgcagatgatgaactccattcgccactcggcggaggaagtgattctgaacgacctgatctacgcgtaacgctccccacagttcagcagcaacaggaaattatcgcagaagcggaggaagaaaaatcctccgcttttgctatttctcaggaggacatcgacgccattctgacacggggcagcggcatccatcagggcaaattccgcatctatgagcagtttctcaaacaggattcttccgagaacaatatcacctttttgaaaaacgaatacggcatcggcggtgcgtatcctgccgtttccggcagaaatctcgatgaaagccacgacgccaagggaatcaaaatcagcagaggcagaatctctcggcccgatgcggaactgcttttgcggtggaacaaggtcgagaagcggatcggggaattgatccgtgccgaccgctatctgagccaagcagaaaaggacaactatcctgcctaccgggagcaggcagaagctcggaggaaacgaggt

SEQ ID NO: 1734 - DNA, 4537 bp, Unknown
  gut microbiota DNA sequence
aagctgtttcagactgcgtaattttaatgaaaattgtgtaaagttttctttacttctctgagttaaagtagtatactaatacgtatatattcgaaaagtgcggcagtttggcttttggggtatagcaggtattttacggaggagtgtataggactatggagaaaaaaacaagcaatttttccgggcagctcggctttgtgctggcggcggccggcagtgcggtgggcgtgggcaatttgtggcgctttccgtaccttgcggcaaaggacggcggcggactgttcctcatcatttatctggtgttggtgctgacgttcggttttacgctgctgacttccgacattgcgattggcagaaagacgcagaaaagtgccatcggcgcatatgaggagatgcacccgaagtggaagttccttggtgtgctgacgtttttggttccggtgctcatcatgacgtattacgcggtcatcggtggctggatcacgaagtacgcgtgcgtgtatctgacggggcaggcttcgagcgcggcgcaggacgactactttacgtcgtttatcacgtcgccggtgtcgcctgtggtgttcggtctgctgtttatggcggtgacagcgttcattgtgtataagggcgttgagggcggcattgagaaggtatcgaaattcatgatgccggtgctgctggttcttgttgttattattgcgatttactcgctgacgttaaagcacgaggatgcggacggcaacgtgcgcacgggtttacagggcttcctctactacatcaccccgcactttgaggggctgaccgtggagcgctttttgcagattttgctcgatgcaatgagccagctgttcttctcgctgagcgtttcgatgggcattatgatcacctacggctcgtatgtgaagccggaggttgacctcaacaaatccgtttcgcaggtcgagtttttcgacaccggcgtggcgctgcttgcaggcgtgatgatcattccggcggtattcgtgttctccggcacggacggcatgggcgtaggcccgagcctgatgtttgtgtctttgcctaaggtgtttgacgcgatgggcccggcgggcacggtggtcggtgtgctgttcttcatctccgcaatttttgcgacgctgacctcctgcatttcggttttggagtctatcgttgcgaactgtatggagatcttccacacggacagaaagaagacgacgcttgtgctggcgctgatttacctcgcggcttccgcggtgatcgcgctcgggtacagcgtgttctacttcaacgtgacgctgccgaacggctcgagcgcgcagcttctggacattatggactacgtcagcaacagcgttatgatgccgttgattgcgctgctttccaccattttgatcggctgggtgaaatcgccgaaatatgtggcggacgagatggagcgcggagggtataagttccgccgcaagcgtatgtattacgtgatgatccgctacgtagcgcctgtgatgatgctggtgctgttcttacagtctacgggcttgctttcgatgatatttaagtaaatttattggtgaatttccgcgagagcggtttaaagcagtgccgtgcggagttttgcggcgctgctttgctattttaaaaatgaaaggtgatacccatgaaatttcccgaaatgctgaccggtgtgcagcacatcggcgtgccgacgaacgatttggaaaagaccgttgcgttttacgagaccatcggttttcagccggttttagagaccgtaaacgaggcggcgaacgagcgcgtgacgtttttgcagctcaaaaatttagtcattgagacgtatgagaaccacgcggcggtgggaaagcccggcgccatcgaccacattgcgctcgacacgacggatgttgaagcggcgttcgcagcggcgaaggaagcggggcttacgatgctcgacgacgagattcacgggctgccgttttgggcgaacggcgtgaagtttttcaccgtggaaggcccaaacggtgaaaaagtagagttctgtcagaaattgtaagcgataattagaatatagaatttcggcggctgaactgcgttttcggatgcggttcggccgccttttttgctgcccgaagggggttgcttttaagcggtattccctttgaaatataaaaacaccccatttcttaaacagtgtaccatactgtccaacaaatggggtgcagttcatttgagacgtgcatcctttttgatcattcacttttcggcggcgaggatcattttttcgagctctttggcggcgacgctcaggggttggccttttcgtttgatgatgacgacgtttctttccggtattttctcttccaaatcgatgcgacagacatttgaccatttttccaagaattcttccggcacgaacccgatgccgaggtcggcttcgaccatgggcaaaatttggtcggcagtgaacgcttcgatatccgggtggtacggcaggccatgcgcggcgaagaacccggaatagaactcgaacgatttggtatcggcgccgagcgagatgagcgggaattctaagagctcctcaagctttacttggcggtttgtgagcattttgaaaaacggtgaacatacggcatactcgtggatgggtcggacaggtgtttcggtgagcgaggcggacggtgcggtgggggtggtgacgacggcaatatccgctgtgccctcttttaacgcggcgatagcctgcggcgtggagtggttgctgatgcggatatggatgccggggtggagaaggcggaattctttgagcacgggcagcagcaggcagcgcagcgcgacctcgcttgcggcgacgtacacggtgccgatttgcagcgtgcggctctcggtgatctccgcttcgccggcttcgatatgctcgaacgcgatgcgcacgtgggcgtacaagcgctcgccctccggcgtcaatttcatgccgcggtttgtgcgcagaaacagtgggcacccgagttcgccttccaggtttttgatggcgcgcgtcatgttcggctggttatttaaaagctgttttgcggcctgcgagaggttaccgtattttgcaacgtaataaaaaattcgatagtaatcataactgatgtacatgttggccttgttccccttgctatatcataacgatattttagatatatatattatagattttacacatgaatataagagtattataatggcaatgctgtgggaagtcaagatgatttcgcgcagattttgtgctgaaaagcgtagataaaaagcggcgtttcaaggttttgtgcgccaaacgaagaaggtataaaatggaagcggtagtttttgaaatcattatgggtattttctttgacgcaggtatgctggcgatggtggtgcatgcagcgcagcacatcggcgaggataccggtcgcgttcgcttcacggcggctgtatttgcgattggctttttccttgggatgattgcaaaatgcgttgtgggcggcagctacgttgcgcttgccctgtatgcgctcggctttgtgctctcgtacacggcggtcgtttttactgtgccggaaaaggagcatgcctatgaaggtcgctgagccgtttcatctgcacggacagatgtccgacagcttccgcgcggcggtgttcatcattctctccggcggatttcaggatgcatatacctacttttgtcgcggcgaggtttttgccaacgcgcagacgggcaacattgtttttttgagcacggcgctgttccagaaggactggccgaacgtggtgaagtaccttatcccggtggtatcgtttttgatcggtacagcggccgcggagctgatacacattcattttaagacgtatgagaaaatccactggcggcagatcattttgttctgcgagatcgtgtttttgcttgtcgtcggctttttgccggcatactttgaaccgcttgcgaacgcgatggtctcgtttgtatgtgccatgcaggtgcagacgttccacaaggtgcgcggccacgcgtatgcaagcacgatgtgcatcggcaacatgcgctccggcaccgaggcactgtgcgcgtatttcagaacgcgggataaagagattttgcagaaatcgctgacgtatttcggtgttatttttgtgttcggcatcggcgccggccttggcagcctgatgagtggcctgcttgggacaaaggccatttggtgttgctgtgtgtctttgctcgttagttttgtaatgatgtttgtccccgaaaaaaacggataacccatcttctgcgttttccccttgcagagaagttataaccccaccgtgccatacgggccctgaaagctcccgtgtggtgcggtgggatttttataagtaaacatcctctcgggtcgtgtatgatttggtaggatgaagtgaaccgaggaaacggttcggagatttgtcaagcggtggattggaaatcttgaaaaatttcttgattttttcactgatcttgaatataataatatcaaatcaagatttgctaaatctaaatttg

SEQ ID NO: 1735 - DNA, 4265 bp, Unknown
  gut microbiota DNA sequence
gccttgtagcgcttgatggtcagcagcatgatgccgaacaccacaacggagagcagagcgaccacaatgaggaacagcagcgcgctgccgggatcaatggtgaacgccataacgcatgcgccgaacacaatgaacggcgagcgcataaacaggcgcagcacgagattcacgccgttttgcacctggtttacgtcatttgtgatgcgtgtcagcagcgtggaggtgcccgcgcggtccaaaagagagaaggagagttcgttgattttttggaacaagctgtgacgcagcccagtggcaaagcccacggcagcctttgcggcaaaatattgcgccgtgatggcactgaccatgccgaccacaccgaacccgaccagaagcaggcagcgggagataatgaagccggtgtcgccagtctgaatgcccacgtcgatgatctgcgcgattacgagcgggacaatcagctcaaaggtggcttcgagcagcttgaaaagaggcgctaaaaacgactctttcttgtagtctttcatgtaaacgaggagctttcgcatggcgttcgtcctttccgaaccgtttaaacggcagagttttccataagattctgtttttgtcagtaattttcattataccgcctattatagtgtaagtcaaatcgaaacataccctgctacggagcgcagcagggtatgttctatagaattatttattcacaggaaagctctaccgggtctgtaaagtgttcgttgttgtagatgtcgcgcagggtgtattggatcaccgtgcggtattcgccgatttcctcataggcgacgacgggttcacttgtgtatgttaccgggtcgccgagcgtgtagtcccggtcgtagttgaaatcgtaatcataatacgaacaggtgtactgaatctgatccgtctccgtaaagctgtgcagaccctttgccgctaccgtaggctcttcggtctttaagcggtagcccgcaacaaatccgctgtcatggtcgctgtcccagcgcagaacgatctcaatatcggtgctgccgttcagttcggccggcacataacccgttgtgtaccaataatcgtccgtctgttcctcggtttcggcgtagaacggtacaatcacgccgtcgatcgagatccatgtatagtcaaaatcgactttcaggtcgccgtcgtcgtcaaactcgtacacgttgtcattgccaaggtcaatgtatccctcgccgtcgtcgaggtaaacggtcatatcaatgtacgtgatgaggttccatgcttcatcggaaagagagagtgcataatagtcgcccttgtcgatgagttcaaaatcgttgtcgtttattgtggtgacgttttcgccgccaacctcggaggaatcgaaccaatcgtagtaggagtaaaaatcgatatcactctgcgaaagcgactgcccggagagcatcgtgttcatgaatttatcgtagaattcaaaatacgattccgggaagccgacgcaggtcatttcaaagcgtgtatcgccgtaataatccggccacaggcacggaaaatagactgcaatgcccgcggcggacttttcataggtgacgttatacgccaccatattctgaacggcggcctgcacatcgtcctcggtgccgagggaaaggctctgctttgtcagtgtggcgaggtcggaaagatcgacctggtcgtattcgttgtcgccgaattcccgcacgttgttgcgcacctgcgaaaacgcaccgtagctgccgctttgcagtgcggcgtaggcgcttccccagtagctttccaacgcggcgtataattccggcacatagcgcaggtctaaaacggaaagcgtcggcatgtcggcgaaaatataggcctcaaggaaatcgtccgccagctttttgccgagctccgccgtgggtacggcggggtcttccgccagcatcgtaagccagtttttgtacgcccagccctcgccgggctcggattcttcggaggcgatgaggtaatccgcatacggatccaaggcgtaggctacctctgccgtcgccatcaggcaggcgtcaaagccgatgaaatcgaactgcacgccgccgttatacagcgctgtagaaagagaagagagtgtcaaagaggtgtcttcgtacagctcgtcgtagccgaagcctgtcatggtgccgccgccgtgatcccacaaaatgagctcgtagcgatctgcggggtagctttcggcggagaagcgaatgaaatcggagagcgtgtcggcgtccgtcatattcatgctgccaaggctttggagcagcgtcatatcgccgttttcaatcacaaagcgctcactttcatcgtctgtgcagacatcgttccaccaggtttcggtgccgccggtctggagtacaaggtgaacgttttcggaaagcgcggcatctgccatttccaaaaggtcgtcggtcgcggagccgtcctcactctctaagtcggagccgatcatgtacaccattaccgtgacactttcagcgtttgcaacatccgtgtaaaacgcacgcaggtcgccgtcttcagtcggcacaggggtggagatgacgccggaggacgcggagctttccgaaatcacggaggacgaagcttcgctgttttcacgagctttaccggctaagaccaaaaccgtgctgcatcctgtgcagttaaaaatcaagccgaagctgagtaaaaggggcaaaacgcgggataaaaaccgtctcatacaaaactccttttatggctgtggacggaaaacgaccgtgccggttgcgtcgtccatgctttccacaatggcgagcgattcgagcgggtagcccatctcgcgaattttcgcgccgccgggctggaaccccttttcaatcgcgataccgatgccttccaccgtgccgcccgcctgatctacaatagagatgagcccctgcagcgcgcagccgtttgcaagaaaatcatcgatgataagaatgtgatcctcggggccgagaaattttttcgagacgatcacgcgattcacacgcttatgtgtgaaggattccacttcggaaacgtatacgtcgccatcgatattcacactctggctctttttcgcgaagacgaccggcacgtcaaagcattccgccgccacacatgcaataccgatgccggaggcttcaatcgtcagaattttgttgataggcttatctgcaaaacgtcgcttgaattcttcgcccatttggcgaaacaggcgcacatccatttggtggtttaaaaagctgtctactttcaatatattgccggcttttacaacgccgtcctttacgatacgttcttccagaaaattcatactgttttgtcccccgaggttcttgttgattctattgtaccgaagcggaaagggaatgtcaattccgaatgcgcataggaaagcgcgtctgccccgcgaagctgctttccaaagagaaatcaagaagccctcccgtgtcggtcatggatatgcttcctatatagggtacatatccatcatttcgggagggtgtttttgcttttattcagaaattcttattgttttccggtggcgcccaggtaaaatcctcggcggaaagaagcgttttgccgctgtgaaagcggtcaagctccgcggtgcacagccgcacggcgtcttcaatgtacgtgtccgccatggcagccatgaaaaagtagggggcatccgccggcgcgggcacaaagttttgatgaatcgaacgcagaagaccttcggcgtcaaacggctcaaaagcgaaaatcggttcctgcgggaaattttccgggacggcaaggtcatcccgaatattatatttttgaatgaaatgacggtttaaaagcgtgtaatcgtggtgcatgcgtgcggtgctttccggcgtgtagggattccagccgaaggtatcgtacagtgttttgcggtacaaagcatcctcgatgaggtgcagatagtagccgagataaaggtcgtctttttgcatacgctcgccgaactgcgcgcggtacgattcaagatcataaagccgaatgccgagcttttcattgtaaatgcgaaaatgtgttttccgcttgtttacggaagcgtccggcagtaccgcgccaaagcgcagccgcgcaccgtcgtgcataggaaacagttgcaaaattttatccgtgatcgcgtagtgcatgagactggaagccatatttttttacctttcttccataattttcgggagcggcatttgcaaatatccgcaggcgggaatatccttttcggtaacggggcg

SEQ ID NO: 1736 - DNA, 3554 bp, Unknown
  gut microbiota DNA sequence
aaactttcatcggctgcgaaagcagctacgaggatgccgatatcgttttgtacggcgcaccgttcgattccactacgagctatcgccccggcgcacggttcggccccgccgccatgcgtcacgaaagctacggccttgagacatacagcccgtatcaggataaagatttaaccgacatcaaggtgtttgacagcggtgatatggagctgtgcttcggctccagcgaaagcgccctcaaagacatcgaagcgcgcgcggaaacgatcctgcaagacggcaaattcccacttttgctcggcggcgagcatcttgtcacgctcggcgctgttcgtgcggcggcgcgtaaatatcccgctatgcacatcattcactttgatgcccacgccgacctgcgtcaggattacctcggcgccgaattaagccacgcctgcgtgctgcgccgctgccacgacattctcggcgacggccgcattcaccagttctgcatccgcagcggcgacagggaagagttcatgtttgcgaagacgcacaccgatatgcataagtttgatttctcgggcctcgaagcgctcgccgcagagctgtgccgcacgcaggtgccggtttacctcaccgtcgatctcgattgccttgacccctcgtgctttcccggcaccggcacaccggaggcgggcggcgtgacgttcatgcagctattaaacgccatcctcaccgtgtcaaagacgaacatcatcggcgcagatgtcaacgagttagcccccatgctggacgcaagcggcgtttccaccgccatggcctgcaaagtcctgcgcgagctcttattggccttaaacgtataaattatcaaactaaaaatataaaaggagcatcatcatgagcaaagttctcgttatcggctgcggcggcgtagccggtgtcgccatttccaaatgctgccaggtcagcgaagttttcaccgagctgtgcatcgcaagccgcacaaagtccaagtgcgatgcacttgctgcaaaacttgcgcccatcaccaaaacaaaaatcaccacggcacaggtcgatgcagacgacgtgcagcagctttgtgaccttatccaaagctacaagccggatctcgttatgaacatcgccttgccgtatcaggatctcaccattatggatgcctgcctcgcctgcggcgttaactacatggataccgcaaactacgagccggagaacaccgatgaccccgagtggcgcgccatttacgaaaagcgctgcaaggaatcaggcttctccgcctacttcgattacagctggcagtgggcatacaaaaagaagtttgaagaggccggcctcaccgcactgctcggctgcggctttgacccgggcgtcacgcaggcgtactgcgcctacgctaaaaagcacgagttcgataccatcgataccatcgatattctggactgcaacggcggcgatcacggttatgcgtttgcgacaaacttcaatccggagatcaacctgcgcgaggtttctgcgcccggcagttattgggaaaacggccactgggtcgaaatcccggctatgagcattaagcgcgcgtataccttcgatcaggtcggccagaaggacatgtatctgctgcaccacgaggagatcgaatccctcggcaaaaacctgccggaggtcaagcgtatccgtttcttcatgacgttcggtcagagctacctcgaccacatgcgctgcctcgaagacgtcggcatgctttccaccacaccgattcactacaacggtcaggagatcgtgccgatccagtttctcaaagcacttttgccggatcccgcaagcctcggcccgcgcactaagggcaagacgaacatcggctgcatcttcacaggcaaaaaggacggcaaagagaagacttactacatctataatgtctgtgaccaccaggaatgctaccgcgaggtcggcagtcaggctatcagctacaccaccggcgtgccggccatgtgtggcgcgctgatgatgctcaccggcaagtggacaaagcccggtgtctacaccgtcgaggagttcgatccggatccgttcctcgatgcccttggtaaatacggcctgccgcgcagcgaaaaccacgatccggctttggtggactgatgaacttactggatacacgcccgccgtttgcgggcatcaacggcgaaattccgccggaatttaaaacgctgtccacaccgtgctacctcatggacgaggccgtcctgcagcataacgcagaggtgctcggcgcgctgcaaaagcgcatgggctgcaaggtgcttttggcacagaaggcgttcagcaattacgatctttatccgattttcgcgccgcatttggccggtacggaagcgagcggcctgtttgaagcgcggctcggcgctgaagaaatgccgggcggcgaggtgcatgtgttttgcgccgcctaccgtgaggacgaaatggacgagctgctgcgctatgcggatcacattgtgttcaattcgccgcgacagctgcaaaagttcgcgcccaaagcaaaagctgcgggcaaaagcgtcggtctgcgcatcaacccggagtgctctacgcaggaggaacacgaaatttacgatccctgtgcgcccggcagccgcctcggcaccacccgtgcgcagtgggataaagccgttcaagaagacgcgcatttgcccgaactgctcgacggacttcattttcacacgctgtgcgagcaggatgccgacgcactggaaacgaccttaaacgccgttgcttcaacattcggcgatttgctgcccaaaatgcagtggctcaacttcggcggcggccaccacatcacgcgtcccgactacgatatggaaacgctggagcgctgcatccgccgcgcacagcaggactggagcgtcaccgtgtacctcgagcccggcgaagcctgcgcgttaaacgccggatatctcctcagctgcgtgctcgatgtcgtgcaaaacggcgagacgaccatcgcaattctcgatgccagcgccgcctgccatatgccggatgtcatcgaaatgccgtatcgcccgccgctgttcggcgccggtgagccgggggagaagccgtacacggtgcgccttgccggcccaacctgccttgcaggcgacgttatcggcgattacagcttcgacgctgtgcccgcggttggcgacctgctcgtcttcggcgatatggcaatttacaccacctgcaaaaacaataccttcaacggcatgcccctgcccggcatttattcccgcacagcgtgcggcgatatccgcaagttagcgtcgttcggctacaaagatttcaaatacaggctcggcagcccgtaaacgcaacagcaaaagccgcagtgacgctgaaacttgtttccgctgcgggatgggatcgatggttctcctccgcggtcgtaaatgtcttgtctgtactgtctaagtgcacgggtcatgccgtgaatcaaggtggcaccgcggataagtgttttgttcgtccttgacagaaagtatatttctgtcaaggacgttttttctttttcaaagggg

SEQ ID NO: 1737 - DNA, 6510 bp, Unknown
  gut microbiota DNA sequence
tggcgcacccagcgcctaataattttgagtatcaaaatgcaaatgaacgtaacgatatcctttggaggtgtaacaaatgaaaattctgccaactttagctgaagtaaaaaagctttcttcagatgcgaaatacaatgtacttccggtaagctacgagatgctttccgactttactacgcctattgaaaccatgaagatactgaaaaatgtatctacccattgctatatgctggaatcagcccaaacaaacgaaacgtggggaagatatacattcctcggtttcaatccgaaaatggaaatcacctgcatggacggtgaaatgaaaatcggaaatcttaaagtaaaaacggagaacccatcaggctatctccgacagatccttgcggattacaaaagtccccgttttgattatcttccatcctttacgggcgggcttgtcggatacttttcatatgattacctcgggtacagtgaaccgagcgtaaaatgcatcgtggaagataccgaaaacttcaaggatgtggacttgatgctttttgacaaggttattgcttttgacaacctgagacaaaaaattattctcatcgtcaatatgccgctggacgatgtggaggtcggatacaacaaagcggttatggaattgaaacagcttgcagagcttcttaaaaacggagaaaagaagaaggatcccggcggcaggctgctcggtgaagtaacaccgctgtttgacaaagtgcagttttgcgatatggtggaaaaggcgaaacaccatatccgtgagggcgacatttttcagatcgtgctttcaaaccgtctgtctgccccttttgaaggaagtttgctcaatacctatcgtgtactccgaaccatcaacccttcgccctatatgttctatttctctgggacagatgttgaagtggcaggtgcttcgcccgaaacgctggtcaagctggaaaacggtgtgttgcacacttttccactcgccggaacaagaccgagaggaaagaccgtggaggaagacaaagcgcttgaaaaagaactgcttgcagatgaaaaggaacttgctgaacacaatatgctggtggatttaggacgaaacgatctcggaaaaatcagcagatttggcaccgtacaggttgaaaagctccgttctgttgaacggttttctcatgtcatgcacatcggctctacggtacggggtgagatttgtgaaggtaaagatgctctggacgccattgaagcggtgctgcccgcaggaacgctttccggcgcaccgaagataagagcttgccgattgatcggagagcttgaaaacaacaaacgcggtatctatggcggcgctatcggatatatcgactttacgggcaatatggacacttgcattgctatccgcattgcttataagaaaaacggcaaggtatttgtgcgaagcggtgccggcattgtagcggattctgtacctgaaaaggaatttgaggaatgcctgaacaaagcaaaatcttcactgaaagcactggagcttgcacaggaggaagaattatgattcttttgattgataactacgacagtttttcctataacctttatcaactcgttggcgagattgagccgaatatcaaggccatacgcaacgatgaaatgacagttgacgaaattaaggaactaaaccccgaccgcattattctttcacccggcccgggaagaccggaggacgcaggggtcattatggaagttgtcaaaacgattggcaaggatattcccgttttgggcgtctgcctcggtcatcaggcgatctgtgcagcatttggcgcaacggttacttatgcaaagaaactgatgcacggtaaacagtcgaacgtgaagttcgatacttcctgcccgttatttacaggttgtcccgaagttgctccggttgcgcgttaccattcccttgcggcagctgccaataccataccggaatgcttgaaggtcacagcacttaccgacgacggagaaatcatggcggttcagcataaagaatatcccatctatggcgtacagtttcatcctgaatctattatgacaccggacggaaaacagatgctcgaaaactttgttaaggagatatgagtgatgattaaagaagccgttgtaaaaattgtaaataaagaagacctcacctatgacgaggcgtacgccgtcatgaacgaaattatgagcggcgaaacgacagctacacagaatgccgcttttcttgccgcactttccaccaaaagtgcaagagctgagacgaccgatgagattgcaggctgtgcagccgctatgagagcgcacgcaacaaaggttgaaaccggtatgaagcttttcgagatcgtcggtaccggcggtgacagcgcccacagcttcaacatttccactacttctgcccttgttgcagtggcgggcggtatgaaagtagcaaagcacggcaaccgtgccgcatcctcccagtgtggaacagcagactgtctggaagctctcggcgtaaacattcaacagagtccagaaagatgcatagaacttctaaacgaggtgggtatatgcttcttctttgcgcagaaatatcatacctccatgaagtacgtgggcgctatccgcaaggaacttggtttccggactgtattcaatattctcggccctctaacaaatcccggaacgccgtccatgcagcttctcggcgtgtacgatgcttatctggttgaaccgctggcacaggtattgatcagccttggcatcgaacgtgggatggttgtatacgggcaggataagcttgatgaaatttccgtgagtgcgccaacgacggtctgcgagattcgtgacggctggttcaaatcttctgtgattacgccggagaagttcggatttgaacgctgcacaaaagagaacttgaaaggcggaactcccgaagaaaatgccaaaatcacccttgctgtcttaaacggcgaaaagggtcataagagaaacgcggtgctgttgaacgccggtgcggcgctttatatcggcggtaaggcggacagcataaaggaaggcgttgcgcttgccgcaaaactgattgattccggcaaagcactcgaaacgctgaatcagttaatcgaagtcagtaaccgtccggaggtggaggcatgacgatactcgagcagcttgcggaccacgctcgtcaacgcaccgagcaggcaaaaagagtcttgccaccggaagaaatccggcatcaggccttatcccttccaaaaggggattttccttttcaacaagcactgaaaaagccgggagtttcttttatctgcgagtgcaaaaaagcatccccttctaaaggtttgattgcaccgaactttccttatctggagattgcaaaggaatatgaagcggcaggagcagattgtatttctgtcttgactgaaccgaaatggtttttgggaaatgacgaatatcttaaagaaatagccgaagcagtctcaatcccgtgtcttcgcaaagatttcacagtggacgaatatcagatttatcaggcaaaggttctaggagcatcagcggttctgttaatctgttccgttctgacagaagatcagatgaaggactacattagaatttgcgatgaacttgggctttccgctttggttgaggtacacgacgagcaggaagtgcaaacggcacttaataccggagcacgtattatcggggtcaataatcgtaacctcaaagatttttcggtagataccgataacagtcgcagacttcgggagttgattcctcccggtgtactgtttgtttccgaaagcggcgtgcggaccgctgaggatgtggagacacttcgtaaaatcggcgctgatgccgttttgattggagaaacactgatgagggcgtctgataaaagagcaaagctggcagaactgcggggtgcagtatgacgaaaatcaagttatgcggactatccagaacggaagatatagaaactgtcaacgaactaaaacccgaatatgtcggatttgtatttgcccccgaaagcagacgttatgttacaccgcagacagcagcagagttaaagcaactgctttccacagaaatacaggcagtcggtgtgtttgtcaacgaaagtccgaagaagatcacggaactgttgcacagcggcatcattggcattatccaacttcacggggacgaggatgaggactatatcaggcgactgaaacaacacaccgataaaccgatcatcaaggcttttcgggtagaaacggaaaatgatattgctgacgcagaacggtgctccgccgattatattctgttggactccggtgcgggaacgggtacggtatttgattggaaacttttgctgaacatacgcaggccctatttccttgcaggcggactctcacccgatactgttggaaaagctgttacaacattacatccctttgctgttgatgttagctccgggatagaaacaggcggaacaaaggacaaagaaaaaatgacggcatttgttgccgctgtcagaaaggaagaaagattatgacgaatccaaacggacgcttcggcattcacggcggtcagtatattcccgaaacactgatgaatgcggttattgaacttgaaaaagcgtataattattataaaaacaacccggagttcaacagagagcttaccgagcttttcaatgaatacgcgggcagaccgtcaaggctgtactatgccgaaaaaatgacgaaggatctcggtggcgcaaaaatatatctcaagcgtgaagacttaaaccatacgggtgcacacaagatcaacaacgtactcggtcaggcacttctggcaaagaagatgggtaaaacacgtctgatcgccgaaaccggggcaggtcagcacggcgttgctacggcaaccgcagcagcgcttatgggtatggagtgcgtggttttcatgggcgaggaagataccatccgtcaggctctcaatgtatatcgtatgcggcttctcggcgcagaggttatccccgtaaagacggggacagcaacgctcaaagatgcggtttccgaagccatgcgtgagtggacctctcgcgtcagcgacacccactattgccttggttcggtgatgggtccccatccgttcccgaccatcgtccgtgattttcaggccgtcatttctaaagaaatcaaagagcaaatgattgcaaaagaagaaagacttcccgatgcggtaatcgcctgtgtgggcggcggctccaatgccatcggcagcttctatcatttcatcaacgacaaatccgtaaagctcatcggctgtgaagcggcaggcagaggaattgatacctttgaaacggcagcaaccattgccaccggcagacttggaatttttcatggcatgaagtcctatttctgtcaggataaggatggtcagattgctcccgtttactccatttccgcaggacttgattatccgggtgtgggacctgaacacgcacatctgcacgatatcgggcgggccgagtatgtcccaatcacagatgacgaagcggtaaacgcctttgaatatctggcaaaaaccgaggggattattcctgctattgaatcggcacacgctgtcgcacacgcaatgaagattgcaccgaccatgggcaaggaacaaatcatcgtgattaccatttccggcagaggtgataaagactgcgccgccattgcccgttacagaggggaggatatccatgagtaagattcagaaagcatttgaaaacggcaaggcatttatcgcctttatcacctgcggggatcctgatctggaaaccaccgccaaagctgtccgtgccgctgcggaaaacggtgcagaccttattgagcttggtattccgttctctgatcctaccgcagagggtcccgttattcagggcgcaaacctgcgggcactgaccggcggcatcacgacggataaaatatttgcctttgtaaaagaacttcgccgtgatgtgaaaatcccgatggtctttatgacctatgccaatgtcgtgttctcctacggtgcggaaaaatttatttctacttgttgcgatattggtattgacggacttatcctacccgatcttccgtatgaagaaaaagaggaatttcagccgctatgcggacaatatggcgttaatctgatttcactgattgctcctacctcggaaaaccgcatcgctatgattgctaaagaagcggaaggcttcatttacatcgtttccagcctcggcgtgacaggcacacggagtgagattaacacagaccttgcttctatcgtcaaggtggtcagagaaaacacggatgtaccgtgtgctatcgggttcggtatttccacaccggagcaggcaaagaaaatggcaaacatctctgacggtgccattgtcggctcagcaatcatcaagctgcttgaacagtatggaaaggacgcgccgaaatacatcggagaatatgtgaagaaaatgaaaatggctctattgaccaattatgaagtgaccccaaaaagttagacaat

SEQ ID NO: 1738 - DNA, 802 bp, Unknown
  gut microbiota DNA sequence
agtccacgccggtgcaggcttcataggcctgcccgattttgcggatacgcttgagaacaccgctgtgatttttgtagcccagcttttcggcgatctcctccagcgtgtcgccgctcatacgcagttcaaggatctgcatatccttttcgctaagcgtggccttgaactgatccaccagcgcctgtgctaccactgtttcctccacattctgcgacgggtccggctcctcgtattcctgtccgccgtgggcgtcggcataggcctcctgaaattcctccagagagatcatcgggtgcctggtgcgggtgtggtaccattggcggatgaagtccgttttctgattgctttttcgaaagtcaaagtcctcaaagcaggggtactcccgggccacttggatgatctcgtccatccggtgctttttcatcacatttggcacgatgtagcgcagatagatgtcgatctgccattccggcacatacccaaattccgagtggcaacctttgaataattcgccggcggacgccaagatgccttcgtccgtcagctcttgaatccagtagtccgggcagtgggcaaaccgccacgccgggtcgtagccggagtagatttccatatactcgccgaagcccatatatggccaaaccataaaggcggtggcgtcaatgatgagcagtcggaacaggtcgctctccacgaactcacaggcggcccggttgtgaaatagctcctgcggattcctcgggatggcgttcagctccgccccacagcgggacaggatgcttttcgggatgaagtagtagaa

SEQ ID NO: 1739 - DNA, 36129 bp, Unknown
  gut microbiota DNA sequence
gactgtaaatctgctgcttctagcttcggtggttcgaatccaccctcctccaccagaaaaaaggactttgcattttgcaaagtccttttttcaacgaaataaatccctcggtacgtgaaattgccctgcgggcagtgaaataactgcgtctccaaatcacccatggttctgcgccatcacgccgaccaaggcatgcggcacatagggctcctctaggtatgcaatctcatcggttgtcagcttcaattcaacggcgttcacaagccccgtgatgtgcgaaagattcgttgcgccgcagatgggtgacgcaaccttcgtcagcagccacgcgagggcgagctccgtcatggtgcagccgcgcttctcggccagctccgccacacgatcaataatcacaccgtcggtctcggcggtcttgtcgtacttaaatttcgcgtatttgtcttcctcaaggcgcttggagctctcaccgggacgtctcgagagccgccctgcggcgagtgcactgtatggcgtcatcgcaatgttctccgccttgcagaacggcgccatttcgcgctcctcctcgcggaaaatgagattataatgcccttgaacggacacaaactccgccatgccgtgcatgcgggcatagtaattcgcctgcgccagctgccacgcatagcagttcgagatgccgatggcgcggaccttgccggccttcaccgcatcgttcagcccctccataatctcctcaatgggcgtgcgatagtcccacatgtggcagatgtacagatcaacgtagtccataccgagacgcttcaggcttgcatcgaggcagtttttcacgtgctgctgccccgtcacgccgtttgcaatctcctcatcggtgcgcggctcaaatttcgtcgccagcactacatcctcgcggcgggcaaaatcgcgcagcacacggccaacaaacatttcgctcgtgccgccttggtagctcatcgccgtgtcaaaaaagttgatgccgttctcgagcgccgctttgatgatctcgttggagcttttctcatccagcgtccagcggtgctgccccgcggccgcttcgccaaagcccatgcagccaaggcaaatgcgcgaaacattcaggtcagagttgccgagttttacgtattccatgtgtcttccccttttctatgaaaaattcgtgatttcttgctttcagtatactaaaccatcaaaataatgtccaatacctattttttatccttctccatgccggaaatgtatttcttcgcaaaatcgagaaacgcgttcgtcagcggtgagagcacacggttctttttccaaacgagcaccgtcgcggcgcggatcggcggctgcagcggcacgaatttcaggccgttatgctgcaagtcgagcttcagcgtgaacagcacgccgttttcgcgtcgaatgaccgaggccatgttgtactgcaaattgccgtgcgcgataatgttgagtcggtccgcgctgtcgccgaaccaattggcaatctcgctgcggatctggtcccggcgcgaaaacaccaccgggtacggcacaatgtcctgcggcgtcaaatacggcttctgcgccagcggcgaatccgaccgcaccagcgcgttccacgtttccggcaccgggaagtgcagaaaatcgtacttgctgatctccaccggctccaacagcaagccgatgtccaacgtgccgcgttcaatgcgctccttaatgttatcggagttgccgctataaatactgtacgtcacgttcgggtactcggcgcgaaacgccgccagaataccggaaagatagcaagagccgtggtactcgccgctgccgatggaaatttcgccggtcagcattgcctcctgctttagttcccgcttcgtcatttccgaaagcgtcacgatctcctctgcgcggcggcggaacaacataccctcctccgtcagcgtaatgctgtggctgctgcggctgaacagcttcacgccaagctcctgctccagccccatcagctggcgggaaagcgtgggctgtgtgatatgtaaaagctgtgccgccttcgtgatgttctcctcacgcgcaacagccagaaaatactgcaagactcggatatccatagatctgaaagcagcctcctaaacctcgggcggcaaacgcgcaccctttatatttcgtattataacacgcctgtcatgcccatttcaatacagcgcattgttcaagttgtgcagacaaaccttgtgcaacttcaataaagttttgcgccttatgtaaatcttctgttcagttttaaaatcaaatcttacaaatctctttataaatgcaaaaaagctgcaaaagcccttgtaaatccagaaaagttgcgctaaaatagtaatccgcgccggggtatttcttatttatatgagcgtgctcatgtacgcacatgatttgaatttttatgatttcgtaatttcttgaaacggttttaccggatcacggtatacggccgcggtccacaggaggtgcatttatctgcaagtattcagagcactgaaaaagggatttttagagcttaccccaaacgaaaaggtcttgctcgttttaacggcttccattttcctcaccgtctatgccgagatgctggcgctgcttttattgccgttttacattgccgccacgaagcagagcttcgttttcttccgccgtaaacaggatttattttttctttcggctttctgggtgctctccctgctcgtcacgattttctcaggcggcaccgtaacggatattctgctcggcatttttatggtgttcgcattcatcgccgtcattttcgtcagctatacgatgacccagcgcgcgttccgcctcattttatctttcgtctgcctcatgagcccctattgcctccttgtcgcgctcgttcagcgcgcgctcggcatggagtgggtttacggtgcgcggtataactccatctttacaaaccctaattactatgcgttttacatttcgctcgtcgtgctcttctgcatctataacatcgtaaaaagcgaagacacgccgctgcgcggtgtatacgctgccctgattccgttaaatcttatcgcgctcgagctcaccgaatgccgcaccactttcgtggtgctactcatcgtctgccctgtcatgctgtggttctgtggcaagaagaagtggctttccgtgtaccttttcaccatgctcggcattttgctcacactcgttctgttcggtgaatcgcttgatttcctcccgcgcatcgatctcatccgccacgattttgcaaaacgcatgagcatctggtcgggcgccatcggcagtattatggacgccccgtggttcggccgcggctacaatacatacgcacgcatccatgacctctacggctcatacagcatcgcaaagcattcgcacaacctgcttttggagctcctcatggacttcggatttgtgggtacggcggtcttactcggttactttgccatcaatgtcggcaagattatccgcttgcaccgcagccacaagtgccaccagcgctacgccctcacgatctccgtcatcgtgtgcgtgctgctgcacggacttttggatatctccatgctgtggccacagaccggcctgctcgtcatttacatcgtcggcttcagcaccgagtacgacaagcagcacatcttcggcacagaccgccgccacgagatttttgcgctgcacgcaagatccattcaggcaaaagaacccatcttgtaaaaaattctgttatcctttacaaaaaggctgccgaaatttcggcggtctttctcttttgtgtctcttttcggataacgcgatttttgttataataaaagagttttggacaataccgcataaattccccgcggtactgccccctcaatttttcagcaaaggaagatctattttatgggcggttttttcggcgcagcatcgcagactgactgcgttttcgacctttttttcggcattgattaccactcccacctcggcacacgccgcgcgggcatggcggtttacagcccggagaccggctttgacaaggccattcacaacattgaaaacgctccgttccgcacgaagtttacaacggaatcgcaatctatgcacggcacgctcggcatcggctgcatctccgattatgaagcacagccgattttggtgcgttcgcatcacggcaccttcgccattacgaccatcggcaagatcaataacgccaatgagatcgtagaggacatcatcgggcgcggcacgcatttctttgagatgcaaaacggcgaagtgaaccccacagagctcgtcgccgccatcatcgaccagaaagagaatttcatcgacggtattcgctacgcgcaggagatcgtcgacggctctttgagtatgctcgtcctgacgccgcgcggcatttacgcggcacgcgataaactcggccgcacccccgtcgtgctcggccaaaaggaagacggctactgcgcaagctttgaaagcttcgcgtatttaaacctcggctaccacgacctgcgcgagctcggcccgggcgaagttgtcgtgttcgacgccgaccgtgtgcaaacgctcgtcgcccccggcaaaaaaatgaagatctgcacgttcctgtgggtctactacggctacccgtcctccagctacgagggcatctccgtcgagagcatgcgctataactgcggccgcgcgctcgcccgccgcgataacgtccaccccgatattgtcgccggcgtaccggattccggcatcgcgcacgccatcggctatgccaacgagtccggcgtaccgttctcccgcccgttcatcaaatacacgcccacatggccgcgctccttcatgccgacgcaccagagcaagcgcgacctcatcgccaaaatgaagctcatcccggtgcatgacctcattgagggcaagagcctcctgctcatcgatgactccattgtgcgcggcacgcagctgcgcgaaacgaccgagttcctctacgcaagcggcgcaaaagaagtgcacattcgccccgcctgcccgccgctgctcttcggctgcaaatacttaaacttctcccgctccacgtccgaaatggagctcatcacccgccgcgtcattaaagaacttgagggctgcgaccccgaccgcgccacgcttgaagaatatgccgacccggacagcgcgaagtaccggaagatggtggagaaaatcggcgaaaagctgcacttcaccacccttcactaccaccgcctcgacgatatgatagagtccgtcggcatcgacgcagactgcctttgcacctactgctggaacggcaaggagtaatgtaaatgcatgtcaaaagtatttttgatctgcggcaaaatctgcagcggcaagggcttttatacccggcagctcaaggaaaaagaacacgctgtggtactctcctgcgatgagattgaaaacgacctcttccaccatgaccttggcgaccgccgcgatgcgattagcgcggacatcaaagcgtatctccacaaaaaagccgtggacatcgcccgcgcgggctgcaatgtcattttagattggggcttctggagccgcgaagagcgcacagatgtttctgcctactacaaaaatgccgacatcgacttcgagtggcactacatcgacatttccgatgcagactgggcggaaaacattgaagcgcgcaacgctgccgttgccgccggtgaaacgaccgactacgccgtagacagcggcctgctgcaaaaagttcttacgctttttgagacccccacacccgatgagatcaatgtgtggtttacaaaccgcagatagttttacacagtgaaaaatgacgacagttaagcgcaactgccgtcctttctctatgcccggattgtttttacacttcgccgttaaacagcttttccgcgtagcgcacactgcccatcgcatctttggagtagaaatccgcgccaatctccttagcgtactcggggttcagcaccgcgccgcccaccatgaccttgcagtcatgcgctttgcgcagctggcggatcgtctccgccatgctctccaccgtcgtcgtcatcagggcagaaagccccacaaggcgcacgtttttctcgatcgccgtctgcacaatgatctccggcggcacgtccttaccgaggtcgaatacgtcaaagccgtagttttcgagcagcaccttcacaatgttcttgccgatatcgtgaatgtcgcccttcacggtcgcaaggatgatggtacccttcttttcctcctgaatgccctttttcgcaaggttctgcttgatgcgctcaaacgcttccttcgctgcatctgcgctcatgagaagctgcggcaggaacaccgtatttttctcaaagccctgccccacttcgtcgagcgccgggataagctcaccgttgatgatttccagcggcggcgtcgttttcagcatctcgtccgtcagctgtctcgcctgctcgcgcaggcctttcacaatggcgcggtgcagcgaaacgctttcggcagacccgccgcctgcgctctgctgcgcggcgcccgtgcgcacgtccggcgccgccgtggtgttcgcatacgcttcgatatacgccttgcagcccacgtctatgcccatcagcgcgcagaacgagcggtacgccttcatcagctcgtcgctcagcgggttgatgatgccggagcttaatccgcgctgcatcgccatcgcgaagaacgtggaggtcaccagctcgcggcgcggcagaccgaacgaaatattggagacgcccagcaccgtatgcacgccgagcttgtggcggatggcgtcaagcgcatcgagcgtgataatcgcgttatccgcgcccgtgctcaccgtcattgcaagcgtgtcaataatcacgtcgctgcggtcgatgccgtagctttccgccgttttcaaaatcttctccgcaatcgccacacgctccgcagcagaagccgggatgcccttttcgtcgagcgtcaaggcaaccaccgcagcaccgtactttttcacaagcggcagtaccgtgtgcagcgattcctctttgccgttcacggagttcacaagcggcttgccgttataaatacgcagcgcgcgctccatggcctccacgttcgaggtatcgatctgcaaaggcgtgttcgtcacgctctgcaagttgatgatggccctttccatcaccgcgggctcgtcaagctccggcagccccacattcacgtccagaatgtccgcgccgtgctccgtctgcgcaatgccctcacggcacaaatattctaaatcaccttcgcgcaaagcctgctttaagcgcggcttgcccgtcgggttgatgcgctcgccaatcaaaatcggccgtgcaccgaacgtcaccgtatgcgtgtacgaggacaccaccgtcttcttttcaatgtgacgctccttcaccggcttgtttttcaggcgttctgcaagcagtcggatatgctccggcgtcgtgccgcagcagccgccgagaatcgccgcgcctttctccgcaaagcgctccatgtacgcgtaaaattcctccggccccacggggtacgaggtctcgccgttcacagaaaccggcagaccggcgttcgggttgatgacaatgggcaaattcgtcagcgtcagcatttcatcgacaaagctttccatctgctccggaccgaggctgcagttgatgcccaccgcgtccgcgccgaggctctccgccagcagcagcgccgccgggatgttgctgcccgtcaagagctttcccgtgctgtcaaacgtaaacgttacaatgaccggcaggtcacagttttcctttgccgcaagcagcgctgccttcgcttcgtaggcatcgctcatcgtctcaatgatcacgaggtcggcattgtccctgcccgcgataatttcctctttaaaaagctcgtacgcgtcatcaaacgccaaatcaccgaacggcttcaaaagcttgccggaggggccgatgtcgagcgccaccgccgccttgccgccgcttgccctatgtgcaagcttcaacgcctgtgagacgacctcctgcacggtatggcccgtcttttccagttttaaacggttcgcgccgaacatgttcgccgtcaaaatatcgcagcccgcgttcacgtagtcggactgaattttcaaaagcacctcggggtgtgtcaggttccaaagctccggcagctcgccgcccataaggccgtttgcctgcaaaagtgtgcccatgccgccgtccacaatgacaacagattttccgaatcgttctataacaggatgcataaattttcttcctttctctgcgcgtcagatttcgcggaactcgcagtcggtgttcgcgcagccgcggcactttacgtatgtgcatgtcggcgcgtccgtcacgccgatgaccgccgtcacggatttaaacggcaccatcagcatggtgtccgtcagcgtcagcccaatgcgctttgcacattccagccgcgcaaagatctctttttggctttcgagcgcaaagtcgccgtaccccggcgaatagcgcggcttcaaaaataagcccgttgcggcttccttttccgcgatctgcgcctgcatttcgtcacagtagtcttcaatgagcgcattcgcaacggaatgcgccaccgtgccgcgcgccatattgagcgcggataaccgccgtatcatcatatcggcctgcaaacccagcgtcgccgcaaacaaatacgccgccttgcagccgcgtaaatggcgtgaaagctttatgctctcgatgcgccagccgtccagctccaccgcgttctcaagtacttttatatcgtatcttttatatacgcatttcggcgtgagcgtgcgcagcatctcgccgccgatctcgcgaatcatctcatcggtgtccgcatcggccggcttcccgcgaaagccaaggtagcgcagcgcctctttctcattcagcttcatagccgtcaatgatctttgaaaggttcgtcatgatgctgcctgcaatgtccgggcggttcatcgtgtagatatgaatgtgcgtcacgtcattcgcgatgaggtcgatgatctgctcggtcgcgtacgcaatgcccgcctgcttcatcgcctccgggttgtccgcaaaacgatcgacgatcgccttaaagcgcgtcggcatagaagaactcgaaaggctcatgatgcgcttaatctgcttcgcgttcgtcaccggcataatgcccgcaatgaccggcacgcgaatgtcgtggcgcaggagcttgaacatataattgtaaagaatgttgttgtcaaagaacatctgcgtcgttaaaaactcgcagccgctttccaccttgcggcgcacgccgtcaatgtccgcgtcgctgttgtacgattccgggtgtccctccgggtaacatgcgccgccgatgcagaaatccgcaccctcgcggcgaatggcattgatgaggtcgctcgcgtgcgggaacgtctgcggcgccgtgtcaccctccggaatatcgccgcgcaacgccagaatattctcaatgccgctcgccttaaacgcattgatggacgctctgaggttctcttcgtcctgccccacacacgtcaaatgtgccagcgccgtaacgccgcttttctgcacctcttctgcaatggacagtgtgtttttggagttggagccgcccgcgccgtaggtcacgctcataaaagagggcttatatgccgcgatctcatgcaccacctgctgtgtgttttccaatggtttgcccggcttcggcgggaacatctcgcaagagaccgtcaccttattggtcttcaaaatatcggaaattctcataagtcatcactttctgtatcggtttcgtattttcattgatataccgttaaagtatagcataaaaatgcaggaaacgcaatttgaaaatgcagaatttcgctgttttttccgcttacggttccggccgcatcagtgggaacatcaccgtgtcgcggatattcctcgtgccgagcaaaacctgcaaaacgcggtcaatgcccatgccccagccggaaatgggcggcatgccgtattccatcgccgtcaaatagtcgtcatccatcaccatagcttcctcgtcgccgtccgcgtggctcttcgcctgaatttgcagtctgcggcgctgctcattggggtccacaagctccgagtacgcgttgatgatctccgcgccgttgatgacaagctgaaagcggtccgtaatctccggatcatcatcattcgcgcgcgccagcggcgacaagtccgttgggtgcgcaatgagaaacgtcggcgcgatcatcttcgggcggctcaccttcttgtataataaatcgatgaggtttccgcgcccaagcttcttcgggtcgtcggtggagtttaattcaatatgccggctttcaatttcctgcaataaagcctccgccgtcttaaactcgtcaatgtcaatgccgcagtcctttaaaatgagctcgcggaacgtcaccaccgcccattccgcgccgaaatcgatctcggtgccgttaatggagatgaccgcgctgccccgaatcttcgtgatgaccgtttgcagcatgtcctgcaaaaagcgcatgttgtcgcggtagttatagtacgcgcagtagccctccagcatcgtaaaatcctgcaaatgtgtcgtgtccatgccctcattccgaaagcaccgcgcaaactcaaacaccttcgtaaacccacccacaatggcacgcttcaaatacgtctccggcgcaatgcgcagataaacgtccatgtcaagcgcattgtggtgcgcaacaaacggccgcgccgtcgcgccggacggatgatcgatgagcaccggcgtttcaatttcgatgtagccgttgtcctccaaataccgccgaatctcccgcacaagctgcgacttgaaaaggaaccgcctgcgcgtctccccgttcatgcacaaatcgaggtaccgcctgcgccaacaaagctccgtgtcctgaatactgtggaacttctccggcagcggacggaacgccttgcctaaaaacgtgatgcacttcgcgcgcagcgtcttttcgcccacctttgtcgtgaacatctcgccctccgcgcccataaagtcgcctacgtcaaagcccctcttgaaaaagtcatacgtgtcctcgcccacttcgtcgcgcatcacggcaatttgcagcttgccctccatatcggagagcgtcacaaacgagagctttcccatgcgtcgaatggccgtcacacgccctgcaacgcacacgtcctgcaccccgtccggcagctttgccgcctcgcacagttcatgcgtttgcgcatagcgctccgggtacgggtttacgtgctcccgtacataatggaactttgcctttcttgcttccaataacgtgttttcgctcattttctacaccctttcgtgctgttattttcatcgggcgggaaatttagagcgtaaaaaatcccgtccctgcttccaaggacgggatacaataacccgtggtaccaccttagtttgcccgcgcctcacgacgcacgcctttgcaagtacagacttcgccgcaggaaaagtacggaaaacatcgatactcctgtgctgtaacgggcacgcccggcatagtctcagcgcaaaaacgcagtcggtatgcagctccaaggctttgttcggtgatccgttcctgcaccccatcgcagcttacggggctctctgtgccattcccagatccctactgtcactcttcatcgcttgttaaaacggagtatagcacacggttttcaaaaagtaaagagaaaattttcatccccgcgcattttcctcgctttgcacgttgtgcgggcttgttttcgcgcctgccttgtgctaaaataaatgagaaaaagtcgcggaacagccgcggcggttgtattgatctcattttctcttgggagggctttattatgtcagaacctttacgcgccatgatgatcggcgcacacccggacgatgtcgatatctgcacctgcggcatcacaaagcgcttggtttcaaaaggctgcattgtccgctttgtctccatgacgaccggcaacgcaggccaccagaccatgcgcggcgaagaactcatcaaaacgcgcgcggcagaagcacaaaaaagcgctgcctacctcggcgccacctatgaaattctgccgttcgacgacggccgcctgaccccatcgctcgaagcgcgcgaaacgctcatgcgcaccatccgcaattttaagccggacgtcatcttcacgaaccgcgcgtgcgattatcaccccgaccaccgcgctacgggccagctcgtgcaggactgctcgtatctcatgggcgtgcccgccatttgcccggatacccccgtgctgcgcaaaacgccgaccattctttactgggcagacggcttcaccgacccgaaaccgttccgctccgatttcgcccgcccggcggatgacgaccgcgaaacgctgtttcacgtcgagtgctgccacgcctcccagtttctcgattggcttccgtgggcagatgaccacgtggatctcgccggtaaaacgcacgaggagcgcgtagagtacctgcgcagtacgttcaactgggaccgcggcgacgtggacgaggacgtgctcgcgtgcctcactcgccaatacggcgcagaatttgcaaaaaacgttcgctttgccgaaagctggcaggtgagcgaatacggcgcgcctgtttccgatgcgctcaaagaactgctcatcggtctcgactgagccgaatatttccgcggttcaccccgcaaatcaaagaccaaaggatagaaaaatgaaaattttagccattgaaagctcctgcgatgagaccgccgcagccgttgtagaaaacggtcgccgcgtgctttccagcgtcgtcgcaacgcaggtagaagaacacaagttatacggcggtgtcgtgccggagatcgcctcgcgccgccacagcgaagccattgtaggcgtcgtgcgtgaagcactcgagcgcgcagagctcaccgtaaacgacctcgatgccatcggcgtcacctacgcgccggggctcatcggtgcgctgctcgtcggcgtaaatttcgcgaaaggcctctctctttctgcaaatttaccgctcatcccggtgcaccacctgcgcagccacatcgcgtcaaactacatcacgaacccggaactcgagcctccgttcctgtgccttgtcgtctccggcggccacacgcacatcatcgaagtgacggactacacaaagctccgcatcctcggaaaaacgcgtgacgatgccgcgggcgaagcgttcgataaggccgcgcgcgccatgggcatgccctatcccggcggcatcgccatggataaactcgctgagaccggcaacgacaaagcgttcaagctcccgcgcccgaccgtagacggcgccccgctcgatttcagcttctccggcctcaagaccgccgtcatcaacattctgcataatgccgagcaaaagggccagaccgtcaacatcgccgatctttccgcctcttaccgcaaggccgttgtcgattgcctcgtgcgcaactttctgcacgccgcagacgagaccggccataaaaagctcgtcatcgcgggcggcgtctccgcaaactcactcctgcgccgccgcctcacggaagaatgcaagcgtaccggccgcacgctctatatgcccgacctctctctcaccggcgacaacgccgccatggtcggcgcacaggcctactacgaatatctcgccggccataccgccggcatggagctgaatgcctgcgcccagcgctccatcgacttaggctgagttttcaaatttcacaacgccaaaaaacgacccgcaaacggaattttctccgtcccgggtcgtttctttatgcctgtttggttttactcccgcggcaccacaaaccagtgctggttttcctgcagcttttcctctgcgcgcttcaaaagcgctttcgcgtcgataaggtagcacgtcgcatcgccgatcttccccgtaacgatctcatttttcgcggggtccagaatttccttcacgcggcggtacgtcgtctcccagcccttaaaatcgtggccgtacatgtacttttcctcgccgttcacaacgtagcggatcttctccttcgtcaagacgtagtccgtgccgaagcgctcctccacgccgtgcataaacgtgcagcagtcaagcacctcgccgatgaacagcagccgtccgccgatctccggcagcttcataaacggcgaattcttccccaccggggtgatgtcctccccatgcaatgctgtcagctccgcagcacgcttgccgcgcgcacaaacggagtgcgtcgggtgcacgctgcgcaccacgcccggcattttccaaaacgtgcgaggcaaaagcccgatgcacggcacggttttgtccgcgtcaaacaccgggtgctccggcgtgacgttctcatacgtcagcgcgggcagcaaaagcgtgccgtcgtcgccaagcgccgcctgcaacgtgtcgagcaccgtctccggcgtctcctctgtccccggcgccttcatcgatgcgtgcaccaaaatcgtctcaccctctttgattcccagcgctttcatatccgccaaaagcttcttcgcatcattcatttgagttttcctccccataaaacaatacccaaacagcgcttattcaggcttttttatttcaccgaatcaatcgtcccgccgcccaaaacgcggtcgccgtcgtacagcacgacggactgcccgcaggtgatggcgcgctgcggctcgtcaaagacgaccttcaggctgtccgggcccgtctgcgtcacggtcgcccactgctcgggctggcggtagcgcaccttcgccttaatgtgcatcggctccttgatttccgcgacggaaatcaaattaatgccgctcgccgtgagttcctttttgaaaagctcgctttccgggcttagcgtcacggtgttcttttcaatatccaccgatttcacatacagcggcgccggcagcgcgagtcccagacccttgcgctggccgatcgtgtagcggatcacgccgcggtgctgccccagcacgttgccatccgtgtccacaaaatccccgggcggatacgttttgcccgtgtactgctcgatgaaatcggcatatgagccgttctgcacaaagcagatgtcctgactgtcgtgctttctcgcattgatgaaattgtgcgcctccgcaagtgcgcgcacttcacacttctccatgccgccgagcgggaactgcacgtgctttagctgctcctgcgtcagcgaccacagcacatagctctggtctttgttgtggtcaacggcctttttcaggagataccgccccgtattttcgtcaaaatcgatttgcgcgtaatgccccgtgacaacataatcataattcagctcaaccatgcgctgaaacagcttatcaaacttcaaatagcggttgcaatcgatgcacgggtttggcgtcacacccgtttcataagcgtgcacaaacttgtcgataacatccgttttgaagcggtcggcaaaattaaacacatagtacggcatgtcaagcgcatacgccacactgcgcgcgtcctctacatcatcaagcgaacagcaggtatgctcgcggcgcagaccgacgtcctcattctggtacagcttcatggtcgcgcccatgcaggtgtagcccttttctttcataagcagcgccgccacactggaatccacgccgccgctcatggctatgatcgcttttttacacatagtttcggtaaaaccctttcgttatcgtttcacatcgccgcgcgcggtgacgatctcatagcccgccgacttcacgcgctgctccagacacccgcggcactgcgcggcctcttcccctgtacagatcttgttctcgtacagctcataaagctttcgcacgcgcaccggcgaaaggttcggcatcacaacgtttccgcccgccttcagtcccagctcgcgcccttgcgggtggatggtgccaagcgccgtcgtagacggcaaaagcgcatacggaaacaacaaacgcaatattgagagaagccgcagcgtcagctcgagcgagccgctcttttcgtttgcaaacggcgtctgcgcgtgcgtgatatacggcccgatgccgatcatgtccggctgcaacttctgcaaaaagcgcaggtcagaaataagattctccgtcatctgatacggcgaacccaccataaagccggaacctacctggtacccgatgtcctttagatcaaaaagacatgcttgccggtgtaaagcgctcaattcattcgggtgcagcttgccgtaatgctcgggatcggccgtctcgtgacgcaaaagatagcggtttgcgcccgcatcaaaatacttctggtagctttcgcggctcttttcgccgatggaaagcgtaatggcgcagtccgggtgctgcgcatggatggccgcgacaatctcgcagataaggtcatccgtgtaaaacgggtcctcgccgccctgcaaaacgaacgtgcgaaagccgaggttgtacccctccgcgcagcaggagagaatctcctctttcgtcaaacggtaacgcgtcgcgtttcggttatcccgacggatgccacaatagtaacagttatttttgcagtaattcgtaaactcaatgagtccgcgcacgtacacgtccgtgccgtagtgcgcgcggcgcacctcgtccgcggccttttgcagcgccgcatcgtaggcgtccgtctccaaaatcgtcttaaattccgcatcgctgaggttacgctgctcgcgcagacggtcgaccaaagcgttaatttcatttgcggtcatgaaattccgcctttctttattcggtgtcgctcactccgcctgcggcttttccagcgtgcgcatcgcaaggatcgtgtcggaaatgaggtcgtcgagcgtccagcccagcatatctgcgccgcgctgaatgacctcacgggagcagcccgcggcgaagttgagcgccttgtattttttctttacggatttaagctccaagtcgagcgtgcttttcgacggacgcatcagcgccaccgcgccgatgagccccgtcagctcgtccacggcgtacagcaccttttccatctcgtgctcgggcgcaatgtccaccgtcagcaaatagccgtggctcgccgttgcgtggataaggcgttcgctttgcatccctccgcaaaagaactaaaagcatacggttttactatgctttgattttacacacgaagcgtcgctttgtcaagggaattaagcgaagttgcgccatacgccgaaaatgagcgccgagaggaaccacgccgcccacagcgcaatggaaaaacgcttaaaaagcagcggcggtttaccctttgcgtaccgcaccgcttccaaaacgccccaaaggagcgcaaacggcaaaaagaacagcataaaggggttcagcgcccacgcaccggcaaagtccaattgcaaaagcgctgcgatcatccgtgtcgttccgcaggaaggacacagcacgccgaaaaccttgcggacgaggcacggcggacgaagaatatacaaaacgacaagcacagccgcagcaccgaaagccgctgccaaggcccgcttaatccgtctttgtctctccccgctcatatctcgctctccttttaaacttaacatttctattgtactgcaaaagcagaataccgtcaagcgctgcaagtttgtttatcttttgcacactttatgtaaaaagtgtttgcattttcgaaaaaacttcttgcaatttctgtgttttgtgatataatcaaacttgcagtaaactttaatgtgttgtacgaaacggcacaactattctcgggaggaattcaaaatgaacactggttatcttggcgatacgaccccgaagctcggtttcggtctcatgcgtctgccgatgatcggcgacgagatcgatatggagcaagtgaaagccatggtcgatactttcatggcaaagggctttacgtattttgacaccgcatacgtatacatcaacggtaaaagtgaagtcgcagcgcgcgaagccattgtgaagcgctacccgcgtgacagcttcacgctcgctacaaagctccccctttgggacaacatagagacggaagccgacatgcagcgcattttcgatgaatctatggaacgcgcaggtgtcgagtatttcgattactacctgctgcacgccatggacaaagcgaagttcgagaaagccgaccgcatcggcgcgtgggacttcattttcaagatgaaagcacagggcaaaatcaagcactgcggattctcgttccacgacagcgcagaagtgctcgacgaagcgctcaccaagcacccggaagccgaattcgtacagctccagctcaactacatcgactgggaaaacgataacgtacagtccagaaagtgctacgaggtcgccgtcaagcacaataaacccatcatcgttatggagccggtcaagggcggttccctcgcgggcatgaacaacgaaattcagggcatcatgaaagcacaaaatcctgatctttccatcccgtcttgggctgtccgcttctgcgcaggtctcgataacatcctcaccgtgctctccggtatgagcaccaaagcgcagcttgacgataacgtctcctacatggagcactttgagccgctcagtgacaaggagcacgaggtgctgaaaaccgtcgtcgaaaaactcaacgccattcccaccattccatgtaccggctgccggtactgcgtagacgactgtcccatgcagatccacatcccggacattttccgtgccgtaaaccaccagaagcagttcggctccgaggataatgtcgatcgcagcggctacgaatccgcaacacgcgaaggcggcaaggcaagcgaatgtctccattgcggttcctgtgaagcgcactgcccgcagcacatccacatcatcgaagagctcgaagatgccgcaaagctgtttgaaggctgagtaaaaaccacgacataaaatcgaccgggaagcacagcgcgtgtttcccggtctttttccgtttatttttcctgcacggcaatgatgaccttcatcgtcgtctcgcggttcgcgtcaatgtatttatacgcgtcaaggtactgcgcaaacgggaaaattttcgagataagcggctttaactgcactttgcccgcttccaccagcgctatcgcgcccacgtagtcctcgtggcggtacatcatcgtgctcttaatatcaagctcgtggtcgttcgccacggccagattaacggtcgccatgtcggcaaacactgccacaagcacaatcacgctacccttgcgcgcatactgaatggcctgccccatcgtcacgttgttgcccgcgcagtcataaatgacgtccgccttgtccgggccaaacgcttcaatgagcgcctcgccgaagttcttctccttcgtgttcacgcaaacgtccacgccgcattccttggctttctccaaacggtagtcgctcacgtctgtgatcatcaccttcgccgcgccaaggccttttgccgcctgcgccacaaggttgccgatcggccccgcaccgagcaccgcaatgttcatgccggtcacgtcgcccatctgccgcacggcgtgcaccgccactgcaagcggctccagcatcgcgccctcttcaaagctcatgcttttagggattggtgtcactttcatcgcgtccaccgcaaaaaattcggatgccgtgcccgtcgtctggaagcccatgactttcagctcctcgcacaggttgtacttgccgtgtcggcacggatagcacttgccgcagtacacctgcggctcaatcgtcactttctgcccgacggtaagcccttcgacattcgcaccgcactttacaatttcgcccgagacctcatgtccctgcgtcacggggtatttcgtgaacggatgcttgccgtggtacacgtggatgtccgatccgcaaacgccgatgtccataattttcaccagcacctgcccgtccccgatttccggcacgggaatttcccggaaaatgatcttgcccggctctgtcataacttgctgaagcatacgctttcctcccaactactttagtaattttcgtatctgcacttccgtcgacggaagcaggtttttaaggtgtgcaatcattttttcttcggaatccttcggttcgctcttatatgcagacgtcacataatcgtacccgaataaatgctccggcgtcgtgtactgcgccaccgcccagccgtagggcctgccgtttttatccttcaggcggataaaatccgaaacgcacaaatacgtctgcatttgcagccgcgtgatgcacgtttcaaagcccgtgttgccgcctttgcggtaatcgagcttctttttgaggaattttgaaagaatttcgccctccgcatggactgtgttatacagctcctcgtccttgtggaacaccagtccgtcatcgcagcgcgcgtcaaaatcatagccgtcacggcggaaatttacaagctccggcagccattcccggctgacaaaccccgcttttttctggaaaagcttgccgtacgcgcagcgcttcgtctgcgccgccgggcctttccactcccaaggtccgtcgcggtcttcagcgaaccaatacgccggcgcgcacatctcctccaccgaaaagcccggaatgtcattcggaaaaaacggcagaaaaccgtagtattccaccgcctgcaaaaggtcttccatgctctccaatttccgtttcattttccacgccctcttttctttatatcgcttccagtatagcgtgttttcaccacaaaatcaagatatgctgtttaattttaggcgtatataaacaaaagcagcccgcgttttctgcaagctatcgttgtggttttattcggaaagagatgcgattaaccgttcattatatccaaaacaagcttcacgattataacgaccatgcccacaacgcccatcgcaatgccgatatcggcctttttcagcgacggtgcgtctggatctctgaatgtgcatcacggggtcttacgcaagccggtgacccgtgctttggcgtcagaaagccaaagcttcgggcacaatttatgccctcaaggcagtttaacttaacatgaaattgagaagtatgtatcgtttgtttggtggaaaatttcactgcgcagcgatatactgaatgcagaaaggaagtggaacttatgctcgccgataatctcattttgctgcgcggccttaaagggctgacgcaggagcaggcggcggaaatcgccggggtgacgcggcagtcctactccaagtgggagcagggcgaaaccgtgccggacattgaaaaatgcgaccgccttgcaaggcactacggcgtgacgctggacgcgcttttgcacgaccaaaaccgagtgggccacacggccctcgcccctgcccctgcgggcaagcacctttggggtgcggtgacactcggcgcgcgcggacagatcgtcataccgaaggctgcgcgggaaatgtttgacttaaaggagggcgaccgactgatcgtgctcggtgacgagggtgaaggcattgcccttgtgaaagcagaagactttgagcgaaaaatgcagaaagcgctcgagatgagccaacgccctgccgagccgtaaggtttgcttccgcaaaattgttacacattcagagaggagaagaattctatgaattgcccgaaatgcggaaaagcgatgcgcgagggatacttgtttacaagcaaggacggcgcgttcagctttgcgaacaccgtgcccggcgtatttgaaaacgccaaaaacgccgacggctttgtggagatcacgccgttaaagccaagccaccgcgtgcggatacaggcgaatatctgcgaagactgccacacggtggtttttgactattaagcttcgcctaagcccgaaaaaggaaactgaaaaagacgaaatacgagagaaaaaagggaggctgcagtacacggagcagcctccctatccttatctttgcaacgcgctaccaagctctgtcttctccccgctccgacagacaaaatattcaccatcaaatcttgatttttaatatcacaatgtgataaaatacaataaatttagctgaatctgaaaatgtttgttgaatttttttaaaggcaaatcgttaatttattttttaaggagggatgtctctattatcttcattgtagtcaattcacagaatgccatatagcatagcccttggagaggggctttaataactactactctagcataaggagacatagtgaaattcactctgttgtgatagctttcattatgaatttaaaaatggaaaaagatactttgaacagaattctagagtacatgaaagtttgcatgaacgatgcagctcacgatattctgcacgtgtacagagtagcaaatcaagcaatgctaatcgcacaaaattatgaaaacgatgtggataacgatgttttgctcgtttcatgtttgctacatgatattggtagaaaagcacaatttgaaaatccaactttatgtcatgcccaagtgggagctgatatggcatatcaattcttgggttcactcggatttgaagaggatttttgcaataaagtccatcactgcatcaaatcacatagatacagaaagaataataccccagaatccatagaagcaaagattttattcgattcggataagctcgatataacaggagcactgggcattttcagaacattactgtataagggacaagttaatgaacccttgtatgcagtagacgaaaataatgttatttatactactgaagcaacacagcccgagtcattcatcaaggaataccacttcaaactatctaaagtatatgataaattctatactaaagaagcttttttaattgcccagaagcgcaaaaagttaacagagagtttttacgaagaattaataagcgaaattgatacgcaggagatctgcaatattcttgacgttttacaataagtaaagcatacaggtgacttgaaatgtatattgaataaaaacagcgaggtgccgtgggtatccccatgcacttcgctgttttgtttgattttcagccgggatcagcccatattggagaagcgttccacagcttttgtgaagttttcgatggttttatctgcgtcgccgtgctcgatgccgtcgcgcacgccgtgcttgatgtgcccctctaatacgaccttgccgcagccgtgcaaagcggattttgcgggaaatggcttacagctttaaaagcgggatggacgctctgcacgtttcgatcaattcgcggtcggcgagcgcagggatcgcgccttttttcgtcgcgcagacggagcctgcggcgtttgcgaaatcggccgcgtcgcgcagctcggcttcgttgatctcggaaacgggcttgccggtctccataagctttgtgaggaacgcgccgaagaagctgtcgccggagccggtggtatcgacgacttttgtatcgtaggtgttgagcgttaaggtggttttcggggtgcagacaacgcagccctttgcgccgcgcgtgatgactgccgcctgcacgccgagcttaaagaactcctttgcgcccgcttcgatctcggtgcagccggtgagcatttcaagctcctcatcggacgctttgacgacatcggcaagcggcagcagacttttcatggcgtggatgccgacttcggcatttggccacagcggtgcgcgccagttcgggtcgtaggcggtgatagcaccgtgctcgcgggcgtaggaaacaatctgcggcacagccatgcggccgggttctgcggtgagcagaagcgagccgaagcacagcaccttggcgtttgcgagtgcatccttattgacctcgtcgaacgtgatttgcgtatcggcgccggggttacggtaaaagctgaaatcgcgatcaccggattcggacagctgcacaaacgcgagcgacgttgcggtatcgtttgagaaatggaggttttcgacatcgacattttgcttaacgagcgtatcacgcaggaacgtgccaaacatgtcctgtcccaccttgccgatgaagcctgcggatacaccgaggcgcgccgcctgcacggcgacgtttgccggtgcgccgccggggttctgctcaaaaatcgggatgccggccggcgttttgcctgcgggggtaaaatcgatcagaagttcaccgagtgcgtaaaaatctgccatgaaaaacagctccttaattacagaatattttcatcaatgcactttaagacaaattcgctgaacagggagtttgaccatgcgaaccacgggcgcgtgaacttagaggggtcgtccttatggaaaccctcgtgcatgaagcccttgccgtcatcggtcgtttttaacatgcggagaagcgctttgcattcctccgggtcacggcttgtgagtccctgcatggaaagcgcgatgtgccagatatactccggcggggtgtgcggactgccgacacccttggccgcggtgccctcgtaataatacgggttttctttgctcaaaacaaaggcacgggtgtttttataaatttcgtcgtcggcgttgcagtagccgaggtacgggatagacataaggctcgggacgttggcgtcatccatgaagacgtagttgccaaggccgtcggtctcataggcgtacattttgccgaacttcgggtgctcgacgacgccgtatttttcgatgccgtcgcggatctcggacgcgagcttttcggcacgagcggcgacttcctcgtccttatagatctcacgcatgatctccgcggtgtagccgagggttacgacggcgaacatgttggacgggatgagatagccgtagacgcaggcatcgtcgctgggacggaagccggaccaggtcatgcccgtaacggcgaccggcgcgccgtggccgtcgtgcgtgagggtatcggtgggcgggcagttggtgcggcggaaatagtacggggacttgctgtgatcctgctcgacagtgaaaaggtcaaggatgcgcaaggtgctctttttgtactggtcattgaactggcccgtgcggccggtctctttccagagaaggtacgcgagctgcaccgggtagcagagcgaatcaatctcatacttgcgctcccagacccacggggtctcgaaatcggtatcgtcggactcgccgccggcggtttgaccgagcgtttccgcagcgtacttcggccagcacatgccgttcgcttcctgattgaacgcgtttgcgtaggggtcgatatcgatgcacttgaactggcggttcacgaggccctcaatgcaatcggcaacctccgcgtcgtgctttgcgacgggcagatagtggcgaacctgcgcggtggaatcacgcagccacatggcggggatatcgccggtgatgacgaaggtatctttttcgccgatggttttgacggtggtatccatggtgttggggtagcaatttttaaagagctccgagagcttcgcgtcatttgcgagcttttcttcgcagatgcgcttgacttccaaatcaatggctttcatgggatgattcctttcggtattttataaatgaggtatcggtaagcggaacgtaaacgtttcgcccgccttttcaaaggcggcggggtcttggggcagcgccctaagtcgctttccgcagaaagcgaaatccttttgcctgctccaagatcaggagggtagccgaaacagtccggtggactgtttcggtgtaggggaccctatcaaggggtcccctgaaaaggcgaagccttttagaaaaggtcgatcaaagactttattcgttcgcgattacggaaaatcggtgattaaaggctctgcaaaaactccgctgcgaggtcgaaccacttgccgacgtgcggcaggagctgagcatcgctgttcgaggtgacttcgttgcaaagcgacaggccgtggccgccctccgggaacatgtggaactccgttttgatgccgtttttctgcaaggcgctgacgagcatcagggcgttttcgaccgggacgcagtcatccggctgggtgtgccagacgaacgtgggcggggtatctttcgtgacgaagttttcgagcgactgattcgctttttcgaactcgtactgctcaccgagaaggttcttgatggaatcgtggtgggcgaacgggccggacgtgatgaccggatatgagaggatctggccgttcgggcgcagaagctcggacgggcagttcatagcctccgcaacgaacgggcggctccagaaattgccgtagcttgcagctaaatggccgccggcggaaaaaccgatggtgaaaaccttttcgggatcacagccgtactttacgccttcttcgcggacgtatttcacggcggtggcgacttccagaagggcagtcggaaagcgcgccggggcaacggaatagcgcacgacaacggcgttcatgccgatggcattgaagcgcatggcgatgggctcggcttcacggtcggacgtaaaggcgtacgcgccgcccgggcagacgatgacggtgggacgcttttcgatgggaacctcttttgaaagatccagaaaatacgtatacatggctgcgtaatccgcagagcccggcacgtgcagtttgattttttcatgtatcataaagacaactcctttggccgcaaaattgcaggataaaccatactatctttagtatatcagctgttgacgggcggcgcaaggcgattttgtgaaaatttgggtattatcacgctttttagaataatgttgggtaaaaaagaaagccgctgcccggtttgggtgcggctctcagttaaacgaacttacttcgttttctttgcggttttggtggtttttgcggctgcctttgtggttttggtggcggacttgacttcggctttcacttctgccttgacttccggcttggcttccgctttcacctctgccttagctttctcttttgcagccggctttgcggtttttgcggcgcactttgccggagctttcttttccttttcgacttcggtgagcacccagttctggttatcgcccttcacgaactcccaaagctgtgccggtgcgccgtctgcatcgctgatgtccttgatgtcgacgaccttgccggacgcgacatgcgtgatgcggcggcagcccttgacggtagtggtcagcttccagatctgggaagcgttgccctgtgcctctgcgagaacgagtgcggtgccgttttctgcctcacccggaacggtgagcgcgagaccgctgaccttatggacgagctgcacggacgtgccctctgccgggacggcgcaccagacctgcgtttcgccgccgtttgcggtcatctgcacggcagagccgccgcaggaagcgagaaccttaccgcttctatggtttgtgataacgtatttcttttctgtcttttctgccatgaatgatctctcctttatgaataaacctatgcttttcgcatatcattttctgattttctatgtacgataattaagtataatcataaattcctgcaaagtcaaatcggccgcaagggcttttatctgcgggttttgcaatgagaattttgctgtttacggcagattttgacgggtttttatctctctatcgtgaaaagtgtcaaaaattcggatagatttcaggatagacttgaaaattgaattgactttttccataaaatgttaatttgttttttgcggatattctacaagcaaaaggaaagaattcacaaaatcgtaagagaaatttacgttttatatccttgcattcgggtgatgtatcgtgtattcttatatctagataagaaaaaggagatcgtaacgggatggatagcttagaccgtagacaggggctttcttcggagcaggtagcacagcgcgtgcgcgacgggctttcaaacgccgatgagggcattaagaccaaaaccgaaaagcagatcattttagaaaacacgttcacattttttaacattttgaactttgtactggcgctgttcgttttgctggtgggctcgtttaagaaccttttatttttgggcgttatcttttctaatattattatcggttcgtttcagggcataagagcgaaacggacgattgacaagctctccctcatttccgcaccgaaggcttctgtgctgcgcgacggaaaactgcagacgatacccgtgagcgggattgtgatgaacgatgtgctgcacctttcgaccgggcagcagatctgcgccgacgccatcgttttggatggcgaagcggaggtgaatgaatcgctcatcacgggcgaaagcgatccggtcttgaagcgcgcaggtgacgagctgctttccggcagcttcatcgtttccggcagctgttacgccgaagtggagcacgtaggccgcgaaaactacgcaaaccgcatcgcaaacggcgcgaagtatgtgaagcgcacgaactccgaaattctccattccctcgatttcattgtaaagacgctcggctttacgctggtgccgattggcattttgcttttctgcaagcagttttttttgctgcatgacacgatccgcgaagccgttgtgagcacggtcgccgcgatcctcggcatgatcccggaggggctcattttgctgacaagcgtggtgtttgccgtaagcgtactgcggctttcacgctacaagacgttggtgcaggacctgtactgcaccgaatcgctggcacgcgtagatgtgctatgcttagacaaaacaggtacgatcaccgaaggcacgatgcaggtggacgagctgcacccgctgacgggctacaccgaagaggacatgacggctccgctgaaggcgcttgtgcaggttttgacggacgacaacccgacgtacaacgcggtgaaagcatactttcccggcggatcggactggaaagctgcggcgacggtgccgttctcctctgcgagaaagtggagcggcgcgtatttcggcgagcgcggcacgtatgtgatgggcgcgggcgaattcattttgggcgaacgcttcggtgcgctgcgtgaacacacggaggaatatgcggcgcgcggcgaacgcgttttgctgctggcccactccgcaaagcctttccttgaaaacaaggtgctgccggacgacattgagccggtgggcttcattttaatcagtgataagatccgcacggaagcaccgcaaacgctgcgctattttgcagagcagggcgtgacgctgaaggtcatctccggcgacaacgccgtgacggtctctaacattgcacagaaggccggtctgccccacgcggaaaactactgcgatgcgacgacgctgcacaccgacgaggagattgcgggggcaattgagcaatacagtgtgtttggccgcgtgacgccgcagcagaaactgaaatttgtgcaggcgttaaaagaccacggccacacggtggcgatgacgggcgacggtgtgaacgacgttctggcgctgaaagaggccgattgcagcattgcgatggcttccggcagcgacgcggcgcgcacggtctcgaacctcgttttgctcgactccaactttgcttccatgccgcaggtggtgaaggaaggcaggcgctccatcaacaatttgcaacgctctgcatcgctgtttttacagaagacgatctattcgacggtgctgggtgtgctgttcatttttctttctgcttcctacccgtttgagccgattcagctgacgtttatcagttcgattacgatcggtattccgtcgtttatactggcgctggagccgaacaacgagcgtataagcggcagctttttagcgaatgttttgaagaaatcgttcccctctgccctgacgatgattcttggcgttttgtttttgacgctgtttaaggggccgctgaatttgacgaacccgcaggtctcgacactttcggtcattgtggcgtttgccgttgggtttatgctgatgttcaagctttgcctgccgttcaacgcgctgcgcggggcgctgttcggcacgatggtggcggcgttctttgtgggatatatcggctgcatggacctggtttccatggtgccgctgaccgccccgatgctgtttattttgatcccgctgctcattgtgtcgatcgtctttatggtgcagacaaaccattttatggagcattttacagagcaccacacgcggcgtttgctgcaaagcaggttcttccagaatcaccgcagaaagcggcgtgaggcggcgcacaaagaccgccacgccgcccgcagaatgcgccgccgcacagagcagccaagcaggatgcgagacggtaaaagagtttaatttagtcgagatcatatgaaaataccccggcaggcggtttggatggcttgccggggtgttcttatgcgcttgttaattttacaggatgcagtattttgccatgtagtcttccatggcggggaggatattgttgtatttttcagactgctttaagtactcgtggatgtccgcgacggtgacgatagcgtggaccttgatgccgaactcctcgttgacctccatgatggcggttttgccgggaaccttgcctacctcgcagcgattgacggagatgaacatatcgttgactttcacattgccgcagccgtagaggatcggcatggtctcgcgcacggcggtgccggcagtgataacgtcttcgatgataataattttatcgccgtccttcggcttgtaaccgacgaggctgccgccttcgccgtggtctttctcttccttgcggttgaagaagtagggcttcgagatgccatactcgttatagagggacgcggcggcggctgtggcaagcggaatacccttgtacgccgggccgaacatggcggagaaatcttcgccgacggtctccttgatgagcgatgcgtagaacttgccgagctttgcgatctgctcgccggtcttatagttgccggtattgacgaagtacggcgtattgcggccgctcttcgtgacgaaggagccgaaacgcagcacgtctgcggacatcatgaactcgataaacgcctttttgctttctgtcagcataaaaaccatcctttatttccgtcatgggtcggaatttatttttaccagtatagcatagatttatgttttcgtcaaaattttttatgcgaacttacgctgccggagaaaggccgttttccgccgaccacgtatagacggaatacgtattgccgtccgttgtaacggcgacggtgccgtctgtatcggtgcgcaggatcttgcagttgcgttcagaaaggctttcgagcgtttcgtggtgcgggtgaccgtatttattatcctgcccgcaggatatgacggcgacggcggggttcacggcgcggagaaaatccatggaggacgatgtggacgagccgtggtgaccgcactttaaaacgtttgaagtgacgtccgtttcgcgtgctaagatattctcttcaacctcggttccggcatcgccggtgagcataaaggagatattgccgtaggtgaagcgcagaacagcggaatagttgttgaggttatcgaatatctcgtccttttccggggataggacggcaaaattggcgttttcgggcgcggggatttttgtatcggtggagatctgctcggtttggacgtttttgtcgagcagggcatcgagcatattttcgtatgtagcggtggtgggcgtttggtcgtcgggcaaaaggggcatgtagaacgtgccgatggtgtaatcctcgataatctgcttcatggagccgatgtggtctgcgtgcgggtgcgtggcgacaacggcatcgaacgatgtgacgccgagcgcctgaaggtcgctttcgatagtctctcccgcttcgcgggtgccggcatcaatgagcatgttgtaatcggtaccgatttgaattaaaatactatccccctgcccgacatctaaaaagtagacggcgcagtcggcggcgtcggtgctttgagtgggctgtgcaggggcgcttgagtctgtgttcggtgcaccggtgaggtacgtttcaagctccgggaaataatagacaagcaccgccgcgagcacaaggacggcgctgatgacggcggaaagcgtttttttgttccgaggttggcggcgacggcctgcaccggttcttttctgtggcatgggtctctcctttttgtttacataattttattttgcgtgatacaaaaaagctgccgcagtttttacttgcagcagcttactttgcaaatcctactctttactttccttgtgtttcgtccttgtaaagattaaagcggaacagcttggattcatccgcttcgttatcgcagaccacaaaagcttctgcgatctttccgccttcaatcagagacgtaagaccgatgagctgacacagcttgcttttcaggttcagcttatcaccgtcgcgcgtcatcagatacacattgccctcgcagctatccagtacagacaggaagcccggaacatcgatgtcgtgaagttcgatcatcttggacatcagtcatctctccttcgatatgagatttagtctcattatggtttgccgatagggttctatgtggaaaaccataatatcctatgatggctttattctatcacaacagcagaaaatacacaagggctaaacggaaaaaaggtgtgttacattcaggttaaattttcagtgaatttgttaaacattgagaaagtttatgaatctttccaatcattcgccggaggcaccgtagttcgcgagcacgcgggcgctgggatcgttgacgtcgcagccctcccacgctttgttcggcatccagaagtccttgaccatttccgcctgaccgggatagtatttttcaaaaatttcacggtagagaagggattctttcgtaaacggcgttgcgaacggatattttgcggcgcggagcttcatttcgtcatcggtatactttgtttcggcgtaggccttgaggtaatcgaccatagagtgaccgacggcatcggagaacgcggctttttcgcggtataaaattggcagcggaaggtaatcgccctcgaacgcgtggcgcaggaggtatttgccttttttgtacttgttgagcttcatctcgggatcgacggacatgacgtatttgacgaaatcgagatcgccgaacgggacgcgggcttcgagcgagttggcggagatgcagcggtcggcacggagcacgtcgtacatatgaagctcccgcacgcgcttttgggcttccgtttggaacgcagcggcgctgggggcgaaatctgtatatttgtagccgaagagctcatcggaaatttcaccggtgagcagcacgcggacatcggtctgctcgtgaatgactttgcagacgaggtacatgcccatgctggcgcggatggtggtgatgtcatacgtgccaagcagcgcaatgacggtttcgagattttcgataacatcgtcctttgtgatgatgacctcggtgtggtcgctgtgaatgtaatcggcaacttcgcgggcgtattttaaatcgatagcatcttcactcatgccgatggcgaacgtgcgaatgggcttctttaaaagctttgccgcgacggagcagacgagggagctatcaagcccaccgctgagaagaaaaccgagcggagcatcggcatcgagcctcttttcgatgccggcaacgagcttatcatggatgtttttacagacagtctcgaggtcatcgtggcaaacttcttcgacttcggcaatgtcgcagtagcaggtaaatttgccgtccttatagtagtggcccggcgggaacggcataacgcgatggcacaggccgacgaggtttttcggctcgctggcaaacataatgtggccgctttcgctgtacccgtagtagagcgggcggatgccgatggggtcgcgcgcagcgatgaagctatcggtctcggcatcgtaaataatcagggcgaactcggcgtcgagcttcttgaacatctcggtgccctcttctttgtagagagggagtaaaatttcgcaatcggaatcacttttgaaggtgtagccttttctccggagctcctctttaacggaacggaagccatagagttcgccgttgcagacgacggcggaaccgtccagctcaaacggctgcatgccttcttctgtgaggcccatgatggcgaggcggtggaaaaagagccaacctgcgggcgtttccagtgtgcgggacatatccggcccgcgggaaacggttttatcaaagccctttcgtaaatcttccaaacgaatgtcttttgctgtgtaacccataatcgaacacatatcggttccctccaaataaaataatttcagtccaaacgcaaataaaaaaacagccgtttgtcccaattttttaggacgaatagctgttgtatccgcggtgccacctaaattatcttataaagaagatcacctttactgtctctaacaagacaggcacggcttaacgcgccgccacacgtcgcacctactgagatatgcgcatcttttcggcttgaggctccgaagtgttattcgccggtgtgcttacgcggggttcacactctcccccgctcactgtgcaaagcggtctgccgggtacttctcttcatctgtgcccttgaattattatgctaagtttataccaccgaaatttcattttgtcaacacttttttgaaaaaatttttgattttacacgaaatttgcaatttttcagtttacaacttgcagtttgtaagcggtttttagccaaactaaaacgtatttgtcaaaaatcaaaaagctcttttcattttacgggagttgtattataataagcttggataaaatgcaaaatgaaacaggaggtcttttccatgtttgcctataaaactttgaaaagcggcactgacattcgcggtgttgcaagtgaaggcggcggcgcgccgattaacctgaccgatgaggtcgtggagcgcattgcggccggttttctcgtttggtgcgaaaagcacctggacaagtgcgccgagggactgaaaattgccgtcggccatgactcccgtatttccgcagaccgcattgcggcggcgctgttccgcgcgtttacgacatacggtgcttcggtttacgactgcggccttgcctctaccccgtcaatgttcatggcggttttggagctgccgtgcgactgctcggtgcagattacggcgagccaccacccgttcttccgcaacggactgaagttcttcacgcctgcgggcggccttgacagcccggatatttccgagattttggaatatgcacagaacggcgctgcgccgaaggagaccgacaacggcacgctggtgccggtggactatatgtcaaaatatgcagataatctgcgcgagatgatccgcaagggcgtgaacgcggaagattatgcgcacccacttgcgggctttaagatcgttgtggacgccggcaacggcgcgggcggtttttacgcgaacgacgtgctgaagccgcttggtgcggacattacgggcagccagtttttggagccggacggccgcttcccgaaccacattccaaacccggagaacgaggaggccatggcgagcgtctgcgcggcgaccgtgaaggccggtgcggaccttggcgtaatttttgacacggacgtagaccgcggcggcgctgtggacagccgcggcgaagagatcaaccgcaaccgtcttgtggcgattgcttccgccattgcgctggagggcaacccgggcggcaccattgtgacggactccattacgtccgatggactcaagacctacattgagcagacgctcggcggcaagcatcaccgctttaagcgcggctacaagaatgtcatcaacgaggcggtgcgcctgaataatgagggtgtgaactgcccgctggcgattgagacaagcggccatgcggcgctgcgcgagaactacttccttgacgacggtgcctatctggtgacgaagatcatcattaaggcggcacagctgcgccgcgagggtaaatcactggatagcttgattgctgatttgaaggaagcaaaagaggaaaaggagctgcgcttccccattacggcggaggatttccgcccctatggcgagggcaccattgcggcgcttga

SEQ ID NO: 1740 - DNA, 10004 bp, Unknown
  gut microbiota DNA sequence
caaaagcacacaactgggacattgcgccggataaccgtgagggcattcgtatttcgttcccggaaaacgacggcgacggctggtttctgctgcgcatgagcgtacacgacccgattctaccgctgaatatcgaaagcaattccgtcggcggcgtacgcgtgctggccgaaaagctgctgaagttcttcgacgaagtgaagccggagaatgtggactatgcggcgttaagagaatttttggagaagtaagctgaaattaaatatttaaataaaaggaactcccgactgctgcggttcatcatttgcggcggtcgggagttttcgtcaaaactcgatgatatggagtttttgggcaacttctttggcttcgccgcggcgtttgacgccgagcttttggaggatgtggatgacatgcgttttgacggtggcgaccttgacaccgaggatgtcggcgatctcctggttgctgcggttgccgcacaggagccggagcacctgcgtttctgcaggcgaaagcggttctgaaagccgcggcatgggacgcaagaaattcgggtacaaaacagcctgacggcgcgtttcctgtaaaaggagtgaaaagaaggactcgtcctttttgtagccggtaaacgtcagcatgggcattacggcggcgccaaactgcgcaataggcataacgaagcggtactcatgggcggcatcaagcgcctgcatccactcctcctgccaccgggcgttattttgccgctgatagcaaacggccgttaggatgcggatatatatgcggtccatcacgcggccgcagcgctcacagaacgggatgagtgaggccaatgtgagcagcgcggtattttcttccccgagcgcgatctcaaccatggcacgcgttatatactggtagcgccacatggtacggatgcgcggcgtgatctgaggggcagatgtacggtaccactgctctgccttttccatttcaccggtacgcagccatatacggcagcgcatggcatcaatattcggcaggaaacgcttgttgtcctcctcaaactctgttcgcagactgtctaaagaggaaagcgccatgatggcgttgccttgcttcgtttggacgcgcgccatgagaccgatgatggcgaacgtcatatccggcgtaccgtgacgctcgatctcgggcaactgggctacaagcgtcatgagccacggaaggttgtcctcccctttttcaaatttgctttcgcaaagggcgcaatcggcaaaaccgatgccgtctttgccgagaatggcctccatcggcttgcggatggttttgtagagcagttcatcgtgcttggaccacgaacagaaatctttgccgccgttcataagacttggcagcatgctggtgacagaaaacgtgggtgtttgcaagcttttatccgttagaattttgaaatagttgccgatgttctctgcgatgcctttgctgctgcgctgcgggagggagatatcgagatatgcaagcttgccgcgcacctctttgtaggcggtgtcggtctttttgagcggggctgcatactcctgcagggcggaataccacatttcggaggcttcgtaatccatgcagagggacgtgagcatgctcataccgcacatgagcgatggcgagcggagaatctcctctttcgggatagcatagtaatacttttccatctcatagtaatgtcccacaccggggtgctgctctgcgttgcggatgagcatttccgagacacggcagtggtccttgcagcgcgaatagcactcgagcgcatgctcgtaatcttcgtgcagctcatagtaaagcccggcgcggctgtacactgcggcctgctcctgcggcgtatagacttggcggagttcccacatgaggaactgttggaaaaagctccagaagcggtatttctgtgcatcggcatttaaaagcatggtggtatcgtgtcgaacgatggaaataagctcgttgatgtggctgtcgccggaaatcatctgggcaagctcggcgtcgaatgtatcgaacggggcgatgtcgagcagcatacggcgcagcggcattgaaaagcggttgaagatgttatcctcaaaatagtgatagatttcctgctgcacgatgccgacaatctccggcgtatagggctgaccgttttgcatcaggcgcgaaagcgccgttagggccagcgggtagccgagagaatcgtggatgatgacgttgatctctgcttccgttggtgtgcagccattcttttccagaaaaacacgcacggtatcgcggtcaaacagcaaatctctggccttgatgagctgcaaaagccccgtaaagcggaacggcatgagccagccgggcagcacgccgcggcttaaaatgacgaaatgcagctccggattttcgcggatccatgcgcagagcgtttgctggtcttccgggtctttgagcgcgggcagggaatcgatcacaatcgcatctacatttttcggcacgggctcgcgcaggaattccgggtcttctgccgaaaatacgcaggttttgtgattgctgagcaaggcggtggcggctgtagacttgccgaagccgcacggcgcgctgaagaaaatgacgcggcactgagcccaaccctgtaagaattgctcgcgcagcgatggcttgatgacgacttcattcatgtgctctactccccttttatggtttatagtcacaatatatcatatttcgcgcgaaatgtaatccatctaaagatggatttttgaaaaaatttggttttgtcgaggagaaaaggtggaaaggcagtacgattttgcggaaatgaaaaaagcctctcggacaccggcacgtgcatgcggtgttcgaggggcaattttgttgtattttgtacaactgtattttatacagcttttatgcggctttttcctgaagcttctgcttttttctctgcgtcttcgacgagacggctcttggagaggtcagcgtggcgataatagagcagtgtgagggtgctgcacacgagccaaccggcagggtagcctaaggcgatgggaatgatggtgttggagatgaagttcgccatgataaagaggtaaatctggcggaagacgacgaacgagctcaacatgataatcatcggtgcgcgggaattgcctgcaccgcgcagcacgccggagtagacctggttgacgcagcagaacacgtagaacggcgagcaataacgcagcagcatggaaccgtatacgacaacctctgctttgccgttgaagaacgagacgagctgcggcgcgaagatgagcaacgggattgtcagaatgacggttgcgacgacggacatgatgaacgccgtgcgcgcgcccttcttggcgcgggcgacctgatcgatgccgaggttctggccgacgaatgtggtagacgcgagcgcgagagactgcatcggcaggaagagaagctggtcaatcttactgtatgccgtccagccggacatacagtctgcgccgaagtagttaacataagactgcacaaatacgttcgagaacgcggtgatcgccatttggatggcggccgggatgccgacgcgcacaatcttcgcgagcatttctttatcgagcttcaagtatttgagctcgaccttgatgcaggaatccgtgcggaacagcgtaatcatcgtaagcatggcggagacgccctgcgagatgatggtcgcatacgcaacacccttaacgcccatgccgagcgacagcacgaagacgagatcgagaatgatgttgagcacagcggagacgacgagaaaatagaacgggcgcttggaatcacccacggcacgcagaatgcccgcgcccatgttgtagagcataaggccgatgacgcccgcaaagtagatggtgaggtacgcggaggactccggcatgacctcggccggggtcttcatgaaattgagcacgaagggaatcatagcgatgccgatgatcgtaaagagcacagccaaaatgagcgtcatgacgatggaggtgtggacggtatcgcgcaccttatcataccgctttgcgccataatactgtgaaatgacgacgccggcgccgctggaaagccctaagaatatgccgatgagcatgttgataacgggaccgaccgtgccgaccgccgagaaagcttcgttgctgacatagttgccgacgacccacgtatcgaccgtgttgtagagctgctggaaaatgttgccgatgagaagcggaaacgcgaatgtgatgaggtggcggaagatgctgccctgcgtcatatccacatcgcgcttagttttctgcttcaggatgctgaatttagacataataatatcacctgcaactaattatacacgctctgtttgagataatcaactaaaatcttaaaaatgtggaatatcttttactttgatacgcacaataaacccggttaaacggaaagggtggtcgtatgaaaaagaaaacaccgcagcaatatgacgcgatggtgcagaaggcttcaccgcactcccccgtactgaaaaactgcctgtttgcgtttttatccggcggggccatctgcacgctggggcaggcgcttgcgaacacgttcatgctgctggggctcgatttaaaagacgcgcggacgtgcgtttcaatctcgctcattttcatttccgccgcgctgacagcctgcggcgtatacgacaacatagcgaaatacgccggggcaggcacgctggttccaattatggggtttgcgaactcgatggtctcccctgcgctggaatttaaaagcgagggctttgtgacgggccttggcgcgaagctgttcacggtggcgggaccggtgctggtgttcggcatttcggcttcggttttgtacgggatcgtgctgtatatcatcgggctgttttaaggagggcttatgaaaagactcggacgttacacgcttttatttgagcgccgcccggcgattttgggccacgcggcggtgtgcggaaaaaaagaagccgcgggcccgctggcgcgcgactttgaccaaacgtttctcgattcttatttgaatcaggaaagctgggaaaaagcggaaagcatgctgcaaacggaagccgcgaaccttgcgatacgtaaggcagggcttcaaaagcaggacattaacatggtattcgcgggagatctgctgaaccagtgtatttcgagcacgtttggtctgcgcggaatggacattccgttccttgggcaatacggggcgtgctccacgatggcgcaaacgctcatcatggcctccatcatggtggaatgcagcgcggcgaactacgcctgcgcagtgacctcttcccacttctgcaccgcggagcggcaattccgcacgccgctggaatacggcagccagcgcgcgccgactgcgcagtggacggcgacagcttctggcagcgcggtgctcggtatgagcggcgacattcaagtgcggcacgcgactgtgggacgcatcaccgaccttggtgtgaccgacatgacgaacatgggcgcggcgatggcccccgctgcggcgcagactttgctggatttttttaacgatacggcgacaaagcctgaggactacgaccgcatttacacaggtgacctcggggcggttggcacaaaattattatacgaactgctgcgcgaaaacgggatcgttctgcgcaatcacgaggactgcgggctgattctatttgaccgcgaggcacaggacgtgcacgcgggcggctccggctgcggatgctcagccggtgtattatgcgggcatattttgaaccgcatggatcgcggagagctgaaaaatattctctttatggcaaccggcgcgctgatgtccacaacctcttcgcagcagggcgagagcataccgggcatcgcgcatttggtgcatgtggggaggggataaaaaaaccgacacaatctgtaccgagcttttacggcggatgatgcaattaagctacgtcatccgccttattttttcttttaagttttgaaagtaacccgaacacaatctcttttacgagcggttctttgagcaacagtaagacgatgccgtagaggccaaagaacaataccgctgcaagcaacagcaaccagaatgtgccgatttgcagatgactgacccaaactgcgctgagcacagccggaatgagtgctgcaaaaattttaaaataacgtatatccagaaaagcaccgcgcacttctgaacgcaacgcaatatactgcaccacgagcaccgcaaactcggcggcaagcgtacctatggccgcaccggccgcgccgtacagcggaattaaaatcgcatttaatattagatcggtaacagcaccgacgatttcggaaacgagcactgttttttcacgcccaagcggcacaagaatttgaatgcccaacacatttgtgatgccgatgaacaatagcgtcggcataatgatctgcataggcagggttgccgattcatacagtgtgccgccggtcaggaaacgaatgctctgctcggcaaatagcatgaaaaagatcatcagcggcagtgccaccagcatgacaaagttcagagcctttgcactgatacgcctgaattcgcccttcatctccatctcaacgtaatacgaggcgcgcggcaacagaaccgtgccaagcgatgtaactaagctgactaaaatgaccttcacctttacagctgcatcgtagtatccgacttgttcttttgtcgtcataatccccagcatgacgttgtcgagattcgtatagattgtcgtggcacaggacatggcgaaaaaaatcagcaccggctttaagtgacggtgtatgctgtaatatccgactgggtgaaaatcgatgtactttcgcgcatgaaacaaattgataatatttgcagcactggatgcaaatacggtgatgcctccataaactacataatcgcttttttggtggatcaaaagaaacatgccgaccatggcgatgatcttgaagacaatcgaccgcaccgcaatataaatgtactgctccaaagctttatagagccactccataccaatggcagaaagcagaatcatagagctgaccacgatatacagtgctctgtcctcccgcagccgcggcacaaaaatgatggccagtgccagcgcaacatatgataacgccccgactacaaggttaatggcgagcagttcgtgtgccgttcgcgtcagctgctcccggtcatctcgcaccatagcgcagatgcgtatgccgtaaattgggatgccgagctgtgcaaacaagttgaaataggtgattaacgagatggcaaacgaaaccttgcctgttccatccggcaacagaatattggaaacatagcggaaggtgatgagcggaaaaatgatggacgacattgtgagaatggcattcatcacaaaatttaatttcagggatttccctttcataagcagaacctttatcctttcggtctaaaccgcacggtaagctccgcaattcttaccgtatatatctttatggaaacaaatatttgccgacatacgggatcttctgcaatacctttacaagcagcagagcgacaaaataaaccgcaaacgcaccaaatagccgccaccatccgcttaatgtatcgaccgaaaaccacgatgtaattcgatcgataaccagcacgtgtatcaagtagattccaaaacttgcccctgaaagccatttgatgagacggataaatttctcgtttcgaaaaatcggataatcgcaagcatactttatgaatacaaaaatggcagcagccagaagaatcgtcggccaatttgtgtattcccaagtcagtttatttatagcaccctcgcgcacggagaaaattaccgtgtgaaaataccgagccgccgcgcctaagattcccagcacataaattgcactgcgttgtaaccgggaaagctccgttgtatggagaagatagccaagtaccgcaaagagtaaatacccccccatcatgggaaaagcaaagctgccccaatatgtaagtcccagtgccgtacaaacaaacggaaatacggaacaggacgcaaaagccagaactgtcatataccaaaggattttcctattttgtaccaacaatgacaaaaccggcaaggaaagatacaccataaaaagcggcggaaagaaccaatacaccggtacgatggagaaattaatcacactatttgaaaatgcacgccatcctgtccacgcgatcgtcccccgtgtacgatagaaaacataaaagaacacagtccaaatcacaagcggaacaccagttttcagaaagcgccgttttaaaaatacctttgtggaatatcgtctgcggtaattcatcaacgtggcaccggaaagcataacaaataccggtactgcccaatacgccaaaacatctacaaacagactttgccgccagacggaagaatcagaaaacgcatgaactgcgccgttgcaatgcatgcctacaacgcaaagacatgccaaaacatttaacacatcaaaataaacaattcgctttcgttctactgttttttccatgttgtcctcttaaccgttcgcaccgacttctcgctttttcatggaagcgagtaccgggaaaagcaggaaatttgtagatgtcagcattttaaagctcttagcgccattgagttcgctataaagcgtttcgcttttacctttaattgttttcaccatagctttcgcggactgctttgccgctttgctgtctgtggctgtcagataaatgaaaagctgcataccggcaattcgggcgatatttctgcgcaggaatgcggcaatgttcggttctgacgtaccgctgttttcatacgccgcatatgcatcggaaaggtgaccgagtaccaactcgtgcatcgcacagtttcgctgtaagctgttgatattcatgctctgtgtggaaagcgaaacacgatacatatagattgtttgcggtgcaacggtgactgttttcacatacgggatggggtacaaaaggtactctgcatctgtatagaaacagttatcaagatgaatgttatttttttgcagaatatccgtgcgataggtcacattgtgcatcgccacggtgagttgatcgcaaacagaagaaaacggcacatccatacacggagcaacgttcgttttctcttcttttttttgccctgtttcatggtctacacagcaatgatccgcacagaccatatcggcatttgtcttttccagtatatccagaaaagcgcccatctgcgctgtgtttacccagtcatcaccgtctaccatacgaaaatattttccggtagcgtgcttgatgccgctatttacagtggaaccgggtcctgcatttttttgtgagatcaaacggaatgttccgggatattttttttcatatgcggaaacgatttccggcgtgcggtctttggagccgtcatcggtcacgaggatctccacacgatctaaaattgcaggatcggtaaaggaatcaagacactgttcgataaatttttctacgttatacgctgcgactgagacgcttagcactttttgcataatgttccccctcttccttttttacagtctgcatcaatgcgcccaaggccatccagaacataaaggacatcggcgagcagacatacaaaatttcagacatgaaacagcttgcacacaccatggctgccaaaacggctaaatacgccggtgcgattccttgcagctgcatagaaatctgtttccaatttttaaatacggcaatgatacaccacacagccaacgcaagatacaaaagcaagccaaccgcgccctgtgcgactaaaatatcaaagaaggcgttgtgcatactggaaaagtgcatgtggtcgttattgattaaataggagtcttcctgttcggcttcaacgtaagccaaaactgtgttatgccccacaccgaaaaccggtttttctttaaatatctcgattgcgcttttccaaatatctatacggcgatttgatatatctgccgcgttcgtttctttgg

SEQ ID NO: 1741 - DNA, 192655 bp, Unknown
  gut microbiota DNA sequence
cgtggttgcccagccgaggaatttgtagcctgtgggttcggtgaagccgacatagtcacgcgatcttacggttgcgttcgtattcttcgggtaacctctgtcttcaaaggtccgcgtgctgtccccgaaattataatgatacgtaatcgtctcggtttggggcttattggtgtagactgccgtcaacgtggtgttctttgtgacggtaatcttatcgcccgggtggatgagcgtgccgtcttccgtttcccaagcgcggaagttttcggaattttccggcggaagtacgcgggcggagctgccgcttacatacttctggttatccgtttttacattcgtaccctcaacgtatgtgaccgtgaagccatcctttgcggaggggaagaacggggaaatcgtaacggagccgtaaagctcggtatctacattgaacagcgcgccgttggaatcgatccaagcggagggcttttccgtgagcttttcaagcagtgccttaaactcttcggaatccgaaagctttgtgccgtacggaatttcaatcgtttcaaactctccgtccgcagaggccgtcaggtaaaccgtagctttaataaccggcgcctgccactttgcgtagagcgtaatgccctttgccggcatcgtcttgccggtgaacacgaacgggtcgccttcgcaaagctcattatcataccagcctgcaaacgtgaagtttgcggatacaccggccggtcttgtcggggtgtatgtcacatcggaaatatcctgctgatacttgcggctttcggttttttctgtcttgccgccgttaatgaacgtgatgccataagagtcacgggtgtagtagaactttgcgccatcgtaataatcaccaacactcgcacttatcttttcattaaaagtaaagcctgtaattgcatattggtcttcttttgtaacgcgcaaccatccataataatctgtagtatctttgtgatccaatttataacttgtaccgtcaacatttgccgtaccagtttcacccggaaccacttctacataatagttacctgtctgcgtccatgcatcatcagaaggtctgtactgatagaatgttgctccaccgagcggcataacatcaatgcctgcctgcattttagaagaataaatatcctgagaaacgtaccaagtgctctgcggctgtttaggccactgtgcggaaatattcgcgccccatttagcggtaatggtcttatctgttaactcgccgtacttgcagttatcattgtgcttatgttcttctttaccacattcccatccgccataataactccaaccacaagttctcctgttatgcgtgtgttcttctttgccacaaacatagctgtcaccatatcccataaactttacgctgtaaacatttctcttataataaacgtttacgattgtggagccgtcaccggcaatggtcttctgcgtaatcgcctgtgcggtaaagccctcatagtttttagcttgagcgtttgtctgtgcgccggtcgtaccggtttgcgtatcgtctttcaccagcgtatagccattatcatccgcattttcctgccaatggataacggtgtattccgttttggaattggctttccagtgtgcggtgacggtagccgttccggaaacctttgtaaccgagttgccttctgcgtcataccaaccgtcgaacgtgtaaccgctgcgggtgggtgtgaccgtgctcaggtcaagcggctctcccatctggaaccgcggtgccatgtagtcgccgccggcggtatcaaatgtgacccagaaaccggttttaactaccgggtaaacgtatgtaacgccggctgcaaatgtgatggtttcgggggtatcgctgccctgcgtggtgctccagccgacaacgcctttatctttgctcatggtgagctcaaccttggcggtcgcggcgttcagaacatcttcgccgaccgtttcaccggctgtgcccgcggcggtgtggtaaaccacggtatcgccgtcttcatccaagaagtacacgtagctgaactcctcaaacttcgccgtaacggtcacttccgtgccgctgacagacttgacttcgccgaagcttaacggggtctcaccgacataccacccgacaaagcgtgcgttttcctttgttggagcggtcggctcgaggagctcttcgcctgcggcgacggtctgctgccactcggtcagctccgtatcgccgttataaaagcgataggtatcgaccgtgggcttctcgtcgtccggacgcagcatagtcattgcaatgcccgtttccgcgctctgctttgccggtgcagcttcctctgtacctgcgtcgggggtcgcctgtgctttcacttcaacgggaaccggggtctctgccggggcgggagtaggtgtctcctccggagcgggagtgggtgtctcctccggagttgcggtctcctcgggcgcgggcgtctcttcaacgaccggcgctcccccctgcataacatcccctgttgcagtgtaggtgtttgtttcctcatcactcattgcaaacgcgcccgtaggacatgccgaaaccagcatacatgcgctcagcaacacggcgatgatcttctttttcatagtgttttcctccaatcctgtgatttgtccgttttataacaaatatggattcctaaattgatgtgtgttactgtgccaaaaccgtttccatttggatgagcagctccagcacactgcggaacgcggcctctttgccgccttttgtccaccgcagtctcccctgccagctgtaattctggcggaacaggatgtccagttcaaacgtgggtgtttccgtacattttatgggagaagcttttggcgcgccgcctgtatccagctgctcttccaaaagcaggatcaggcgtgaaagacttcggaatagggtttcctccgggagcgtcccgccggagaccctgccgcggatgacaccgtcctccgcttcatccacaaagatacggaaggtctctgtgccgatcggtagcatacgattttctttcacctaacccctcccttttgtattttgtgattctattttacacaaaggtgctatgagaacgctatgattaagaagttttttcatagaaaaacgacctattttctcataaaaaaagaaaataggtcgtagtttttttgttaattatgttgtgtcaaccaacttatcctttcgggtgacggttttaggcctttcggcgctccgttttctccgttgctttttcttctgcgctcatatgtatgtggcgcaggtcgagcgatttaaaggtgtaggccgcaccgcttttcgggtattccttttggaaccgattgaacacacggcgggaaacgagcccgccgttttcgccggtcgcacctggcagcagcacccaaaactggtttgcgcccacctttgtgaacgggtcgcccgcgcgcagtgtatttaaaagcgtcacttccatctgcttcatatatacggcgcgcttttccgggtctaccgagcggtttgcaagccgcacaatcatcaacgccgcaggggtatcgtttcggcgcatctcgcgcacatgcaggtttacaatctcgcggaaaacgttgttatcgcagcaaaacgcaccggtttcctgttctttttcaagcaggaacgtttgaatatcgtcttcactcgtctcgctgccgtaaagctcctgcaccgcaagcgccttctgcgcctccagctccgccgaaggcgaaacaccgtagacctcccggtacagcgaagcgatgtaatcatagtgttccagcgcttttttcgggtttttgttttggatgagcgcctgcatcaaaaacacgctgaattcctctgcggcgggatctaaacggataacgcccgtgcagagcttttccgcatccgtaatgcgtccgagcttcaaaaggcgatccaccgccgcgcgacataggcgcgtataaagcgagcggtaatacgtgttgagattgatgcaccagaactccgctgcgctttccgtaagaaaatcgccggtgtaaagtgccacggctttctgcgccagggcaaccgatttttccatatcttcttcggcaagcgctgcctttgcaagtgtttcaaattgctccacgtcaagctgcgtctcgcggtccggcgcccagcgataatagcccttttcgttatggattataacctttgcgtgcgtaaagccgagctctgccagcgcagcccttgcgcggctgacattattttgcaacgtgcttaacgggttatcgttttcggcttccggccacagcaggtcgatgagctcctgtgcggaaacgccgcggtctctgtgcagaataaggtacgccgtaagcgtccacagtcttctggaacgtcccgtgaggctcacagcatgcggaacctccataccttcctgctttaaggtaaacttgccgaacatggtcacatcgatcttcggcacaacctgtatcgtttcaccgttctgtgcttcacacggcagcccggtggtttcaatttctttcgctgttcgactcatgaacggttcatctccctctttcagaaataacggttcaaaatatcaccccggctattgcgaaaaaaataatattccgaacttgttcttttcataaagtatagcacgttttacggtatttgtaatccaccgaaaggtggaaaatgcgatttttctcataagtatttacttttttgtcagagaaaataccttttttggcgaaaggtcacgctaaaaactatgacttaaagtaattgcagacgtttttgcattgtctcatagttcgtgcagtagtaaagcgccgtctcctctgtgatgcgcttttgccgtacaaggtccgcaagcgccatgtccatggtgcgcataccctgcgccgcgccggaagcgatggcggcatcgagctgatgcgttttgctttcgcggatcatattgcgtatcgcgagtgtggaatacatgatttcaaacaccgggatgggtgtgccgtctacgccgggcacgagctgctgactgatgaccgcctgcaagaccatggaaagctgtaagcggatctgcgcctgctggttcggcggaaatgcgtcgatgatgcggtcaatcgtattcgccgcgccggtggtgtgtagactggaaagcaatagctgccccgtttcggcagcagtcatcgcgacctccattgtctctttgtcgcgcatttcgccgagcaaaatcacgtccgggctttcgcgcagtgcactgcgcaaagcggcgacgtagctcgggcagtcgcagccgatctcacgttggctcacaatgcacttatcgtggcgatggatgtactctaccggatcctcgagcgtcagaatatgtcccgtgcgcgtacggttgatctcgttgatgatacacgcgagcgttgtggacttaccgctgcccgctgagcccgtaacgagcacgatgccttttttcatctgtgccgcgcgcatgacctccggcggaatgtgcgcttcttcggccgtaggcagaccgaagcggatgacgcgcaccacggcggcaatgctgccgcgctggcggaacagattcacacggaagcgtcccgtaccgctgagcgagaacgaaaaatcgtcatcggtcgcaccgccgtttaagcagtgcggctcacgcgcggcaagacgatagatttccgctgcgaatgcttcggtcttttcgggcgtgaaggcgccgtccgccgtttcacgctgctgttcgccgcgcaccttatacgtcagcggcagacccgccaccacgaaaatatcggaagcgccgcgctccacggcacttttcaaaatttcagtcatattcattgtactccgcctttcttacccgaggttcagggagtcatccggctgccagcgcgctgtgcagcgccattttgcaatctcatagctgccgtttatcttatttaagcagatctcaagctgcatgttgccgcgcgtgatttccgttttgagcgtggttttagtctcttccgtgttttccggcagatctcccgcgccctttaaatacgcatctgcttcggaaagccagtcttgcccggcgttttcgcaggcatacagtacttccacgtgctcgccgtagcgctctgcggcacggcgatcggatacggcagaggacaccgtaagcacgccgaaaatggcgacgcacagcacaacgaccgcgaacagcaccgcgatgctgccgatgcggaatcgatttcggctcatggcgttccctccttcggctggtagcaccgtacattcagcgcataaatttctttatcctgctccgccgtatacgccgtgattttcccggcatacaacgctcccgtttcggtctcggcggcggtcacttcggtttctatataataataagcgtccgcttccgcacagcttgccatatcttttgtgaaatatgctatttcgccgttttcggggatctctcccgcgcgaaactcctctgcggcgctgcggcacagcgcaatgcctgcgctttccctcgccgcttcatcgctgatgacggccgcgcgcaggaacacgcacgcaatgacaccgcagcacgcgacaaatgccagaacaaacacaagcagcggggtcataaagcccatgcggtggcgcgtttcactgcgcttttcctcgtaatctatcatgccgcgccacctccgtcacaatacgcgccagcggtcatgccgtccgcagtgatcgttaaaagcccgttttccgaaagctcggctttaaacgttttaaggtcgcacaacttttcagcgttattggggtcgatctccgccgtgacccgtgaaaactccgtgcgcagcgcgttttcatataaatagatgcgcgtttcgaagtcgctttccggctcgcgcaggcacaccgccgggccctccgggccgtcgatcaggcggatgttccctttgccgccgcacgctgccgtttggctttgaatatacgaaagcgcgctgcgctgctttgcgtgtgcgtcgcgggcatccatcgtatcggaatacagacgcgcgcccgcaagcgtcaacaccaaaagcgatgcgatgagcaatgcatacagcagaagcagcatcagagaagtgctgtttctctttttcggttccgtcatgcgccctccttattcctcgccgcgcaccagcacctgaacggtcggcagctggttatcggcgaaaacctcgtatgtcacgatgtattctttcttattgaccgtaagcccgtagtgcttttccaaatattcaaggctttccgggtatgcgccctctaaggtgtagcactccacggcgctgcgcaaaacggcttcacgcacggcggcacggcccgtttcgcggatatcctcctgaaaaaccggcacgcacaccgcggtaaaaagtaccgcaagcaccagaataagcccgaccgcgaaaagccggaagcttacttttcgattcaaaatacccatagcttttccctcagattgcgctcaaaatgccgagcaagggcagcatgacgcttaaaagcgtcaaaccgacagacgcggtgagaaatccgatcaaaattggctccgtgcggtcgatgacgctgcacagtccgttttccgcctcctgcgccgtgcggcgcgcgaggttttccgtcacctgcacgagctcgccgctctgcgcaccgccaagcagcattttgccgtacatggcgggcaatatcttttggtgcgcaaacgccgtcgcaatgccgacgcccatctgtgtttcttcacggcatttttcaagcgcttcgtgcagctttttgtggcgcgtctgctcgatgcacagcgcaagcgcactgtcttcatccgtaccgctcgcaagcaaggcggagagcgtgtccatcacctcggagaccgccaaaagccacgcagccttgcgcgtgaagcggctcgtttccattgtatttttgagtttttcccgacctttatcggagcgtataccaaacgccaaaacgagcaaagcgatgcccaaaagccccgcaaacaccaagctgatgcgcccgatgagcgtcgccgcgagtacataggcataggaagatgaaagcaggctacccgttaaattgtcgtacacgcgctcaaacatgggcagcacggcaaaaacgagcaccgccaacacgccgcacatcatcagcatcaaaacggccgggtatgtaagggtgctgcgcaaacggtcgtatagcgcgctttggcggtcatagtggtctgcaaggcggtcaagcgcttcgtccaatcggccggaaagctctgccgtgctaaaaacgctcaaggcgtattccgggaaaacgccggtcttttccgccgctgccgaaaacgtctcgcccgctgcaaccgaaaggctgatctcgatagaagcctgtcgcaaggcggtgtccatgccgtcttcctcaaacagggaagaagcctccgaaagcgacgcgccggagcgcagcagcattgcaaggctgctgcaaaatacgctgagctgttcctgagtcaaaaatttttctgccatgttcctcgtcctttcgcttttcctttaataagtgaaccgcgttgtgtattccgaatcgttttgaatctccccggcgggcatgccgcctgcggcaaaggtgatgtccacccgctgccactcatccgcttttgcgcggatctccacggtgatccacccatcgctctccacataaaagctgttccacgcgtggtaggtctcctcacccacataacccgtgatgagcttgcacggaatgccctcactgcgcagcatggcggcggcaaggcttgcataatcaaagcatatgcccttgccggtctttaaggtctcatccggggagggcaggtagccgttctgcacggacgccgcttttttcgtatcgtattggatattcttcaccatgtagtcatacacggcggcagcaatgtccgcatcggtggtgcagtttgcggccagctctttcacctttttgatgcaatcggagcttttgttgtaattcaccatctggttcgggcgcaggtacggctgaaattcatctttcagcgtcacgtcgcggtcttcgctcccgatacatgcgtatttgctgtcgcccacctgctccatcaggcggaacgtgtatgcgccgtttcccatattgagcgggaaaaatgtcgcagtaccgtcgttcggcaagtcatagttatatttatcctcgccgcagacaatctgcatttttaatcgcgtatcgctctgcgcttttacgccgatgacgccgccttcaagctgggaaaggtcaatctctccgctgccgaacgcggtcgcttcctcttcgttgaagacggaatcccgaaaagcggggacctcgtagggcgcggcgttgctgtccgtgacatcgcccgccgccggtttggcgtcgtttaatgccgttccccgcgccgcacagccgcaaagcagcaaaataagcgccagcgccgccgctaacagctgaattttttctttcatgccgcaccccctgtcttttctgtgtatactaaatattattttatcttgtttttgtcttatacgcaagccctgtacaaaaatcttccatattgtccctaccatcaatattttcaaaaaagcatcgaaaactattgataatataaatattatagacataaatttcactaaaaatgtccaccgtgaacggcgacgtgctatatgacgagggcggcgaaatcacacagtgcagtttcaatgccgagttgctcgcgggcacgcgccggtttacgcagcttgcaaggcgttctttttgcttttccgaaattttggtgcaggagttttccacgaacacattgacaaaccgcgcaaaaaaacgtatgcttatatatagagttatatctaacttagaaaggagcgcttgcagatgacgtacaccattaaggaagcctcggacatcacgggcatcccggcgaccacgctgcgctattacgataaagaaggcatcctgccgtttttggagcgaaaggaatccggccacagaatgttttccgaacaggatctttccatgcttcgcattatcgaatgtttaaaatgcacgggcatgtccattaaagatattcgccagtacgcggtgtgggcacaaatgggtgactccaccctagagcagcgctacaacctgtttcttgagcgccgcgaggccgtcatggcacaaatcaaggagcttgaagatcagcttaaagtaatcgattataagtgcaaatactacgaggaagccattgccgccggtacggaagacattcacaagcacaaaacaggccactgctgcgacgacgaaaaagaaaacaaagacgcataagttccgcaaaaaccaagggcacggagttttaaaactccgtgcccttttgttgtataagtcataaccacacctaagagaagtggttatgacttttgctttatttccttattttagccctgcacagaccacgtgataccctgcggggtatccttcacaacgatatggcgtgcggcaagcgcatcgcgaatcgcgtcggcagttgcccagtcctttgcctttctggcttccgtgcgctttgcgataagcgcttcgatctccgcggcttcctcggcggtcatgccctccggcacagcggacttctgcgcgttctgctcctcgcgcagcgcctttgcagctttcagcaagccgagggacaacacttcgtcaaactccttgatgagcgcaagcttgtccgcgtcggaaagcttggctttcagtacgtcgtacagcgctgtgagtgccaaggacgtgttgagatcgttttccagcgccgcgcggaacgaggcacgcagcggctccatggcagcttcgtcgtgctctccctcatttttcagcgctgcaatgcgggaaacgagctttttgtacgccgtggcggtgttgtcaaggctctcaaacgagaacgtcagcggctttctgtaatgggactgtaagcagaacatgcggtatacaagcggcgcgtagcccttttcctcaagcagcgagaccgtgagaaaatcgccctttgatttgctcatcttgccgcgcgcgtccaaaaggtgcagcacgtggaaccagtatttgcaccacgggtggccgagatacgcttcgctctgtgcaatctcgttcgtgtggtgcggaaatgcgttatcgatgccgccgcagtgaatgtcgagatattctccaagatacttgatgctgatgccgctgcactcgatgtgccagcccggatagcccacgccccacggggaatcccacttgagctcctggtcgtcaaacttcgactttgtgaaccacagcacgaagtcgctcttggagcgcttgttttcgtcctcttccacgctgtcgcgcacgcctacggcgaggctctcttcctccatgttgccgaaaacataatagttttcgagcttggaggtatcaaaatagacgttgccgcccgcgatatacgcatagcccttttcaaggagcacctctaccatgtggatgaatgtatcgatgcagctcgtcgccggaacgacaatctccgggcgcttgatgccgagcttttcgcagtcactgaaaaatgcgtcggtatagaactgcgcaatctgcatgacggtcttgtgctcgcggcgcgcgcccttgagcatcttgtcttcgccggtgtcggcatcgctggaaaggtggccgacgtccgtgatgttcatggcgcgggtcacgtcatagccgaggtagcgcaaggctttttccagcatatcctccatgatgtacgagcgcaggttgccgatgtgcgcatagtggtacacggttgggccgcaggtgtacattttgactttgccggcttcgtgcggaataaattcttcttttttctgtgttcttgtgttatagagctgcatacaggtgcttcctttctgcttattcttccttattcttctccgctttctgtgcggtcatcttgcttttttctctgcggcagctgttgagctcgccgtgcaggcgctcaatttcaagccgcatgcggcacatttcctgcgccaccgggtcggccacgtggatctgatccagcgtgctgttgtccatcacacgcttgccgcccacgcgcacgatgcgcgccggtacaccgaccgccgttgcgttatcgggcacggcatccagcaccacggcgcccgccgccacacgggcgttatcacccacgcggaacggccccagcacctttgcgcccgcgccgacgagcacgttattcccaagcgtcgggtggcgcttgccctggtctttgcccgtgccgccgagcgtcacaccctgatacagcgtgcagttgtcaccgataacggtcgtttcgccgatgacgacgcccataccgtggtcgatgaacagatttttgccaatcgtcgcgcccgggtgaatctctatacccgttttgcggcgcgcgcgctgcgagatatagcgcgcgataaatttcatattatggcggaaaaaccagtttgccttgcggtaagaccgcactgccttgaagccggaatacagaaaataaacctccgcacggctgcgggcggcagggtcgcgcgccatcacggcgtcaagctccgcctttaatttagaaaacatgacgtaaacctctccttaaaaacaaaagccccgagcgcacaacataggcgctcgggggcgaaatgtaccaaaacattcatgatacaataaatccgcggttccactccggtttatcactcaaacggcgtaacgtgccgtatccgtatgcggctcactttcgctcaccgcatccgctcgcgaatgcacttcgctcggctcttttctgcggcggctctcagcccatgacctccgctctctatcgactgcccccggggtactcgttcggtctcagcgtttgctttatgacagtattttaacacagcccctttaaaaacgcaagcccaaagatcacctctccgcgccattttatgcggcttttttcttttggttcttttaaaatacgcgcacacaaaaacagggtacgcacttttttacagtgcataccctgtttattttagctgtgatttaaaaattagagctgctcgtcgatgatctttgccttttcaagcgcacgcttctggagcagtgcgtcgatcttggcgtgcgggtcgagcagggagctgatggaagcgtcgtggttcaaagcggagatgaagtaagcgatgtacttcgaaacgtcgacttcatggaaccacgggcggttcttcagttccgggttaaggtacgtcaggttgctgccgaagatgccgtcgatgagaccctcttcatacgctttatcgaactttgcgaggccgttcgtgaagattgcatacgtaccgtaagcgaagaagcggcgtgccttgcgggccttgacgttctctgcaatgtcgagcacggactcgccggaggagatgatgtcatcggcaacgaacacgtccttgccctcaaccggggtaccgagatactcatgtgcaacgatcgggttgcggccgtctacaatgcgggaataatcgcggcgcttgtagaacatgcccatctccacgccgagcacggaagcatagtacatgttgcggttcagcgcgccctcgtccgggctgacaatcatgaaatctttcttatcggtggaaagatccgggaagtccttgaagagcttctttaaaacctgataagtcggcatcaggttatcgaagcccataaccggcacagcgttctgcacgcgcgggtcatgtgcgtcgaaagtcaaaacgttggaaacgcccatctgctggagctcctgcagcatgtatgcgcaatccaaagactcgcggtagctgcggcggtgctgacggccgccgtaaagcagcggcatcacgacgttaacgcggtgtgccttaccgcttgccgcctgaatgagacgcttcaaatcctgataatggtcatccggggacatgtggttctcgttgccgaagtagttgtaggtcaggctataattgcctacgtctacaacaaagaacaggtcatagccgcgcacggtcgacttgataaggcccttgctgtcgccggaagagaaacgcgggcagctgttttcgatgatgaacgtgtccacatccataccggcacgctttgcccaacgcaccagatgggcctcaaccttttcggaaagctcacgcgcaccggcaagcggtacgatgccaagcggtgctacgcgattctctgcactgaaaaacgtctgtgattccattgccatttgattactccttcaaactgcatattccgttatttgcctgtccgttttacacgaacaatgtcggctcttgtctatttcaatatagcacaaaatagcgagaatttccacagcaaatacgcaaaatattaaacttttgttaaatccgataagagggcaatgccaaacggagcgagtttgattgaatttaccgtttgatctgtaccgtacaacttgtagtcgcgcggcaattccacggtttttccgctttccgtgtagttttctacaaaaatgatattctccttttcgccgtggcggatgtgtgccgttacaccgtgcggcagggcgcaatcgagcgctttttcaatgtgcagcgtctcaatcatttcgccgtacagtacagaaagcatatcgctgccggtacgggccgcaatgtaatacgcctcgcccttgccgaacttgtttttcgtcagcgccgcttcgcctgcgtagaaatccttctcatatgtgccgagaacctccgcagtcagcgggtggatacgtgcacaaagctccatagcattgtaacggctgccgttaaacacaatgccgtttttcatgccgtccggcaggctgtcaatttcttcgttccacacgccgaacacgtccatcatgtcgccggggaggccgcccattttgcacaggtcggtatcgtccacaatgccgctccagtacgttgtgacgagcgtgccgccgttttcgacgaacttgcgcatcttcttttcaaagcctgcgcggtacatatagagcatcggcgcaatgacaagcttatatttcgagatgtcgccgtccatatcgacgatgtccacctgcacgcccttatcccagaacggacggtagtgcgtcaagagcgtctccacgtatttttcgtctttatccttgttgcgcgggcccgcggcagcatccagcgcccagcggttttccacgtcgtacacgatggcgacctgcggcttgacttcggtgccgtatacgtcgccgcgctcattcatgatcttcagctcagcgccgacggactgcacgtccttaaacacacgggtgttctcgttcgtgacggagtcgaacacgccgccatggctgacatggtcaacgaccgcaccgtggaacttttcacaggagccgcggctctttctgaactggaaatactgcacggaattcgagccgtgtgcaaccgcctgcatggaggaaagcaggtgcatgcccgggcgcttcagcatgctgacgggcgtccagttcgtcatgctcggcgtgctttccatcaaaaggaagttttcgtgcttgatcgaacgcatcacgtcgtgcgtcatcgcggaagagaccgcaatctctacgttgtcggtcgtatgccactgcgggtaattgtcccaggaaacaacatcgagctccgggccgaacttgaagtaattgaggccgtcgtagaagcccatcaggttcgccgtcaccgggatatccgggtttacttcctttacggcatcgcgctccattttcatgaaatcgacggtctggtacgtgacaaagcgcttccaatcgagcgtcagaccgtgcacgttcatttcgccgttcggctgcggcgcgtgaatctggtcccagctcgtatacgtgtggctccagaagtccgtccaccacgcgtggttcaggtcatcgagcgtcttatacttctttttcagccaatcacggaacgcctgttggcacagcgggcagtaacactcgccgccgtactcattggaaaggtgccacaaaatgacgcccgggtgatttgcaaagcgctttgcaagacgcttatccatctcacgggtcttctctctgtacacgggagatgtatagcagtggttgtgacgcgcgccggaaaggtcgcgcacaccgttattctgcacacggcggatctcctcatacttttcgctcatccaaagcggctttgcaccggacggtgtggccaacacggtataaatgccgtttttgtagagattgtcgatgatcttctccagccagtcgaagtcgtattcgccctcattcggctccagatgcgcccaggagaaaataccgaccgacacgcagttgatgtccgctttcttcatcagctccacatcctgcttgagaatctcgggatagtgcagccactgttcgggattataatcgccgccatgcagcagcttcggaaatttcggtgtaaggggtttcataataaaatacctccgtcagcgcgacttcccgcgcgtaatctacacccagtatacaggttgtacggccaaacttcaagcgtgagtttcacattcttcattctttagtctttgccgcgttcttatgcgcatgtaataaagaaaagcgcacagattttgttttctgcacgctttttagcttcatatttttttgaaaggcttcttttattcgcccgctttactttggcttgtgtcaagttctctcgtcagtttatgcattctaaagaaatacgtcgtgacaagcaaaatagccgcaccggcccaagcagtgatctccgcatagaaaatcccctcctgcccgataataagcggcagaaacaacgccacgccaatacgcatcaaaaattccatgatgcccgaagccatcggcatgatggtatcgccaagccccatcagcgcggagcggtaaatgtgcagcatatagaggatagacagacaaatactcatgatattaagatagtgtattgccacctgcgacgagatcgacacttcctccgccgtgccggaaataaacagtgcgatgccgtattttccgaaaatcagcacaaaaaccgtaatgacgaccgaggtcagcaaagcgatccacgttgcggagtgcataccctttttcacgcggtctaaaagccccgcgccgagattctgcccgacatacgttgtcacggcgtaaccgaacgaaacggcggcaatctccaaaataccgtacagcttattcgttgccgtaaagcccgccacgaacagcgtgccgtagcggttgacgaccgactgcaccaccatgccgcctacggcgatgataacattctgtgcggcgaccggcgtaccgagccccaaaaggcgctttgctatttccggattgagccggaaatactcttttttcaggtggatgaccttcacgtgcagcacagcgcgcaaacagtaaagcgctgcaaaaagctgtgcgatgaccgttgcgacgaccgcacccgcaatgccccagtggaacaccataacaaacagcagatcaagcccgatattcagaatagatgcaatgaccatggcatacagcggcgttttgctgtcgccgagcgcacgcaggatgcttgcaagcacgttatacgccatgatgatgggtatacccgcaaacatgatgcgcaggtatgtgaacgcgccgccgatgatctcctccggcgtgttcatggcgcgcagcacgggttccatggcgacttggctcagaatgacggtcaagattgaaatgaccgccgaaagcgagatcgtcgcgccaatggaacggttaagaccctcgtggtcttccgcgccgaaacgctgcgccatgtaaatggaaaagccctgcgcaaagccttggataagccccagcacgagccagttcagccagtccgccgcaccgagcgccgccagcgcgtttacgccgagcgcctgccccacaatggcggtatccaccaccgtgtagaactgctgaaacacgttgcccagcatcagcggtatcgcaaaggtgaaaatcagctttgcagggctgccttttgtcatattttgaatgcgttctgtttttgccataaactcctcatgatttcgccgaaagtttttccggcaatttatgaatacgaatgtaatacgtcacgcacagcaatgccgccgcgccgaaccacgcggagacctctgcaatgcagatggaaagaaagcccagattgaacactttagagagcacgagcacaacggaaatgcgcagaattagctccagcgcgccggagagcatcggcaccaccgtgtcgccgagactttgcagggaaaagcggtagacgaacagcaaacccagcacccacatcatcgcaccgccgcacagcaaatacggatacgaagcttcgatgaccgtctgctccacgccggagacgaacaccgccgtcagctggcggccgaacagaatcattgcgccgccgatgaagaaatcgacgatgagcaccatcaaaatgccgcggcgcacgccgactttaatgcggtcaacgcgtcccgcgccgaggttctgcccgacatacgtgccaagggataacccgatgatgttgcccggctgctccgcaaggccgacgattttcgagcccgccgtataagccgcaaccgttgtggaaccaaagccgttcacaaccccctgcagtgtcataccgccgatcgccgtaatggaattcataattccgaccggcaaaccaagcttcaataagccaaaaataatagacttatccatgcgcttttcgccggctttaaaccgcaaaaccgacatacggcacaacacgaaaagacacatcaggccggaaagcagctgtgccaaaacggtcgcccacgcagcgccggccacaccccatttaaaggccatgacaaacagaatgtccagcccgatgttcactgccgagctgatgagaatgataatgagcggcgacatactgtcgccgagcgcacgcagaacgctcgaaagcgtattgtaaaacaccgtcgtgaaaataccgatgaaaataatgcgaatgtacaaaagcgcatcatcaaaaatatcggtcggcgtacccatcagtgtcatgagcgggcgcgagaaaatgagacttaacgccgtgatgaccgccgcgctcataaagccgaggtagcccgcgttcatcaccgttcggcgcatgtcgctttcgtcgcctgcgccgaagcgttgcgaaatcaaaatggaatacccgtgcgtcaaaccgttgatgaaaccaaaaataaagaaatgtaccgaacccgtggaacccgccgccgcaagcgcgttgacgcctacaccgcggccgagcaccatagcatccgccacagagtataactgctgaaacacattggcaacgagcaaaggcagtgcaaacgccagcaaaagctttaccgggctgcccttcgtcatattgcgaaccacaaaatcgctcccttcaaaagacactttagctaccattatatcggataaaacgctgcaattcaatgcccatatgtcgttttcgaggggtgtaaacgccgaattttcctattcttttttggccaatttggcgcgattccggcttcagcaacaagccgtgtaaaaaaacagcgccatgcaaaagccgcacagcgccgcgtgaattttgttcaatcaaacgatgtaatcgaccgcaacagccttctcgcgaaccgtcgcaacataggtcttcaccgtgttgcagtggtacgggtctttctggtattcttcgagcgcctcggggctctcgagcgtaacggtcaggcagacgtcaaaggagcgctcggagtggaggaaatccgcaccggcttccacgtcaagtgcctgcggcacgcggcccttcatcgtcataaaaagatcgcgcagcttttcgcactgctccttggaattgtccttgagcttgatcattaaaacatgctttaccatttgaaaaacttcctttcggataaaattattgcatagctaaagaaaaccatggttaaaagttttgctcaagctttttcaaaagcttgcaggttcttagggcagcgccctacgtcgctttccgcagaaaacgaaatctttttgcgttcgcaaagtcaggaagggaggacgaaacttccggtggacgtttcgtccgagggaagccctactaaggggtttccccgaaaggcggccaaagccgcctttaaaaaatcgacttattctatctaacccccgaaaccgccctgtcgagcgcgcccaagtccttgtgaatccgcacatcgcgcagaccggcggcttcaaacagcacctttaccgcttgcccctgcgtctcaccgatttccacggcaagcacgccgttcgggcgcaatttttttgcccaaatatcgcagatcgcgcggtagaagatgaggccgtccgcgccgccgtccagcgctgttttcggctctttctgcacttcgcgctgcaaaagcggcagctcgcttgtctcaatatacggcgggttcgacgcgatgaaatcgaacccatccggcagcgtctccgcaaaagctttatctaacatgtcgccctttaccgccgtcaccggcaactccgggtaacgcgccaaattctcgtttaaatagttgaatgcgctgtcgtacagctcaacttccgtcacttcggcgtgtgcttctttcgagatggaaagccccaccgcacccgtgccggcacaaaggtcaagccccttcggcaaattctcggtttttgacaaacgcttgcacactgcttccaccaaaacagcggtatcctcgcgcggaatcagcacgccctctccgcaggaaagcgtcaggctcataaagtcccactcgccaagcagatattgcagcggctcgcccgttttgcgcttttcgagcgcggaaagcaccgcttgctccgcttcagactccgccggcttatcaccgtgcagcaataactctgtgcggttcgcgccgcagaaatgctccaaaaggcacgcggcttcaaacgtcgggtcttccgtgacgggttcaagcgccgtcttcgctgcgcggtacaactcgttgagcgtcatcggataatatcctcgccgttttccgggatgaccgctttcatcgctgcaatggcggcttccatcatcttatcggtcggctcttttacggtcaaacgctgaaaccacaggcccggcgccgcaatgatgcgcgtcagcacgttatcgtacttgccgcaaagcttgatgagctcataaccgatgctgacaacgatcggcaggcacaagagcttacagaatgtgcgcaggaacggattggaaaacggaatgaaaaagccgatgatgatgccgagcaaaagcattaagatcataaagctggagccgcagcgcggatggaagcgcttttgcttccgcacattctctacggtgagcggcaggtcgttttcatagcagaaaatcgtcttgtgctccgcgccgtggtaacggaatgtgcgattaatctccggcattttagagatgacaacgatgtacagtacaaaaatgacgatacgtaaaagaccctcaaacaccgaacgccaaccactgatgccgtcgcccgtgagcatcatcagcccgttaaagagcaccgccggcaaaaagaaaaacagcagcaccgcaagcgccacgcccagcacaccgcccacggcgacgaccgcattcatcaccttgtctccgaatttcttttcgagccacttttcaaatttcgagggctcttcctcttcctcgccgcccactttatccgccgaaagcgtcagcgccttcataccgaggcgcagggtatccaccatagagaacacgccgcgtataaacggctttttcaaaatggggtatttttcgcgcagcgacggcgtggaaacctcctccgttgtaatatttccggcttcgtcacaaaaagccgctacgtttttcttcgggccaaccatcaaaatgccctcaagcaaggcctgcccgccgatagatgttacgcgttttgccattctttctccttttgcttataaacaatatttaatcctgttttctctccacgacctgcacctgcgcggtggcggtgggaatctgcgttgtattggaaagctcgggattcatctcaagctttttcatggtcggtatcgtgatgatgaccgtggtgcccatgccttcttcgctgtcaacatcaagcgagccggagtgcagctccatgatctcatttgcgacggcgaggccgatgccgttgccgcgcacgttttggtttgctttgtagaacttctttttaacgtttggcagatgctccgccgggatgccgcagccactgtccttaatgatgacgcggataaacccgtcgtcctcatacgcggaaacgcgcaccgtaccaccgggattcgtgtatttcaaagcgttgtcgatgacgttgatgaacacctgccgcaggcgattcacatcgcccaaaatcggcgaaagcatcgtgtcttcctcatcgtaaatgaggtttttatgctccgttcgcgcgcggtcggtgaacatgtacacggcctcatccagctccgccaaaagatcgatcttcttgaggatcagccgcattctgccgctttgcatgcgggaaaaatccagaagctcctccaccatgccggaaagacgttctgcctcgcgcacgatgacgttcatgcccttatcatacgtttcgcggccgatgccgcctgcttgcagcgtttccgcccaacccttaatggccgtcagcggcgtgcgcagctcgtgcgaaacagaggaaatgaagtcgtttttcattttttccgctgtgccaagctctgccgccatgtcgttgatggaatcgcacagtgcgccgagctcgtcgtccttctctttcttgacacgcacgtcaaaatcgccctttgcaattttttccgccgtagcattgagttcccgaatgggcgtgataatagaccgcacaaaatagatgcccgaaagcgtgacgagcactaaaataagcacaccgatgccgatcaaaaccaacacgacatacgtaatctgccggtctgcgcgctccatagagacgatgtatcgcaccgcgccgagcaccgcgccgtttgcgccgcgcgccacgcgcgagacggccatgaccttctcgccgcttgcgagcttgccgatccaatagccgtacccgttttcgctgtgcaaggcgctttcaaaatcgggcttgctctggttttggtccggcgcaaagccggaggaggtagacaaaatgctgcccgaacgcgagaccgccataacctccatgaggtctttatccgggaaattttcggtgtaacttctggctgcagcgttaaactcgcttacggttttcatgctgccggaaagcacggtgggcagctcgtcgctgcggccgatgagcgtcatttgtatgccgttataggcatagctctgcacaacgaaagaaagcgccgcaatacaggctgtaaataataaaatcatcacaccgaggctgttaaacagccagcgtcttgcgataccttttttgaacacgcgctttcctcctttctgtgcttctttttgtagaatagcctatttttatcattttaaatgacttgtcttgcaagtcatcagaaaacccatgcaactgggttttctgcggttcaacagtccaccggactgttgaacctactttcctagttttttattaggcaaaaagatttcgtcgtctgcggacgacgcctcagggccttgccccgagaccccataaactttctgaagaaagtttaatcaaagacttcattcgtttgctttcacgcaaccttttgattacttatcccaccgatagccgatgccccacacggtgacaacatgtctcgggtttgagggctcgtcttcaatcttcatcctcaatctgcggatattcacgtctacgattttttcctcaccgacatatccgctgccccagacgtgctttagaatttcggagcgttttaacgccttaccggcatttgagatgaagtattccatgatctgaaactccacctgtgtcagctccacggggttgccgtcttttgtgaatgagcggttgcgcaggttcagcacgaagcggccggagcgcagctcttcggagaaattcggctctgcggctctcgtaaactgtgccacacggcggtaaacggcgtccacgcgcgccacgagttctgaggggctgaacggcttcgtcacataatcgtccgcgcccatcatcaggcccgtcaccttgtccatttcctgcgttttcgccgtcagcatgatgatgccgatggtcgcgtttttctgtcttaattccttacatacggcaaggccgtccagactgccgggcatcatgatgtccagcacggccacgtcaaaatcgccgccggcctgctcgtacacgcgcaaggcttcctcaccgcttgcggcttccacgcagtcgtaccccgcgcgctttaaattgatgaccacaaactcgcggatattctgctcgtcctctgccaccaatatctttttcatgttcgtttcccctttctgtcccccattttcagtctatatttattccagcacttcaaatccgctttgcagcgttttttcgtcgctttccgccatggaatcgtccaaaatgcgcagcacatacacgcgcccggcggagctgctcaacagaatatcttcgtcattttgttctttttccgcccagtcctcctccgtatatacccgaatggagaacttgtcctcccggccgaggtaattgccgttaaagccgatctgcgtatacgtaaagaatgtcgctgtgcgggtcacggtgtcattttggcagccgtagttatcctcgctgctcggcaaaaacaggttgtagttttccgccgtattcaaaatactcgtgcacaccggcgtcaacgtgttgtcctgtaagctatacgtgttccacgtgatgacatacccggtggaatccgccgtcgtttcgctgccgtttatcgtcaactccgccgttggaatctccaaaatgccgtccttattcacatcgcgtgagaccgccgcggccgccgttggccgatccgtcgcgttttcttcgttcgacagcggcgaaatgagtctgtccgacgcttcgtcatacccaatgacctgcgtcagcatgtgcccgtccgctttcacgccgtccagcaccgctgcgcgccgccaggaattcacctgcgaaaagcttacggaggtgtaacgcgtcaccgctgcatcaagcggcacggttttggagacatacggctggtcgccgtcaaagcggtataacccgccaagcgccataatctcctctccgctcgtctgcgctgcctgcaaaacgaacagctcttttatattgtcgctgtcaaaatccgtcagcagcatttcgctgtaagagaccgttgtcatggagaattcgcggatcgtgtctccgtccacataataaaccgaaacgcttgccgtcgccgtgagcggatctccccagcccacgataatctcgtccataccgtcgcccgtcaggtcaccgaagaacaccttgtccacctgcgttgccgccgaggtaaaccgcgccatagagttccaaacaccgtccgtgtttttcttaaaaaattccagccgcgtgccgcccgcgtcgccgtttgcacagaagctcacgacctccgaagtgccgcacccgtctaaatcgcgcgagatgatcgctgagcggtaatcgccgcatttcgggtaaacgagcgtcacgtcacccacgccgccgcccatcagggcatatatcgcttctctgtctgccgtcgtctttggcggagacatcagcgcttgcgcatcaagacccgtcagctcgctgcaccccgaaaaagaaagcgccaaaagcacggcgagcaccgctgcaaaaagttttttcagttttccgcgcatcgccgtcacctcctgcgcaaatttacaatatcaatataagtatagcatatcccccccaccgccgcaagcagtcaggggcgctttggcgtcctataaaaattaaatttctgtgacagcattgagaaaccggcgcgcgcgtggtaaaatggagaaaatatctcgaaaggattccgcatgaaacaaacaacgcacaatacccgtgtgcggtgggtgctcggcattctcattgcgctcacgcttgcgttcatctggagcaactccatgcagagtcgcgcggtctccggcggcatgagcggctccttaaaaacgtggctcgagcagcttctgcacacagaaatcagcgaatttttgctgcgcaaggcggcgcatttttcggaatacggccttctgggcgtagaattttcgcttctgctcggcctgcagtacgataaaaacggcaaaaatctccagcacgggcgcaatcttctcgactttccgctcatcggcatgctgtgcgccgtcacggatgagaccattcaaattttctccggccgcggttcgcttgtttccgatgtgtggatcgacaccgccggcttttcgaccggattctttttgaccgttctgctctttctttttatcaatcactgtaaaaaaagccgggtaaccggcaaccggaaaggataaataccatgaaacagcatattttaaagaaggttcccctcttcgtcaccgtgtccgttctgctcacgtgcatcgtgttttccggctgcgcgggccgcaccgtcatcacagatgagcaattcaaatccgcctgcgaggctgccgactgtgaagtaacggacgtttccgaccagtttgacagcagcgtcatcacaaaagcgctgaccgtttcgggcgatgattactccttgggctttttcacattcgcttccacggacagcgccaaaacgaactacgcgcagatgctttcaagcgtcaggacctccgagggcaaggcggtcgattccagcgaatacaaccgctacacgtataaaggcgacgacctcacaacggtactctaccgcaacggcactacgattcttttcgccaccggcgcggataaggacactgtaaataaagtcgtaacagcattgggactttaactgttaaaggctcgtcggcaaaaccgacgagcctttaaaaataccttgccatgcgggcagcggcgttcgggacgaatgtttccgcccgctctgctatataagccgccgtcagcgcacccgcgccgacgtactccccatactccgtaaacaggctgcgcgccgcgatgcgctctgaaaaccgcaccgtcacgcacaggaaaaaccggctgccgatccgccccagcgccgaagaaagaacatggagcgtgtgcacggcacgctccaccgcatccatcaaatgccccacggtctcaaagcaaaacgtcagcggcacgggcggcgaaacgatacgaatgccaccaccccctttccgttcccaaggcacacccgcaggtgtatcttaaaccagtttacgccaaaggcaggtacaccgtgccgatttttctttgaaatcttgacattttctttttacgttctgatcattaccaaagttagttatgatctgacatcggtgaaacgctgaaccggccgcgccccatcgcgaccacggtcggcatcgtcttaaatgtcatttatttcctgtacctcaacaaaaaagacgtacaggaacagaacaaaaaaagcacctccgaatcccgcattgatttacccgcctatatcttctggatcccgccgatctttcggcgggatttttttgtaaaaatgcagatttcccccttgacaagcattactatgcgttgtatagtattgtgcaaagagagatatctcggaaaggggatgcaaaatggacattcagctcaaacgcgggctgctcgatgtgtgcgtgctcgcggcgatcaagcaggaagactcctacggctacaagatcatcaaggacatgaagccgtatgtggagctttccgaatcgaccctataccccattctgcgaagattggaggccgcacagctgctctcggtgcattctgccgagcacaacggccggctgcgcaagtattaccacatcacggaacagggacaaaagcggcttgaatatttcaaagccgagtggaacgagatcgtttccatctacgaatttgtgacaagggaggacaaaaacaatgcgtaaagaagaatttttgacggcactgcgtgcagggctcaccgggcttttgccggagggcgtagaaaagcttgtggagttttgcagcgagatgatcgatgaccgcatggaagacggcctcacggaagaagaagccgttgccgccgcaggctccttagatgagctcatccaacaggccaaaacagagcttttacccgtaaagaccgcgaatttcacggaaaaatccacctttggcgacaccctgcgcacctatacggcagagagcagcatctgcgatgtagccgccgattgcggcccggcagatttcatcctcctgccctctgaaaataacacctgccgcgtggagtgcgccgaaaacgagactgtgcactatgtcgtaacgaccgaaaacagcgtgttgcacatccgccgcgcagacagccgcaccgtgttttctttcttcaagttttacagagcactgcgttctgagcccgtgcgcgtttatctgccgcagggcgcgtataaatcgctcgaagtcaaagtcacaagcggcgacattgccgttcccgcgggctacaccttcgatacggcttccctgcacagcgcgagcggcgacatcgcctgctgtgcagaatgcggcgcgctttctgcacaagccgcaagcggagacatcaccctcaaagacacttcgtgcggcacattggcgctcggcaccgcaagcggcgctgtcaccctgctcaacatcaaaaatgaaagtggcggctctatagagacggcaagcggcaaggcgcagatcacaaattataagggcgacgcgctggaaattggaaccgccagcggcaaggtcagccttgaaaatgcggaatgcgcagcgctgcatatcaacacggcaagcggcggggtcgatcttacacataccgtgtccgccgacgttatggaaatcggtactgcaagcggcagtattcattttgaaaactgtgacgccgcctccctttcgctcgacagcatgagcggcagcgtggtcggcacgctaaacaccggcaaagctttccgtgctcaaagcagaagcggcaaagtggatgttccgttcgacagcggcacaggcacatgcaaagtcagcacactcagcggcagtatccgcgtcaaaattgcagaataacgtaaaaaatctctctcggctgcgccgagagagattttcaatttcgaacctcattttactttatttctgaacttcggtaccaacacggtggcgagcacccagaacagctcgtagatgacgagcgcaaatgcggaaatctgctccacgcccgcaacgaacgtgaggaacgccacaagcacaaagccgatgacgaccgccgcgttctgcatggcgacgatgaagctgatgttcttcttttcatcaatgcacgtggaaacaaggctcatcacggattccacacgaccctttgtggcggcataggcgtccacgcggtccgcagtgtcgttcacaaggtggtctgccgggccgtcttggcccgcgccgatgacattcaccgccgtggcgtcaatgccgaacaggcgcgaaatgaactgcggcgtaaggttcgggtctgccgaacgcagaatgagcgaaacgccgttcatttccatgttctgcagctccgctttcttcttacggtctgcgttataggtcaggatgaacatggcgtaaagctcgccgcccattgcaatgtacaagatctgtcggctgcccgtcgtgtactgactctccacattttgctccggcgcttccacaccgtgcgcagtcaaaagcgtacgggagccgatgagcacctctttgccgtccaccgtgcccacaacgccgtttccggcctcaaatgcggccttttcggcctccggaagctcgccctcgtgctcgctgaacacctgctcgaacacaccgcaaagcgggccgccgagctgctgcaccaacgtgccggcagccaaaacggcttcttcaaggccctcctgcttaaacggcttcaccccgttcaaaacgaccgtgccgcgcgggaaaagctctgtggaatcaaccagaacggcatttacggcgctcatgcgcttgataccttcatagccggagaccatcgcgccgcggcggcgcagacggtgggaaagacggctcaccggcaggtttacggccagcatgttcatcaccgctacacacacgcaacaggaagccgccaaagccgtaatggcaagggacgcatctttcgtgatgacaagcgccaccacgcacagaagcagcgaggaaatgaggcccaccggcgccaaaacctgcgaagaggtctctgccgggtccggctcataggaaatttgtaagaagcgctttaagaagcccgctttctgctgatacgcgattgcaggctgcgaaatgacggaggaacccgccatttttaaagacgtgttgtaatcgtcaaatacgcgcaccgcatatttctgctcgcgggaagacacaaagcggaaattcgagtggatgcggcgcagcatcgtcagcttgccgacggtattcagaaacagaatacccgccgcaataccggcgtaaaggtggattttacccatgctgagcgcagccggcgcaaacagcgtgcagagcgtctgcacaaaaaccgccacacaagctaccgcagcggcagaatccgaattcgcgcggaactcaaacagtgccttcagaccgtttagaatcgttttcgcgcagaagccgatggccactagcagcagcacaagcgataagatggtgtagcccactgcaccggcggtctccgtgttattggcattgaagccggattccacaatgagcgacgccaaaatgagcactgcagtgctcacgcccgttgcaagcatgcggattgtcagctcgcgcatcgtcgtgcgcaggtcgtgcgccacgctctttgcgtctgccggaccggtgtaatcgtcgatgagctcgtcgctgttttcggcggcttccgtgttttcgggcgcttcgtccggcttttccgcaaagcgaattttaaagcggtgcgcaccggccgcactgacgttctcgtcgtcggaatacacgcgtgcttcactcagcagtgcactttgcaaaacatccgcgttgatgatgtgcaccggcaagtcgcgctttctgtactgcgtcacgtccgttaccggcacggagatcttctgctgcgcaggctctgccgcttcttcgccggcgttctcggcgctttccgcagcctgcacattttccgctttcggcgcttgtgcttcgggcagctgctcgccggaagcaatgtccatgccttcttccgcctgcggctcttcctccggctccgggccattgcttgaaatatccttaaacgccatctcgggcgcgtcattttcttccgttttcggcgctgccgcagcctgctgctcggcattttgcacctgtgcagcctgctttgccgcgttttccgcctgcacagattccagaatgcggcgcacggaatcctcgctcacctccggcaccacctttgcctgctgcaagccaaacgtctcattttcaaggtcaagcttaatctccatcgtgtgcgtctgcgcgtcctgcagcatcgccgtctggaaattctgcaccttgtccttcgtctttttgttttccggcaccacagcgttcgggtcattcatcgcaacggagaccggcaccggggccacaatgcccagctcgtcttccacagcggaaagatccacaccggccgtctctacggcctcggccacacgacggcgacgctctttctgcaggcgctcaaagtcctttgccacttcgtcgtcaagctccgcggtgttctcgtcaaacagcttgcggtatccctcgtcctgcgtggaaatctcccctgtggcatcaaacccgcgggtgtattcgtcaatcggttttaactggatgccgtagtacatgtcttcggcctcgttaaaaacctctttctgcttcttttcgcggcggcgcgcccaaaaaccttttttctctttcttctcttttttgttcttctttttctttccgggctcttcttcctcctcgtaggtatcccacggggagtcttcttgcacctccaccggctgcggttccgcttccggcacgggctgtgctacctctgccgaggcttcctctacgggctgctccgtcacagcgtcggattcttccgtcaccccgggcgttgttttctccggctcttccggcgcgccgttggctttcgccttgcgctccgcttccaatatctcgtccaccgagaatttgttctcatcgttcatggttttgggtcctttctttttcgcctcagcccttggccttgatgcccgcgcgctgccgcgcaatctcatagcaaagcacgccgcaggccaccgaagcgttcagcgaattgattctgcccttcatcggcagagaaacgataaaatccgatttttctttcacaagtctggacacgccgaagccttcggagccgacaacaagcgctgccgggccggagaaatcggtttggcaccaatccgtgccgtccatatccgcggcgtatacccaaacgccgcgcgctttgatctcctcaagaaataccgcaatattcgtcacacgcgccacggggacgtattccaccgcgcccgcagaagccttgccgaccgccgccgtaaggccaacgctgcggcgcttcgggataacaacgccgtgtgcgcccgcacattccgccgttctgagaatcgcaccgaggttatgcgggtccgcaatctcgtcgcacacaaggataaacggcggctcatttcggctttccgccagcgcaaaaatatcctccacctcggagaacgcgtgcactgccgccatggcgatgacaccctggtggttttcgccgccgcacatgccgtccagcttacgggaatccacttcctttaccgggatgcccgcctgctttgccatgcggagaatggacgataccgaaccgtttttctccccgcgccgcacaaggatgctgtcgatgggtctgcccgctttaagcgcctccgtaacggcattgcgccctgctatgacatctctttctctctcgttttccatgaacaaacctattcctttccgcggcttcagaacacgtctgcggccgaaattcgcaatactatcgcagtatatagtagattatagcatacttatatttaccattgcaaccgaaacacgcaatttagcgtggtttttgcaggcggtttttgcgcctaaaaccgccgtgtttttgggcagttttttcgccgcgctcttttcgtcattttgacggtgcttttgcgtgttcattttgctcggcataattattcattcgagttgcatatcttctcacatcttgctgtatatgagccggcctttacatttatacaatttgtaatatgcacggcagaagtatacacacagcgagctttccacagcgttttccgtttaagctgtggaaaactctgtggaaagtgttaaaaacccgctttcggtgctctttttactttccacaacttttcacaatgtgaaatattatgtaaactactccgtcgaaaattccgctttttaccgttttttcacagaatactcactataaaccgtgtgtaaaatttgcgtgaaaagccttgtgtttgcccgaaaaaatgtccctatatatggtgtttttgcgaaaaacagcgttttaattccaaattagaactatttaggcgaaatcctaaacggcgagattttccgtttaagcacattttgtgaaaaaaagcaaggcggcaggctttacacagttgttttttcacctaaaatcgtgtaaaatgaaaatagcgagcagaaagacaccggaaagctgcgcactttttagacgtgtcccacaaaaaagcggggccgcacaaaccgtaagccacggcaattaaaacaaaagacatttttcggataaacatgcactgtatacaactattaagaaaagaggaacccaaaatgcgtgaagacatttgctctataccgatcagtgaaattttcgagccgaaggacggctgcccgttctgccgcatgcgcgacatgctcgaggaccgcatggccacctacattaccggcgcggccatgatggagcctgacgtgcgcgtggaaacgaaccgtctcggcttctgccaccaacattttgagcagatcttacagcgcggcagccgcctgtccgttgcccttattctcgaaagtctcttagacgaagccggcaaagatatcctacccgaggacgacaagctcgcgccaaaaaaaattctcgccgccgcagatcgccgtgcgcacagctgctttgtctgcgaaaacgttgagaaaaacatgcagcacctcagcgccacggttatcaagctctggcagagtgagccggagttccgcacactgtacagcgagcagacgcacatctgcctgccgcattacagcttcattttggctgctgcgcagaaaatgccgcgtaaaaactttcagccgtttgcggcagaaaccaagcgccttgcgaaaaactatctcgataccgtcaaggccgataccacccatttctgccgcatgttcgattaccgcaatgcgggcggcgactggggcaattcccgcgatgccattgagcgcgccatcacgtatctgacgagccgagagcccaccgttaccaccaaaacggaaggcaaaaaccgttgatgcgcttcaccccgcccgatggcgttttaaacctcgcccaaacgctcgactgcgggcagtcgttccgcttttatcccgtcacgctcgaaaacagcattcccgcatggcgcggtgtggcattttcccgcgggctaaccgtctatcaagataaaaataacgacctcgttttagactgcaccgagcaggaatttcgtgacatttggtttgattatttcgattttaacacagattacaaaaagtcccgcgaagtgctttccgctctgcaccccgcgctgaaagaagccgccgaattcgcgggcggcatccgcattttaaagcaggaaccgtttgaggcgctgtgctcgttcatcatctcgcagaacaacaacattccgcgcatcaagggcattatagagcgcttgtgtctgcatttcggcgagccgtttctttatcataacgagacccgctacgcattcccgacaccgaaaaaattggcctcctgcacgccggaagacctcgctccgctgcgcgcgggctttcgcgcgaaatatctcattgatgccgcaaagcgcatcgcttccggcgagatcgatttagaagccgtgcgcaaaatgccgcttcccgatgccaaagcgaaattgcagacgatttcaggcgtcggcccaaaagttgcggactgcgctttgctctacggcctgcaccgcacggagtgtttcccgatggacgtgtggatgaagcgcgccgtattgcttttgccgaggctttcccccgcagatttcggtgaaaacgccggcatcgcgcagcagtacttattccactatgtgcgcatgcaccccgagcttttcaaataaataattcgtccgggatcggcggcaggtcatcgggtatcgccgccatacttctttttatgatcttcgccatttcttccggcgtttccgggcagccgtacaaaagccacttgcgcgtcacggcaaagtaccccgctttcacaaattcaaaatgatattccatacagtgctcgctctcgatgccgagccgccgaaaaaaaggcttaaagacgttttcaaacagcgtctgatagcctttttccagttctgccgtgccgaatttctcaaaatacgcccggtaaaaagtcctgtcgcgctttgcctcgcgcagcgtcgccgccacatatgcttcggagaagatattcgggtcgccgtgcatctcttcgtgtatccgctctacggactccgtccatttctcccctacgatctctgtcagcagcgcgggtatgtctgcatagtgcaggtaaaacgatgagcggttgatgcccgtcgcctcacaaatttcccgcacggaaatttgatttgtttttttattgagcaccattttcgtaaacgccttgcggatgcgccggtcggtctccgcaaagcgctcgtttttctttgtgttcattttgccctccattaacacaacattcatcgtgttttagcggttgttttccaaatctccacgtgttatgcttgtattaacagaacaagtgttgactttatagtagcgcattgcaaacataaaatcaagggggaaattttcgtgaaaaccgaagaactttttgaacgcgcacccgtgtggaaatccattttcaagatgtgcctgcccaccgttgtcattatgctcgtcatgaccgtctacaacatggccgatatggtgttcgtcgggcaaaccggcatcgcggcacaggtcgccgccgtttcgctcgcgtcgccgttctttttatcgcagatgacgctcagcacgtggatcggcggaggcggctgcacggtcatctccgccgcactcggcgcaaaaaacaccgaaaaagccaaatccgcaagcgccgcatgtacgcttttaagccttgcttccggcgtcctgctcggcggcgcggcgctgctttttccaaacgccttcctgcacttttttggcgccgatgccgccacgtgggactacaccgcacaatacctgcaaattttagcccttggcacgcccgtcatcgtgttttccaatgcctttgcaaacctcgtccgtgcagagggtgccgtacagaccgccgtcctgctcaacatgctcggcactgtcgccaatattatacttgacccgcttttcatctccggtctgaacctcggcgtacagggcgcggccattgcgaccgtccttggtaatattttcaccgcctgcggcctgcttttctatctccgccgccgcgataccattttgacgctcaacatgcgcaaagcattccacatgccgcatgtcttccgtgaaatttttacgctcggcattccgggctctgtcagcaaccttctgatgagcgccgtcaacaccatcacaaatcgcattgtcatcgcctatggggccgatactgtcgccgaaatgggcgcgggcggcaaagcgggcatgatcgtcgccatggtcgtcatggccattgccctcggcgtgcagcccatgttcgcatatctttacggcgcgggcaacaccgcccgcctgcgcgagaccttccgcaaaagcggcattttggcggtctctctcggcatcgtgttaagcgtcgtctgcttcattttccgctttcctatctgcggcctgttcttaaaggacgaagctctcgtcgcttccgccgcgcacatcacggcgctcggcctcctcggcatgccgcttatcggtgtgtattatcttgcggtcaactacctccagtccgtcggcaaagcggcgcaggcttccgtgctttccgttctgcggcagggcgccgtttatgtaccgcttctgctttcgctccatggtctgttcggtcttttcggtgtgttttacgccgcacccgccgccgatattttctccacacttttagccgtcttcctcctttaccgcgccataaagaaagatctcgtctccgcaaagccgcattcgcccgcaaaagccaaaaataccttctaaaaatcaactgaattttcatattctgtccatgactttttccctcgcttctgttatactttaatatagaaactaacgcagtataaggagacggtacgatgggcgcatttgtagagtttgaaaatgtatcgaaaatttataaaaccggcgacgtagaggtgcacgccttaaccgatgcaagctttgaaattcaaaagggcgaattctgcgtcatcgtcggtgaatccggcgcgggaaaaacgacgcttttaaatatcctcggcggcatggatacgctgtctaaaggcaccgtccgcatggacggacgcgacatcagccactttaaccgcacccagcttgaaaactatcgacgctatgacatcggctttgtcttccagttttataaccttatcccgaatttaacggcgctcgaaaacgtggaaattgcggcacagctgtgcaccgatgccatccccgccgaagacgtgctccgcgccgtcggtctccatgaccgcatgcagaactttcccgcacagctctcgggcggtgaacagcagcgtgtttccattgcccgcgcacttgccaaaaaaccgaagctccttctgtgcgacgagcccaccggcgcactcgattacgagaccggcaaatctattttaaagcttttgcaggatacctgccgccgcgacggcatgaccgtcgtcatcatcacgcacaatgcggcgcttgccgccatggcagaccgcatcatccgcgtaaaaagcggccacatctactccgttcgcatgaacgagcacatcacgcccgtggaacagattgaatggtaacgcgaagggagccggaaaacgcatgacaaaagcactcagaaaaaacacgcggcgcagcatttcgggcagccttgggcggtatatcgctatcctgctcatcattatgctgggtgtggcgtttctcacgggtctgcgagatacccgtcccatcatgtccgccaccgagaccgcctatgtgaaaaatacgaaactctacgatcttcgcctcatctccaccatcggctttgatgcggacgacgttgccgccgtgcagaaagccgacggtgtggttgccgccgcaggcagtgtgaatgccgatttcatctggcagcacgacaacaaagagcgcgtttaccgtgcacatatgctgacagataacatcaacgagcctgtgctcactgccggacgtatgcctgaaaacggcagtgagtgccttatagattccagtcgcttttcggaagacatgattggacaaacgatcgaaatttccgactccaacgacgaagatacaaagaaaaacttcaaatacagcacctacaccgtggtcggccttgcagattctccgctgtacatccacacgctgcgcggcaccacgtcgcttggcgacggcacgctgcagggcttcgttctcatcccggaggacggcttcgatttcgagtattacacagaattatacgttacctgcaccgatgaattcccgctatacagcgacgattacgacgattacatcgatacgttctccgatactgtcgaagccgccgccaccgcttccgtcaacgcgcgttttgatcgcctcacgtccgacggcaaagccgaaatttcagacgccgagaacgaactgaacgacaaaaaagccgaagccgaaacggagcttgccgacgccaaagcacagcttgacgatgcaaaagagaccatcacctccggcgaagcggagcttgccgacgcgaaaaagcaattggacgatgccaaagcagagttggatgcaggcgcggagcagattcagcccggcttcacttcgtgggaaagcgccctgcaaagcggctttgacgcatattacagcggcaagcagcaattagaggatgcccttgcggagagtcaggcgcagatcgacgccggttacgcgcagctgcaggaaaacgaaaagctctacactgaaaaatatgccgaattcacgtccggcaaagagcagtatgaagcgggtcttgccgccgcaaaggacgcccgcacacaaatcgacgccgcacgcgccgacttaaacgagaaaaaagcgcagctcacggcgggctttgccgcactcgacgaagcgcaggcgcagcttgatgccgtaaaagatacgctcgacccggcagaagccgaagcgcagcaaacggcgcttgatacgcagcgcgccgctttgaatcaaaatcaggcgcagctcgacgatgccgaagccgtattaaacgaacaggatgccgccctcaccgcgcaggaagcgcagctcacagagaccggcaagcagctcgatgaagccgaaaccgctctctcgcaaatgcgcacgctgctcgatgtcggccaaaacgattacaccgacggcatagcacaacttgaatatcagaaaaaaacgcaaaccgcaaagcttgacgaagcgtataactcgctcatcacgtttcaaaacggcatcaaagagtacaacgagggcctctcttcgtacaacgacggcgtaaaagagctcgcagacggcaaagccgaatacgaagacggccttaaagactacgaggacggcaaaaaggaatttgacgagcaaatttccgacgccgaacagaaaatcgccgacgccaaacaagagctcgccgatttaaaaaagccggagctctacgttttaacgcgcgacacaaacgccggctacgtctcgtttgaaagcgactccaccatcgtcgaaaagctctcggggctcttccccattttcttcttcctcatcgcggcgctcgtctgctccaccaccatgacccgtatgatcgacgatgaacgcacgcagatcggcacgctccgcgcgctcggatacagccgcggctccatcctcgcaaaatatctgctctattccggaagcgccgccgcactcggctgtgtcatcggctattttgcgggcggctatatcttcccgttcgtcatctggacggcctacggcatgctgtatcgcattccgggtttcgtcatactgtatgaccccgtgctgtttgtcatcgcgcttgcggcgtcacttttgtgctctgcgggcaccacatatttagccctgcgcatcgagatgcagaacatgcccgcaaacctcatccgcccgaagaccccggccgtcggcaagcgcatttttctcgagcgcatcacgccgctgtggaagcgcctgaaattcctgcacaaggtctccctgcgcaacattttccgctttaaaaagcgcatgattatgatgattctcggcattgccggctgcaccgcgctggtgctcaccggcttcggtatccatgattccgtcgcgaacattgcaaacttccagtttgatgatattcaaaaatacgatgtcagcgcccagttctccgatacgctgaccgaagataaaatcaacgaagtcgaaagcgaccacaaatcggagcttgatgccgccaccgccgtgcaaatgacctccggtgacgtcacaggcgacagcatcacaaaatccgcttacattgtcgcgtccgacgaccccgccatcaccgacattttcgatctgcatatcgacggcgagaccgtcccctaccccggcaaaggcgaagtgctgctcaccgaaaaactcgccgagctcaccgatatcaaaaccggcgataccgtcaccgtctccgtttcggacacggaaaaagccgagctcaaggtcgcgggtttagttgaaaactacgtgcaaaattacctctacatgacaggagaaacgtacgccatggtcgccgataagggctacgagccgaaaacgctcctgctgcgcgtaaacgacagcgcagacgaatatgcgctttccgccgcactctccaaaacggacggcgtatcctccgtttccgtcgtcaccgatacgcgcaatatgatcgaccaaatgatgcagagcctaaactatgtcgtcgcgctcgtgctcatttccgccggcgcactcgcgttcatcgtcctgtttaacctcggcaacatcaatctgaccgaacgcgtcagggaaattgccaccatcaaggtgctcggcttccattccagggaaaccggcgcgtatgtgttccgtgaaaatatcattttgtccatgatgggcatcgtcgtcggcctgccgctcggcgttctgctgcacacatttgtgctcatgcagatccgcgtcgatatggtctctttcaaagctgtcatcgcacccgtcagcttccttttgaccgttgtcatggtcgtgctgttcacggttatcaccgacctcgtcatgcgcaagaaaatcgccaaaatcgatatggcggaatccttaaaatcgatcgaataaacaaaagctctgccgcaccccgttgccgcagagcttttgttgtgccataatccaaacgataaataaagttggtcgcgtttcgccgaaattcaagaccgccacggacgacctgtgctgcttcatgagccttatcgcaaccatgctttttaaagacacccacaccttcggcacgtttattcagacatggggcatgaacttcccgtgcgccgtgctgtggcaaatgttttactgtggcccgctcgtccgcctgatttttcgtttgattttcagggaaaagaaaagtaaataagcatagaaaaaattctccctcggctccacagccaaaggagaattttctttatcccggcaaaatttccgccaaaatcgcgttggagaccaaaaagccctccgcagtcagcgaaattcgctcgtaatctgcatgtatcagatttttcggcaagtgcttacaaccttccagaaccccgtcaaacagcgcaccgccgttttcaaatcgtgtctcgcaaatctttctttgcagcccctcggtcagccgaagcgacagcatcgcaaattccgaaaaaccgccgcccgcgccgtcgtctgtgggcgcattgccgtttaaaaagccctctaaatcgcgtgggaaataaaatcgcctgccctccataaaggagtgcgccgcgggaccgagtcccaaatattccccgcaccgccaatactgcaaattgtgtcggctctctttgcccggccgcgcaaaattgctgatctcatactggtcgtacccgcgctttttaagctcgtttacggcaaacaaatactggtctgccgtgccgtcctcatcgggcagattaagctcttgctttgcaaacggcgtgccgggctctatctttaaaatatacgcggaaacatggtcggcctcgagtgccgcgcaaaaatcgatcgagcttttcagtgtctccaagctcgagttcggcaggccgagcatcaaatcgaccgaaacattgtcgatgcccgcttctctcgccgctttcaccgcttcccgcacggtttccgccgtgtgcctgcggccgagaattttcaattccgcctcgtttgcggactgcatacccattgaaatacggttgaacccgccgcgtttcagcgtttcaaaaaatgaaacgtctacatccgccggattgcactccgtcgtgatttccgcgttttcggcaacattaaactgctctttcactttttcgagcacgcggcacagtcttttcgcaccgaacacactcggcgtaccgccgccaaaatataccgtatgcaacagccgttcgccgtatttttcaccgtacactgcaagccgcgcacacagcgccgccaaatagcagtcaaatacgtcgtcttcttccggccgcgcggagtagaaatcgcaatacgggcacttgcttttgcaaaacggaatgtggatatacagcgaaaccggtttattcatcgagcttcagaaccgccataaacgcctcctgcggtacttctaccgtgcccagctgacgcatgcgcttcttgccttccttctgtttttccagcagcttctttttacgggtgatgtcaccgccgtagcacttcgccaaaacgtccttgcgcatcgctttaacggtctcacgcgcgatgattttgccgccgatgcacgcctgcaccggcacctcaaacaactggcgcggaattttctccttcagtttttccaccatcttgcgggcgcgcgggtacgccttttccgcgtggatgataaacgaaagcgcgtccaccacttcgccgttcagcataatatccagcttcacaagctcgctcttgcggtagccgatgagctcatagtcaaacgacgcatagccgcgcgtgcgggatttcagcgcgtcgaagaaatcgtagataatttcattgagcggcagctcatagtgaatatccacacggtcggtgtcaatgtatttcatatccttgaaaataccgcgtctgtcctgacaaagctccatgatgttacccacaaattctgtcggggagtaaatgtgcgcgtttgtaatcggctcctccgccagtgcaatgtgcgagggatcagggtaattcgtcgggttatcgatggaaagctttgtgccgtccgtctttgtaatgtggtacacaacgctcggcgcggttgtgatgaggtcaaggttatattctctctccagacgctcctgaataatctccatgtgcagcagtcccaaaaagccgcagcggaagccgaagccgagggccacggaggtctccggctcaaacgtcagcgccgcgtcgttcagctgcaatttttcgagtgcatctctaaggtctgcatagtgtgcaccgtctgccgggtacacgccacagaaaaccatcggctgcaccgcacggtaaccgggcagcggctctgccgccggtctgtccgccagcgtaatggtgtcgcccacgcgcgcctcgcgcacgtttttgatcgatgccgtaatgtagccgacttcgcccgcggaaaggctctttgcgggctccaaagacgtcgcgcgcagaatgccgcactccaccacggtgaactcactgcccaccgccatcatgcggatggtgtcgccggggtgcaccgttccctctttaatacgcacatacgcgataacgccgcggtatgcgtcatagtaggagtcgaaaatcagtgcgcgcagcggcatgtccgggtcgccctgcggtgcgggaatatccgttacgattttctccataacggctttgatgttgaggcccgttttcgcgctgatgcgcggcgcgtcctctgccggaataccgatgacatcctcaatctccgccgcaaccttgtccgggtccgcggaaatcagatcgatcttgttcaataccggtacgacctcaaggcctgcgtccaccgcaaggtacgtgtttgcaagcgtctgcgcctcaatgccctgagaagcgtccaccaccagcaccgcgccctcacaggccgcaagtgagcgggaaacctcgtagttaaagtccacgtgacccggggtatcgataaggttgaacgtatatgcctcgccgtcgttcgcgcggtagacgagcgtcacagcatgcgccttgatggtgatgccgcgctcgcgctccagatccatgttgtcgaggatctggtcttccatgtcgcgcttcgcgactgcctcggtctgctccaaaatgcggtcggcaagcgtgcttttgccgtggtcaatatgtgcaatgatgctgaaattgcgaattttactctgttccaagcgtgattctcctctttagaagtatacatggttaagtatagcattttcgcggcgtttgcgcaatgactgcttttgaaaaagtccgcattttaaggtgcttcacaccttgcgcttttctgcctaaacgtggtatcatagaaaagacaaaaccacgcgtatacgtggttccataaggagaaccgatatgccgagattttttacatctgccgtgcagtttgacgaagccgcgtccgtaggctctgccgtcatagacggtgaagacggccgccacatcgcccgctcactgcgcatgcacacgggcgacgccctcacgctttcggacggtgccggcaccgactacacaggcgaaattgaaagcatcacgggcgataccgtcatggtgcgccttaccgataagtttaaaaacagaagcgagtccaccctgcgcgtcacgctgtaccccggtatgccgaaggccgataaactggagctcatcacgcaaaaagccgtggagctcggcgtcacgaagattgtgcccgttttaacctcccgcagcgtttcccgaccggatgcaaaatccgtttcaaaaaagcaagagcgtttgcagcgcatcgcgcttgaagccgcaaagcagagcggccgcggcatcatcccggaaatcggtaaaatgaccgatttagaatccgcgctcagaaccgcacccggcaaaaagattttattctacgaaggcggcggcgaagcgctcggcacgctcgtctcccccgatgaggccgaagtttccgtcttcatcggcccggagggcggctttgacgctgccgaagtgcagctcgctaaacaatacggcgctgcacccgccacactcggcccacgcattttaagaacagaaactgcaccgcttgcggcgcttgccgttttaatgtacatcacggggaatatgcaatgaaaacagttttagtcaccggcgcgtcgggtgagatcggcgctgccatcgcaaaagaattcgccgccgcaggttacgccctcgcgctccacggcgcaaagcacattgaaaatgtaaatcaacttgccgaaactttcaaatcaaacggcatcgaagcctatcccgtctgcggcgacctttccgaccccaccgcatgtgaacacgtatgggcggacaccgaaaaaaaactcgggcatattgacgttctcgtcaacgccgccggcatctcgctcgtcgattttttcgacaccatgacgcccgcacagtggaaaactttgtgcgacacgaatctgtcctccgccgtttacctctctcaatgcgcgtcccgctccatgatccgccaaaaatccggcgctatcgtcaatgtctcgtccatttggggcgtgagcggcgcggcaatggaagtcgcatattccgccgccaaggccggtatgctcgggctcacccgcgcactggccttggagctcgccccgtcgaacatcaccgtcaatgccgtcgcacccggctatatcgataccaaaatgaatgcccatttgtccgaagacgagaaaaaagcgctgtgcgaggagattcccctcgggcgcgcaggcaccccggcagaggtcgccgcaggcgtcagatttttagccgaaagcccgtacatcaccggtgaaacgctcgtcatttcgggcggctggcgttaaggagaatatttaccatgtccaaacaaatcgatgcttattccttcgcactcggcgtgtgcgaggcattctgcgaggtcgtccgtgccgacgtaaagcgcatcgcgctcagtcacccgttcacagaagacgaacttcaaaacgcactcggcgcagattttctccccgcgtgtgaagcagttgcccgaaagtacggctgcaaagcgtattatttaaaagaaccgctcatcaccgaccttttcccggtctcgttgaaccgcggcaagcaaaatgtcgttttctaccgcgaagaccgtgaccttaaagaatttttgagcattcaacacgataaacaaaccctcatcgccgaaaacaactatacgggcgaaaaccgccgccaaatcgccgtgcgttacgggcatctgctctcgtacagcgacgaagccatcgcccgctatttatcgcaaaatacagaactcgagtaatcaaaggagcacccctatgtccatgaccattaacaaagagctgccgaacccggcggccctcaaagccgaatttcccgtcccggagcacatcaaagaaatcaaagccgcgcgcgataaagagattgccgccgtgttccgcggagagtccgataaatttctcgtcatcgtcggcccctgctcggcggataacgaagaaagcgtctgcgaatacacccgtcgccttgcccgtgtgaacgagcaggtaaaagacctcctcattctcattccacgcatctacaccaataagccccgcaccacgggcgagggctacaagggcatgctgcaccagccggaccccgataaagcccctgacctgctcggcggcatcatcgccatccgcaaaatgcacatgcgcgccattgaggagaccggcctcacatgcgcagacgaaatgctgtaccccgaaaaccgcagctatttggatgaccttctgtcctacgaagccatcggcgcgcgctcggtcgaaaaccagcagcaccgtctgactgcaagctccatggatatccccgccggcatgaaaaaccccacctccggcgatctttccgtcatgatgaactccatcaaagccgcccaaagcgcgcacaacttcatctatcgcgggtgcgacgtcaccactaccggcaacccgctcgcccacgctattttgcgcggcggcgttgataaatacggcacaactatcccgaactaccactacgaggatttaaaacgtctcgcttccctctacgaagaaagcgggctcgaaaatcccgcctgcgtcgtggatgtcaaccactcgaattccggcaaaaagttcaaagagcagatccgcatcgtcagcgaggtgctgcacagccgttcctacgaccccgccatacacaaactcgtcaagggcgtcatgattgaaagctacctcttcgagggcgcgcagaaaatttgcccggagatgatccacggcaaatccatcacagacccctgtctcggctgggaagacaccgaaaagctgctttacagcatcgcggaaaaagcgtaaagggagttgtaagatgaaactgtacgtcacacgccacggcgaaacacccatgaacgctgcacaccgcgtctgcggcctcacgaacatcgacctcaccgaaaaaggcatcgcgcaggcaaaagaagccgggcgcagcctccaagataaaggcatcaagcgcatcatcgcctccccgctcctgcgcgcccaacacaccgcaaggctcatcgcagacgagatcggcatagataccatcgagaccgaacagcggctcatcgagcaaaactacggcatctacgaaaataccgactgggacggcgaagcgttcaacgcaaataagcgcgagttcgccgtacgctaccccggcggcgaatccatgctggatttagccggtcggctctacccgcttttaaacaagctgaaagccgaaaacggccccaccacgctcctcgtctgccacggcggcatctgccgcatgatccgcacctacttcttagatgtcaaaaacaccgactatgccgccttcaagcttccaaactgcggcatcatggagtttgatctgtaaaaaaagcatctcggcttagccgagatgctttttgctttacgcttccgtcgtagtgccatgctgcgggtcgtgctcgcgtttgatgcagcggtcaagccacttgcctcgcaaataataaataacaaagatcaccgccgtgatgacccatgataccgggtagttcatcgcgaccatctgcatcgtgtgccaatatggaaccataagcaatatccacacgacgcgcagaccgcatacgccgatgcaggtgataagcatcggctgcaaagcctcgccagcaccgcgaatcgcgccggacaaaatctcgataaaaacaaacgtaaagtaagacggcgccaataccaaacagaactgcgcaccgatatttacaacctccgcatcgcccgtaaagaacatcaaaagctgatagcggaaaataaacagcagcgcggaaagcgcgatgatcgtaccaaggcacatgctaaggcccacacgcgtgcagcgcttcatgcggtcatattggcgtgcgccgaaattctgcccggcaaatgtcgtcaccgcaatgccaaacgcgttcatcaccatccagataaagccgtcaatcttgccgatggccgcccaggccgcgatagccgtcgtgccaaagctgttgatgctcgcctgaatgaggatattcgagaatgaatacatcacagactgcaagccggccggcaagccgatgcggaccacattctttagaatgtccttgtgaaagcgaattttgcgcagttccacacggtatgcttcctgcgtgcccatcaggcggatcatcaaaagcacggcgctgatcagctgcgataaaaccgtcgcaaacgctacaccgaacacaccccagtgaaacaccaccacgaacaataaatcgagtaccacgtttgcaaggcagcacacaatcaaaacgtacagcggcatacggctgtcgccgatggcgcgcagaacacctgtgccgatattataaatcaggttgccgatgatgccaagataatatacgttcatgtacaaaaccgcgtcatccatgatgtcgtccggcacacccatcgccagcattgtcgggcgcgccgtcacaatgccgatgaccataatgacaacgccgcccgccaccgccagcgccatggacgtgtggacagatttagaaagattttcgcggtcgtttgcgccgaaatattgcgaaataatgaccgtcgcgccggaagctacgccgacaaaaaagcctacaagcaggttgatgaccgtgcccgtcgtgcccacagccgccaacgcctcggtgccgacaaactgaccgacaatgatcgtgtcaaccgtgttatacaactgctgaaaaaaagtgccgatcaagatcggaaagaagaaaagcaaaagctgtttccaaataacaccttccgtgatcccgttttttgttttttccaaacgtcctccccctttgataccctataacgcctattcttaaaccgcgctctaaacacgcatacgcccattctaacaccttttctcccatttttcaagcggttacaaaaataaaagtacgaaataggattttaatttgacatctccggagatagcagcacccgtttcccggcgcgtatatttcaatcctaccgtatgcaaagcttttcgcgcgtggtccatcgaaaattccgccgccggaaagctgttcggtaaacggaacgacaacggcagcctttttagctactaaaaagcgcccgcagggtcaaaccttgcaggcgctttcactttactcttctttactccacatacgtaacggggaatttcttctctttcacaggcgtttctgctgccgcataaccgatggccgcaatgccgaataccttgtggttctccggcacgccgaactccgtcaaaacggcgcgcacctcgggcacgtcgcacgtgtcggaaagctggttgatccacacggtaccaagccccatggaatgcgccgcgaggaagatattttcaagcgcgcaggcattgtcccatgaagtgatacccgtgtcgccaatcagctcgttcgacggaatgataagcgcggcgggcttatacatgtcgtacttctcgttgccgagcgccttgcccacagccaccgcaagcttcgcgattttctcgcgatttaaaacagcagaaaaatgccatgtctggcggttcatcgcgctcggtgcatgcacagcgcactgcaaaagcgtatcgatcttttctctctccaccgggcggtcgtcatacgcgcggacactgcagcgggtcaaaatgttctgaatcacttcattcgtcataaaaacgcttcctctctttgatttttcgggtatgtacccttatttttaagcggtcatccgcttattgactcaaaatttttccgccaaaagcgcggcgattttctctaaaaaagcctcatcttctgcggtaaagcgattttcaaacgggctgtccacatccaaaacagcatagacttttccgtctttcatcaccggcaccacaatctccgcacggctcgcgctgtcgcaggcaatatgccccgggaacgcgtgcacgtccgctacgcgcagcgttttcttctccgcaagcgctgtgccgcacacaccgcgccccgctttgatgcggatgcacgccggtttaccctgaaacggccccaacagcaaatcaccgtccagctgcaccgtgtagaagcccacccagttgatgcttttcagtgttagattcaacagtgccgaaaggttcgccatgttcggcacaagctccggctcgtcttcaataagtgctttcgcctgcaaaacgacgtcttcatacgtcccgctgccttgaagctcaaaactcattttttatactccttgtaaacaaagcgttgacttcatcgtgtgcattttcgcctttatacaacacattgtatactgcgcggcaaatcggtaaatcggctgaaaccgtcttgccaaggcgcaaaagcgcgtccacggcgtaatagccttccgccaaatcggtgtacggctcgtttttcacaaacttctcgccgaacatgcggttgtgcgaatacggcgaaaacagcgtcgcttcgtaatcgccgaggtgacaaagcccgtaagccgaaagctcgttgccgcctaaagcgtcaatcagccgcgcaatctcacgcgtgccgcgcgccatcaaagcgccttttaacgtcgaaagcccaaggccgtccagcataccggcggcaatgccgacgacattcttcgccgccgcaccgatctcattgccgatgaggtcctgcccgtagtaaaagcgaatgaggtcgctgccgaatgattccaccagcgtcttttttgcgtcttcgctgtcgctgtcaatgaccatgcagttcggcacaccggccgcaaactcctgtacatggccgggaccaacccaaacggcgaccgcgtttgagttgtcacactccgcggcacacacctgggaaagccgcatgccggtttcaatctccacgcctttcatgcacagcacgaaaattttatttttcagttcaaacggctgaagctcgcgcatcaggccgcgcaggccctgcgagttgacggagattacaatcacgtcgctgtctttcacagcgtccaaagaatttgtcaaatgtaaggtttcgggcagctctacaagcccgttcgtacgggtttcgatgagcttttgcatgtgggcagagcttttccgcccgtaaagggaaacactgtggccgatcttatcgaggtaccacgcgataaacgtgccccaacggccgcagccgataacggtaattttcatagggaatgctaaggtccttccaaaggggtaatgtaagcgcgaaattcaaatcacagctctgtaaataaatcttttgcgtctttggcgtaaatgatgccggaaacgacggcgagcaaggttgcaatcgccatcacgacaaaattcacccatgtaaatatcggagaaagcgtctccgtcggcaaagccaaaatgccgtatgcgccaaggtcaagaatgtactgcgtcaacagcacgatgcagattgcgacaatctgcgacacggttttcgccttgccccagttgttcgccgggatcaccctgccctgctccaccgcaataaggcggatggacgtcacggcaaattcgcggaccataataaggagcacaaatgccgtgttcgtcatgccgttcgccacaaagcagacaagcgccgacatcaccatgatcttatcggccaaggggtccatcagcttgccgaaatttgtgatgaggtgatcgcgccgcgcgattttgccgtccaagtggtcagtgtacgacgcaatgccgaaaattgccagcgccactaaattgtggtgcgggaatatgtcgccggaaagcagcatgaaaagcacaaaaaacggtactaagatgatgcgcagtatcgtcagtttattcggtaaattcatagcggttctcccgtttagacgcgcgtaccgaacaggtcgccgtcaatggcctcgtccacgtgcaccgttaccatttcaccgtagtacggcttcgtttccgcagagaaaaacaccttgccgtcaatgtccggcgcgtccatggcgctgcggccgaaccagcattcggcgtagcggtcaaagccctccgtcaacacggtgatgtcccccccaacctgcttttcgccaaggcggtccataatgttcatctgtgattccatgatgatctccgcgcggtgattcttcacctcgtcgtcgatctggtcgggcatcaaagccgccggcgtgccctcctcctgcgagtaggcaaagcagccgaggcgctcaaattcaatgtctttcacaaattccgcaagctcggtgaattcctcctccgtctcgcccgggaaacccgtaataagcgttgtgcgcagcgtcacgcccggaatcttctcgcggatcttcttcatcagcgccgtcaggctctcacggtcgccggtgcggttcatgcgctttaaaacgcgtgcggaagcgtgctgcagcggcagatcgatatactttacaatcttctcttcctccgccatcgtctccaaaagctcgtccgtcaaagcgtccgggtaacaatagagcacgcgcagccacttgaggccgtcaattttgcacaggcggcgcatcagctttgcaagggaatattcgccgtacaggtcaatgccgtagcgggtcgtatcctgcgcaatgaggatgagctccttcgcgccgttttcaacgagaccgcgcgcttcttcctcaatgctctccatcgtgcggctgcggtagccgccgcgaatcatcggaatcgcgcagtaagtacatttattgtcgcagccctctgcaatcttgatatacgcaaaatagctcggggtcgaaagctcgcgctcgccgcacagcggcattttgctcttttcaggaaagctctccgtaaaatcattcattgcactttcaatgcacgccgcaatgtccgcgttcgcgccgatgccgaacacgccgtccacctcgggcagctctttgtgaatttcctcgcggtagcgctccgcaagacatcccgtcaccacaatcttcttgatgcggccctctcttttcagcgtcgcaagctccagaatttcatcgatggattcctgcttcgcgctgtcgataaagccgcaggtattcacgattgcaacgtctgcaagcgcagcgtcatcgcacagctcaaagcccgcgtttttcaggttcgccatcagcatttcgccgtccacctggtttttggcacagccaaggctgaccattcccactttaattgccatgtatataaccctttctcgatgcatatccaaactttagacatgcccttatataatttctgttctgccgctacctattttagcagaaaacgagcggcttttcaatcgaaatgccgcccgttcacaaaaatcatacaattatacgcgcagaaacacgcttgccgcccggaaatcatgctttttttgcacaccctgtccgtctcgcgcaacgcacaaaacggccctgcaaccaaagcagcgccgttttacggtcattcttctgaatttaagacagagaagatctcgtcgaaaccgtagccgtaacgctgcaaggcggctacggcacggcggcgcactttttcgtcttcgcgcgccatgggatactttcgctccaaaatggcgcggatgttttcctctgtttccgaacgttctgtggaaaactcgtccatcaccgcggcaatgagcgcgtcgtcaatgcccttttggcgcagctcttgctttacgcggcgcgcgccgaattttttgcgtgtgaaaagctcgtttgcaaggcggcgggcgtagtcctcgtcatttagtaagcccagctcttccatgtgctccacggcgcttcgggcagcctcgcggtcaaattccgcgcgggtgatcttattttccagctcttttttggagtgggcacggtgctccaaaaggtacagtgccttttcctcggcgcggtgctttgcggaggcctgcaaaagcgcgtgcagttcctcatcgtcgagctcgtcgccgatggcaatgccgcggcgcaaaagcgtttccgtgtccaccttcaccgccgcttcgccgtcaatataaagctgtgagagcctgtggcggcgcggggcgatatccgtaatcttcattattcgtcgtcatcgaccgtgatgtcgatgtctgcctgcacattcttacgggtgttctccgcctgctcgggggattcttcctcctcggccttttcaacgggcttcggcgcactgccgcccttgatggattttgcgtagagcttatccgcgttctgacggacgagctcggaaatttcctcaaaaatatccgggttgtcgcgcaggaagttcttcgcattgtcgcggccctgaccgatacgcgtgccgttgtaggagaaccacgcgccactcttctgcacgatctcgagcctttcggcaaggtcaagcaggtcgccgaccttcgagatgccctgtccgtacatgatgtcgaattcgacctcacggaacggcggcgcaaccttgtttttcacaaccttgacctttgtgcgggagccgatgatgtcggtaccgctcttcaaaacctccttcttgcgcacatcgagacgtacggaggagtagaatttcagcgcgcggccgcccggtgtgacctccggattgccgtagacaacgccgactttttcgcgcagctggttgatgaaaatggcgacgcagtttgacttcgagatggcaccggcaagctttcttaatgcctgtgacatcaaacgcgcctgcaagccgacatggctgtcgcccatttcgccctcgatctccgcgcgcggaacgagcgccgccacggagtccacaacgataacatcgatggcgttggagcgcacgagcgcctcggtgatctcgagcgcctgttcgccggtatccggctgcgaaacgagcagagaatccacgtctacgccgagcgcggacgcatagaccgggtcaagtgcgtgctccacgtcgataaacgccgcgttgccgcccattttctggccttcggcgacgcagtggagcgccaaggtggtcttaccggaggattccggcccgtagatctcaatgattctgccgcgcggcagaccgccgataccgagcgcgaggtccagcgaaagagagccggtggagatcgcatccacgtgcatgccgttgttctggccaaggcgcatgacagcgccctcgccgaactgctttttaatctgcgtcaacgcagtctcaagcgctttgcgcttgtcttcgggcttgatgtcctccacttttttgcttacggggcttttattttccttcgccatggttatatcctcacttcttttgaaatttgggttatggttcctgattgattgtgtttccgtcgagcgtggttaaagttttcgccaacctttttcaaaaggctgcggtttccaaaggtgaaaccctttttttactgcctctattatactaaattcgccgaaaaaaagcaacggttttctcgaacatattttcttttcttgctgaggtgagcgaaaaagcgacagttaagaggacatcacaggacatcggcggacatctttttgcgcaaaaagggcagaaccccggagaaaaccggaactctgccccttttttagcttatgtagaaattacagaccgagcagttcggttgccgctttctccatttttgcgatgatctcatcggactctgcggcggttttacccttgccggagaggtagattttgatcttcggctctgtgccggacgggcggacgatgagcttgctgccgttctccagacgatactcgagcacgttggacttcggaagcgtgatctccgtcttctccgcgccctctgtgcgcacggaaagctgatagtcgctgtcgccgacgaccttgaagccggcaatctctgccggagcgttgtggcgcagatgatccatgatggaattcatcttcttcatgccgtcttcgccctcaaacgcgaagttgcacagggcgttcttgtagtagccatacttttcgtacagaacattgatggcatcgacgagcgtcatgcccttttctttgtagtaggaagccatttcgcagatgatcatgctgccgtccacggcgtccttatcgcgcacatagccgccggagaggtagccgtagctctcttcaaagccgagcaggtagcgctccgggtggccttcgctctcaagcaaagcgatctggtcgccgatatacttgaagccggtgagggtacggcgaatttcaatgccgtaatccttcgcgatgccgttgaccatatcggtggaaacaatcgtcgtgaccgcgaccgggtccttcggcatggtgccgagctccgttttgcactgtgcaataaagttcaagagcagaatgcccacttcgttgccggtcatgagcacatactcgccgtgctggttgacggcgatgcctacgcggtcacagtccggatcggtcgcgagcagcaggtcgggctttacggtcttgcagagatcaaggcccttctggagtgcttcgcggatttccggattcgggtacgggcaggtggggaagttgccgtccggctcgctctgctccggcacaacggtgatatccttcacgccgatgcggtcgaggatgcgcagcacgcacattttgccgctgccgttgagcggggtgtagacgagcttgaggttatccgccggtttaccgaggatgctcacgccgtaaaccgcatcgatgaacgcgttgacggtctcttcgccaatatattccgccttgccggaagcgagcgcctcctcaaacgggattttcttcacatccgcgaaaatatcgagcgcttcgatctccgccataatgccgtctgccatgccttccgttacctgacaaccgtcgttgccgtaggccttatagccgttgtactttgccgggttgtggcttgcggtaacgcagatgcctgcatcacagtgcaggtgacgcacagcgaaggacagcgccggggtcggcatgagttgcgggtagaggtacgccttaatgccgtttgcggcgagcactgctgcggactctttggagaacagcacgcccttgttgcggctgtcgtgtgcaatggcaacggaaaggggcttaccctccgtgttgtgcttattcaggtagtttgcaaggccctgtgtcgccttgcgcaccgtgtagacgttcatgcgattcgtgcctgcgccaatgacaccgcgaagaccgccggtgccgaaggcaaggtctctgtaaaaacggtcgtttatctcctcgggctgatccttaacggaaagcagctcttctttcaagtcgggatcgtccagttcgacgctaagccatctttcatactcggtcatactctattcttccttccatggtttaaattttcggcagtgcgaaaaaacgtatctgccttatgttaaatgcggatgacccgcacctacacgctataattagattaccattttatctgtgcaatgtcaatgacaagttgcgtcgctccatgtcaatttatgtgtaaaatatttgttagtatcccggcaggcgaaatatcaaccagtccgcaggtcgcgcgaaagcccgagcaggagccggggtttaagatatacagtccgtcgtcgtaggtttcaagcgcctcatgcgtgtgaccaaacagcaaaagattcgcatccgcctcccttgcggcgcacacaacggtatagagccctgatttcacatggtaaaggtgcccgtgtgtgcagaaaattttggcgccgtcaaggtctacaatttcgcgtaccggcacatctgcgcagccgaggtcacagttgccgcgcacagagtaaaatgcgatattcgggaacagggcgcgcatcatttgaaaatcgttttgcccgtcgccgagaaaaatgacggcatccacgtctctgtgcttctcgagcgtttcacgcatatagagcggcatgccgtgggaatccgaaaaaaccagcagtttcatgaaaattctccttcttttgaatttaacgcagatgaggtctcattttttcgcgccgcgcataaactgtaaacggaagtttccctaaagggagggtttaccatgaacgaacgtgaaatgcaatcgcttttggctttggcggcgaaacggctgcacaccacgccggaagcgctgcgcgccgccgccgaaaacggcgatctgcagaacattacgggcggtcaaaataacgcggcggcttcgcagctaaaccgcgttttaagcgacccggaggccgcgaaaaagctgctttccacacccgccgcgcagaaactgtttgaggctctcggcggcaaaaaatagaaaggaggtgagcggcggtggaagacctggccgcagccgtacaatccattttaaacgacccgcaaagcatggcgcagctacagagcgtgatgaactcgcttggcatgaatccgccgcaagcccctgccccggctccgccgccggtgcagcaaaaaccggcggccgccgcaccgctcaatttgctgaacactctaaacaacagcgatccgatgacggcgatgcttttgcgcgccgcgccgcttttggcaagcgcgaaccacgaggatgactccacgcgattgcttgcggcgctgcgccctttgctcggcgaagcacggcagaaaaagctggatgaagcctcgaaaattttgaagctcttgcaccttttgccgcttttgaaagagagcggcgttttacagaatattctttgagaaaggcggggtaaaatgccgagtaacatgccggacacacgcgccgtggaagaagccttgcgccgcgcacgggaaatgcaggggcgctcggcgcatcacgcgccgcccccgccggaaaagccaacggaggaatcgccgcaggaaaatgcggaaacgtcaactgaaataccgaaggaatttcaggctgctccgaatagacctctttctcctctcgatacgctgctaaaagacaaggagcgcacgcttttgcttgcactcctccttttgctttacaacgaaggcggcagtgcggagcttttgttcgcgctcttttatctgcttatctgatctgaccgtcgccgcggatgatgaatttgtaggaaacgagctcatttaagcccatggggcccctggcgtgcagtttctgcgtggagatgccgatctccgcgccgagcccaagctcgccgccatccgtgaagcgcgtggacgcgtttacatagaccgccgccgcatcgacctgtgccgtgaaccgctccgccgcacggaggttctcggtgacgatgcattcgctgtggccggtagaatactgcgcaatgtgcgcgatggccgcgtcaaggctgtctacgacgcgcacagccagaatataatcgaggtattccgttgcccagtccgcttcggtcgcgggtttggcttcgggcagaagctcgcatgtgcgcttatcgccgcgcagctctacgtttttctctttgagcttatttgagatgacgggcagcgccgcttcggcaatgtccttgtgcaccaagatcgtttcgatggcgttgcagacggacggacgggaggttttcgcgttgaaaatgatattcgccgccatttcgatgtctgtgtctttatcgacatacacgtggcagttgccgacgccggtctcgatgaccggtaccttggcgttttccaccacggcgcggataagccctgcgccgccgcgcggaatgagcaaatcgaggtactccgtcatgcccatgagctccacgctggacgcgcgggaggtatcctgtacaagctgaacgctgtcacgcggaaggccggcggattctatcgcatcgcgcagaacctcggcgatggcattattggagcggaacgcttccttgccgccgcgcagaatgacggcactgcccgccataaggcacagcgcagccgcgtcgctcgtcacgttcggacgagcttcgtaaatgatgccgataacacccatcggcaccgtgattttttccactttaagccctttggggttcgtttcgccgcttaaaatgcggcccacgggatcgcgttgggcggatacgtcttccacaccctttgccatgccctcaatgcgggcaggcgtgagcgccaagcggtcgagcatagcttcgctcatgccgttttcttttgcggctttaaggtcttcttcgttcgcagcaagaatttctgcctgacgcgcgcgcagggcagctgcggcggcgtttaatgccatgcgcttattttcgcccgcggtgcgcagaacggcggcggctttttgggctgcggcacccattttttgaagttctgtcatacgcgttgtgttcctttctgtaaattacggcatgaacaccgtgccgatgtcctcgccgtcgaaaatgcggtagaggttctccggatcttcgccggagaggatatatgtcgggatatttgcacgccctgcaatctctgcggcgcgaattttcgtcgccatgccgcctgtaccgcgtgcggagcctgccccgcccgccatggcacgtacctcgtcgtcgatcttctcgatgacactgagacgctttgcgtcggggtaggccttcgggtttttgtcgtatacgccgtcgatgtccgttaagatcatcagcacgtctgcgttgatgatgcttgcgacgatggcggaaagcgtatcgttatcgccgaagttgcgaccctcgagctcatcgaccgcaacggtatcgttttcgttgacgatcggaatgacgttcatgtcgagcagctcacggaatgtattttccacgttgcggcggctgatgggctgcgaggtgacatctgccgtgagcaagacctgcgcgacgttctgatgatattcgccgaagaatttatcgtaggcaaacatcagctcgcactggccgatggcggcaagcgcctgctttttggcggtgtcgtccgggcgctccggcaatccgagcttgcccatgcctacgccaatggcgccggacgtaacgagcacgatgcgacggccgccgttttgcaggtcgcacagcgtgcggcagagcttatcgatgcggcgcaggttcattttgccgttttcgtatgtcaaagttgaggtgccgattttcaccacaacggtttttactgtatttaaatccatgattttatttgttttcactgcaaattcgcggcaaaaacgtcctttccctattctcttttctgctccattatacatggaaacaacgcaaaaagaaagcctttttgcaaaaactcaggcgttaaaaacgtctaagtcttcgccgtttacgaccttgcccgtgtagcccgcatcgcggatctcctgcaaaatgaggtcgctgcggcggcgcgtttcggcttcgacatcaatggcgttatcctgaatattcatgtggtaaatgcggtggtaggtgacgagcagcttcggctgcgcttttttcgcgacctcggctaagtccgtgctgagcgtatgcacctcgcggtgatatttctgccacttcggttcgcgcgcggcaatgccggcggcatactcgacctcgtgcagcagaatatcgcaatttttggccttttccgcgacgatgtcgagcggggcggtatcgccgctgatgacaacggtcttcccgtcttttgttgtgaacttatagccgtagctttcgagtgtgccgtggctgacggtgaacgcctccacggtaacacgctcgtcttcgtaaataacgcccggttcaatctccgtcgcttccaccttatagccgttttcgttcgcgcgctcaaagccgtgcaggcgaaaatcgatatcgaccgcataggcagagagcagatgctgcgccatatttcggattcccttcgggccgaagacccccagcggtttttcccgttccagcacccacggggtgaaaatgaggtccgcaaacccggcggtatggtcggtatgcaaatgcgtacagaacgcggtatcgagcagatcgggtctaagggcatcttcgccgcggcggtacgcttccgctgcgcgtcttacgacgccggggccaaaatcgacgaggtacgcatggccgtcaacaacgacggcggaagccgggccgctcgcccacgggcaggcgttcggtgttcccgtaccgagtaaaacaagtttcgtttccacgtttatcatgcctttcgtttggaacgtaagaatattcctaagtaatccgagcttcatggagctcgatcaaccatattccagatttttctctttgtatctcacctttacgtaatttaattttttctcatggacattatacattgttttatcaaataaaagaattgaaaggaacccgcgtattttgaaaatacgcaggccccttttgtgctttctatcagttttttatcttcatgtataaatccgacaatgccgtatcatcgaaagcaatatagcgaatttttccattttgcgaatcaaactgcacgcgcaatttgatctccattgtacatttcttcacctgtgtttgaacatttacatctactgttactatacacagcgttttatcttccatctgtacccgaatattttcaggacaaatagtcgcgccctcttctacgcacatgccatctagaagccagcttgtcattgacatgtttacaacttctttcaacccgtcttccgtaaaatcttcggcctgaaaacgactacgaatgaactcttctggattctcgtccaattttccattcacatagtctaccattttctccgtcggacaagtcaagagtgcgtctactgctcgctgcgctcgttcagccctttcatctaccgtgcatccagcaaacaaacagataataaaggtaacacatagcacaaagccatattttttgatcttgcaacaagtctcttttctcatattcaaaattctttcagaatcatggtctatttgtccaattaaatccttgccaatacgaattttgactagaggttaccctttcactttcataatagagagatgctccgcaagcataaatcggcgaataaaaccatgctcccggatgataatcataatgcgacagcattgcgtaataccccaaaccattcgtattgcttggctctctttgggacacgcacattaaattacaatacttgcattgatagataaaacctgtgctaagcaaaacggatccttgattaaaatctccacagcccgaatacaaaggctgagccattccatttgcgcacatattatgctttccgccacttgagcatgtaatctcataacagggcttaatttcatcaaattcggactgaaccgctgatgctgataccggcacaaaaatcaagacggacagcatcacaaaagcgagaagaaaagttgccaattttttaacagagcttctttttgttttcagttttttcatcaaaatcaccctttctgagaatatgttctggcttctacaatataacaataacaaattaattgctacttatcaatactttttagctaacagtttcaattttatctgctcaacttctgaattttaaaccttcacccaaagaacaaaatctttgtttgttgaaaaactcaattttcacttcatttaatagcggaaagttcaagcaggtgtcttgactaaaggcttttaaccattcatttacgtcagaaaacaaaaagggacaagccttcgcttgtcccccgttatcgaacttagtgtctgtcgtttctgtcgcggcgcggacgatctccacgcgggcggtcgctgcgctcacggcgcggctgcttctccggcaggacgttctccggcacggcaccgtcaaggtcgatcagcgcttcgcggcgggagaggttcagtctgcccttatcgtcgatttcaagcaccttgaccttcacaatatcgccgacattgacgacatccgtgacgttctccgtgcgcttgatgtcgagctgagagatatgcacaaggccttccttgcccggggcaatctccacaaacgcgccgaagtccatgattctcgtcacgcggccgctgtaataggagcccggctccgggtcgttgacgatggtatcgatgatgtccatagcgcggcggcacttttcaatgtctatgcccgcaacatagcagtggccgtcatcctcgatatcgatggtaacgtcgcactcggcgcagatcttctgaatgaccttgccgccggagccgatgacctcgcggatcttatcgaccggcacaatggtggacagcatcttcggtgcatatttggaaagctcgggacgcggctctgcgataaccggcagcataacttcgtccagaatgtaatttcttgctttgtgcgtctttgcaaacgcttccttgatgatctccggcgtgaggccgtgaatcttcaggtccatctgaatggcggtgatgcccttcttggtaccggcaaccttaaagtccatatcgccgaagaaatcctcaagaccctgaatatcgaccatggtcatccagcggctgccctcggtgatgaggccgcaggaaataccggcgaccggcgccttaatcggcacgcctgcgtccatcaatgccagcgtagagccgcagatggagccctgagacgtggaaccgttagaggaaagcacctcggaaaccagacggatggtatacgggaactcctcgaccggcgggataaccggcacaagtgcacgctctgccagagcaccgtgaccgacttcacgtctgcccgggcctctggagggcttcgtctcgcctacggaataggacgggaagttgtagtggtggatgtagcgcttggactcttcgtcgtcgatgccgtcgaggagctggttgtcacgcgtggagccgagcgttgcaacggtaagcacctgcgtctggccgcgggtgaacatgccggagccgtgtacgcgcggcagcagaccgacttctgcggcaagcggacggatctcatccatacctctgccgtcaacacgcttctgctcgtcgagcagccagcggcgcacgacgaacttctgcgtcaaatacatgcactcgtcgatctttgccgcctgatcggggtaaatttcgtcgaagtgctcgtgcactttttcgtaaacaggcttgagtctctcgtcgcgaacggtcttgtcgtccgtatcgagtgcggccttcacgtcatcaatggcgaaatcgcggatttcttcgaacatctccggatccggcttattggacgggtaagagaacttctctttgccgatctccctctggatacccttgatgaactcaatgattttctggttttccgcatggcctgccataatgccgttgaacatatcctcgtcggacacttcgtttgcaccggcttcgatcattgcgatgcgctcatcggtggaagcgacggtaacagccatctgggagagctttctctgctctgccgtcgggttgatgacaaactcgccgtcgatgaggccgacggaaacgccgctgatggggccgtcccacggaatgtcggagatggacagcgcgacgctggtgccgacgagtgcggcaatctccggggagcaatccgggtcaacggacatgacggtgcagacgatggaaacatcgttgcgcatgtccttcgggaacagcggacggatggggcggtcgatcatacggcagacaagaatcgccttatcggtcgggcgaccctcacgctttaagaaagagcccgggatcttgccgacggagtagagcttttcctcgaagtcaacggaaagcgggaaaaagtcgatgccgtcgcgcggctttgcggcagcggtggctgccacgtggatggtggtctcaccgtaacggacaaggcactcgccgtttgcaagctgtgccattttaccggtttcgatcttcagcgggcgtccggcaaattccgtttcaaatactctgaaattttcaaacataaaggttattttccttccccccgaaagccgggattttccgactccgcagaccgtttaacaattaaaccgacgcacacgtattttacgacctgtatgcgcccgtttcactgctaaacagcccttggaatcattttgtgcagatattaaatcagctgcgcgggtcgcgcgcagctgaaaaaagacaaaaaattacttacggataccgagttctgcaatgattgctctgtaacgctcgatgtcaaccttaatgaggtagttgagaaggcttcttctctggccgaccatcttcagcaggccgcggcgggagtgatgatccttctggttggtacggaggtgctcggtgaggtcgttgattctcttggtgagaacggcgatctgaacttccggggaacccgtgtcgccctcatggcgtgcatacttcttgatgatctctgtcttttcgctcttcagcattgtgttttccaccttttctaaaatatttgccgcgctcacaggtctgggtcggtgttatccctgcggagatgtctcccaaaagggttagtccctgatccgaggacgggcactttgaaagtatagcataattcttcaaagtttgcaagcggtttttcctctgcggcgcagatttttcgttccgtacaaaatgacgaaaacgtccggcccaaaaccgactttttcacggctcttcctgccttttttgcgaaactcggacattttcgacattgtgcatcttgacaagcttttgaaatccgtatactattaaacagttaattatcgaaacgaccgtgcaaaagcaagtttacccgtgaaagactgaacacaaacgacgcgaaaaggcgttatgggcgcggaagtttttccgccggagaaaggatatttttaatgagcaaaattgcagttgttaccgatacaaacagcggcatcacccgcgaggaagcgaaaaagctgggcgtttatcttctgcccatgccgttcatcgtagacggcacagagtattttgagggcgtcacctgcacgtatgagcacttctttgagatgctggaagccggcgcagaggtctccacctctcagccctcgccggaatccctcacggcgatgtgggaggaggcgctcgcgacgcacgattccgttgtgcacattccgatgtcttcggcgctgagcggctcttgcgacactgcaaaggcactcgccgcggaatacaacggccgcgtatgcgttgtggacaacaagcgcatttccatcacgcagcgcgaatccgttctggacgcgctgacgctggccgaaaagggtctgaccgctgccgaaatctgcgtgcagcttgaaaacaccgcgtataacgcgagcatttaccttgctgtaaatacactggagctcttaaaaaagagcggccgtgtgacgccggccggtgcggcgctcgcgacgctgctgggcctcaagcccgttttgcagattcagggcggcaagctggacgcttacgcgaaggtgcgcggcatggcaaacgccgaaaaaacgatgctgaaggcgctcgaaaaagacctgcaaacgcgttttgcgggcaaaaaggtgcatattgcggcggcgtactccggcgacatcaagcccgcgctcgagtggcgcaagacaatacgcaagtattttgatgacaacagcattgagctttacaagctccccatcagcatttgctgccacgtcagctccggcgtaaaagcgctcggctgctttgaatattttgagtgatttttgcgtttacatacaaaaccctcgctgtgttcgtttgaagtacagcgagggttttcttatttatgttcaagcatttcaatgcttgcggcacgattatggaggctgccaagcaagcctttgaagcttaaaatgcggaaaagcagctgttcgcgctcggtgagcggcgtttgaaacgcggctttgacgtcttcgatcgttttgccgcagtaccgctcgaacgcttccggcgtgatacctagcatttcgacgagggcgtcgatgtcgtcaacgacggtttttgcatcggcgtttttgccgctctgcgccaaagagaggtactccatgagccaatcgaaatacatggttccctttatgctgcccgacgcggcttccaaaagcgcatcgagcgtttcggcatcgcaatgcgcgacggttttgaatgtttcaaacccgagtcctgttttttcgcggcaggttttttcccattctttcatgtcgatttgggtgagcatgtgcgggggcctccttttcaaacgcttcaaacagcgttcttgcggttttttcattcaggctgatctccgctttcagcgcgtctaaatcgggaaactttttttcgtccctgacaaagctcaaaagctccagacgcagtgttctgccgtacaggtcgccgcctgtgaaatcgggcatccaggtttcggaaagcgcgtggtcggagccgacggtgggctttacgccgacattcgtcacgccgcagtaggttttgccgtccacatacacggcggaggcgtacacgccgaagcgcggcagcacgaagcgcgacggaaaattctggttaatggtcggcgtgccgatggtatgaccgatgtggttgccgtgcacgacctcaaagcagaagccgaacggtctgcccagcatggcggtgacgtcttccatctcgccgttttcaatcgctttacggatgcgcgtggcgctgacccgctcgcctttatattccactgtgggcacgatgtgcatttcgccgccgtgggcttcgcagagctttttcagccactccgtgtcgcccgccgcgaacttaccgaagcggaaatccgcgccacaggcgatgcgcttcgcgttcaaaccgaagcgcagaaggtttgcaaagcgctccgcgggccactctgcaacctgtgcaaaatccggcatgatgacatactccacgccccagctttccaaaatgcgcatgcgctcctcaacggtggtgagatagcagcaggtgcctgtaaggtactccgcggggttatcccgaaacgtgaaaacaacgggtgtgagtccgctttccaccgccgtgcgaatgaccttataatgcccgatatgcaggccgtcaaacgcgccgagcgcgaccgccgtttttttctcgccgatgaactttcgtatttcttccgtattgcgaatgacgtgcatgtgccgattccctctcatttttctgaaaatgacttaacgtatttgaattctccgttttccgcgcgggcgagtcccaagaacttctcgccgtcttcgtacagcgcgacctgcgtgccctccggcatggcgatcttcggtgcacggcagcgcgaaattgtgagtgcaccgccgtttaaatatctttgtgcctgcgccggtgtgacagacacggcagtgagcattgaaaagagcttttccacggggcgaagaatttcatcaaagctttccccgttttctttcatcgcctttaatgtatcaagcgagacggcgtctgcgagcgtaaagccgcacgctgctgttcttctgagcgccgtcatggcaccgaccgtgccgcatttttgggcaatgtcttcgatcaacgtgcggatatacgtgcctttcgagcacgtgacgtgcagcttgccggttttttcattctcgttatattcgagcaaagtgagctccgcgatatgtacgggccgcgcttcgcgctctacttcgatgccctgccgcgcgagcttatataatctctgtccgttgacggagacagcggaatacataggcggcacctgtaaaatatcgccgcgaaaagaatccagcgcagtttcgagcgcagctcttaaaacgggggtttcatccgttttgatgacttcgccggtcacgtcgccggtggtatacgcttcgccaaaccgaaaagacgcttcgtaggtctttgcggtttccggcagaagcgacacggcttttgtggcgcggccgagcaaaagcggcagaacgcctgttgccatggggtctaatgtgcccgtgtggccgatgcgcctttcgcgcgtcaacccgcgcacgaccgccacggcgtcaaacgacgtgaagtcctgcggtttatccaaaacgatgatgccttccatgctgcctccgtattaccagcccgcctcttccacgaatttgtagaagtccttttccgcgtctttgtcttctgcgcggatggtgccgacggtctcggtataaatgatgtattcctcttcgccgtccaaatcaaacagcgtatcgcacaaattctggtcgtatgcgccgatgccgcaggtgccgagatttaaagcactgcacgcaagatacaggttttcgcccacgtggcccatatcaacaagggaacctctgtggctgaaaatgccgtagcgccactctgtgcggtacggaacgaacgaccaatagaacacaacgctcgactttttcacccagtgctgatcgcacagggacttatcgataacgtcttcggtgttttccacctcaccgagatactcgagctgattttcgagcggcagatagtggtatttgccgggctttaagccctctacacggcgcacgagcaggtatgtttcaaacggatgtcttgcgccgccgcacggcacggtacgcagcgttgcatactttttgccgcggataccctttacgccctgcgttgcccaaagtaaaaacgaaagctccaaaagggacaggttctcttccgtataaacgcgggaagagcagcggttgaaaatgacgtttaagaggtctttttcgaggccaagcggcttaaaatcgcgcggcaggtcgatacgcgcatcgctcaccggcgctttcgtcagcggcggctgcggcagcattttctgctggtcagtcttgtagccctccggctcgtcgcttgcatcttgctttaaaaagccacgtcggctttctgtgatggcgcgaatttcttcgggtgttaattctttcatgtgaactcctcccacctgatttacagctgaattaaattgccgattttcacttattttcgagcgctttgatggcttcgccgcaggcggctaccacgcgcgcttttacgtcttcaagctcgcccgtaatggagcaacctgccgcacccttgtgcccaccgccgccgaatttggcgcagacgacggacgcgtccgcggggttcgtggcacgcatggagaccttccaaacgcccccttcgcgctcgcgcagcgtaaagcccagcagaactccctctacctggcgcaccatggcagaaacgccgtcgagatcgtcttcggaagcgccggtctctgcgatgacgtcattcgtcagacaaaacaccgcgcacttaccgtcacagtggaactccatgtcgccgtacaggcgtttcagcagcgctacggcagcgcggcttttggtatcaaacatcagacggttgatctccgcggcgttcgcaccatgctccaaaagatctgccgcaatgcggtacgtgtttgcggaagcgttcgggtagcggaagcagcccgtatcggtggaaatgcccgtataaaggcagtccgcgatctccggcgtgatctccgcgccgagcgccggaatcaaacgcgcgatgagctcgcatgccgcgcctgcggtgccttctacccacgtttctttggcaaacgggcggcaggacgcgtggtggtcgatggcaaaatccgttttgtcgccgtagggctccaaagagccgagcagcgttttatcggccacatcaaccgtcacgatatgctccggctcgaactcgccgtattcgatgccctcaaaaagatatgtgaatttcggcggcacggggtctgcacagcggaacatgaccgatttgccgagcgcgatgagtgcgcggctgagcgccgaagcgcagccgagcgtatcgccgtccggcgagcggtggctgaggatcaaaattttgtctgcgccgcgcaggaaatgtgcggcatcctccagatttgccataagtgtgaccaagctttcgggcgaaaattacgcccaaaagcactcctttctttgaatctttacgggaagcttattttttctcgttttcaaggtcgtgcagaatgcgcgaaatgttggcgctgtactcaatggaatccgtcgccttaaagatcatttccggcacatggcgcagctttaagcggtttccgagctcgcggcgtacataacccgcggcgcttttaagacccttaacggcattttccgccgtctccatgccctccatggcgctgacatacactgtgcagtaggaaaggtcgtttgtgacctccacacgcaccacactcagcatgcagccgctgacgcgcggatccttgagttctcttaaaatagcggaaacctcacggcggatatcctctgtggttctgcccaatttataactcggcatcgtttattctcctttctcttccggcaggaagtgcgcggaaatgagctccgctgcaactttaaagcccgccttcagactttctgtttcgatccactcgccgcgtgtgtgctcaccggcgccgatgcaaagaccgattgccgcggcaggaatgccgtttgcaagcgggatgttgcagtctgtggagccggcatacacgcccgggcgcgtgccgaaatggttttccaccgcgtccgcgcactgtgttaaaagtgcggtctgacgcgggtcgtgattttctttgttgccgcaagggcgctcgccgagcagctctgccgtgacgtctacgccctctgctttaaattcttccagtattttctcaaaatatgccttggcatccataaggcacgcgtaatcgtccgagcgcatttcgtacagcatttccgcctgtgccgcgatgctgttgacggtcgtgccgcccgagatcgtaccgacgttgaatgtcgttttcgcgctgcctgcgggaattttgtattgatagagctccgcgatgatggcagaaaggcgctcaatggcgtttacgtttccgaaatcgacaaacgagtgaccgcccgcggtcttcactgtgaccttgtagcgcagagagccgaccgccatgccgacgatgccgtcaaggtagccgtcaaatgaaatgacctgctctatgcgcttgccgtaccgtgcgtttaaagcgcggctgccttttaagttaccgaggccctcctcgcacgagttcatgacaaatacaatgccgccgttcgttttcggcttttcgtttgcgacataagccgccataagcataagcaaagcgacgttcgcggtgtcgtcacccacagcggggcagaaccacttgccgtccttttcggtcagttcaaggggcacagactccgggaaaaccgtgtcgatatgcgccatgaaaattgcgacgggcacatcgttttcggcgttatattcgtaaatgacgtttttcgcttcatcgataaaagcgttttccgcgccgtggtccataagccacgctttgcagaatgcggcacgcttttcttcgtggtggctcggcgacgggatcaagcacagcgtgcgcagcagctccagtgccgtttggtgattcgcgagaacgtattcattcaaattcatagggaatgcctttctaaagcaaagccgcgtcccgcgatggggacgcggctgaaccgacttttagtctctgtactcttccatttcgtaggcttcgaggatgtcgcccagcttgatgtcgctgaagcgctccagcgtgatgccgcagtcgtagccgtcctgcacttccttcacgtcgtccttgaagcggcgcagggaagcaatcttatcatcggcaacgatgatgccgtcacgcacaaggcgcacctgcgcgccgcgcacgatcttgccggaggtgacgtgaccgccgatgaccatgccgacattcgtgatcttgtagacctcgcggcactctgccttgccgaggaacacttcgcggtacttcggtgcgagcatgcccttcatagcggattcgatctcttcgatgcagtcataaatgatacggtagaggcgcatatcgacaccgtcgcgctttgcgttctcttccgcgaccgggtccgggcggacattgaagccgacgatgatggcgttcgaggcgtttgccagcatgacgtcgctttcgctgattgcaccgaccgcgccgtgaatgacatgcacgcgcacttcgtcgttggagagcttctcgagggactgacggacagcttcaacagagccctgcacgtcggccttgacgatgaccttgagctccttcatctcgccttccttcatctgctcgaagaggttatccagcgtaacctttgtctgagagttgaacatctcttccttctgctcggtaagacgctgctcaacaagctcacgtgccagacgctcgtcggaaacggcgttgaacgtatcgccgccgaccggcacttcgttgagacccgtgacctcaaccggcacggacggacctgcgctctttacgcgctcgccacgctcgttcatcatggcgcgaatacggccgaccgtggtaccggcgaccacgatgtcgccggtatgcagcgtaccgttctgcacgaggacagtcgcaaccgggccgcggcccttatcgaggcgcgcctcaatgacggtgccctttgcggcacggtccgggttcgccttgagctccttcatttccgcaacgagcagaatcatttcaaggagatcatcgatacccattttggtgtgtgcggaaaccgggatgcacggcacatcgccgccccactcttccggcacgagctcgtattcggtgagctgctgcttgacgagatccgggtttgcggccggtttatccattttgttgatggcaacgatgatggaaacgcccgctgccttagcgtggttgatggcttctaccgtctgcggcatgatgccgtcatcggctgcgacgaccagcacggcgatatccgtaaccatggcgcctcttgcacgcatggtggtgaaggcggcgtgacccggcgtatcaaggaacgtaatgtccttgccgtcgatattgacgcggtatgcgccgatgtgctgcgtgatgccgccggcttcgcccgcggtaacgtttgcgtggcggatggcgtccagaatggaggtcttgccgtggtcaacgtggcccatgacaacgacgaccggtgcgcgcggcacaaggtttgcatcatcgtcttcgctgtcgtcaatgatgcggtcttcgatggtgacgacgacctctttttcgacctttgcgtggaactcatcggcaatgagtacggcggtatcaaaatcgatggtgtcgttgatggtagcgaaaacgccgtttgccatgagcttcttgatgacttcggcgctcgttgccttcaggcggagggcaaactcgccgacggtaatctcatccggcacggtgatggtgatggcctttgccttgcgttccgccgcgatgcggttgagtctttctgcttccgtctcgcgctttgcgctgcgcggcttgccgcggcgctggctcttctggttgatcttctgttttgcggcaacggtgtcgttcttcaccttgtcgtacgccagacggtcgtacttttcgttgtacttgtcgatgttgacgttgaccgttctggtatcgaccacgcggcggcgcggagcttcgcttgcggcttcctgtgccggagtgttgttgctcggctggttgttctgcgcaggacgctgcggcttattctgctgcgcgttctggtttctgttattgccgttattgttgcggcggtcgttatttttgttgcgattattattgttattcacgttctgcttcttcggctcctgcgtgttcttagcggttttttcgctcggtttttccgctgttttctcggccgacttctcttcggtctttgccgcattacgcgttgcaaagtacgcgtcaaagttctgtgcggcatgatcctgcgtgaagcggtcaaaaacgatatcgagctcgttttcttctaacgccgtcatgtgctttttcggctcttttacgtacttgccgaggatatccagcacttctttgttcggcacatccagatcctttgccacatcatgcactctgtatttaatcatcatatacgcatttcctctctttctccgtctgcgatgagctgcttcaatttttccgcaaagccgcggtcacacacggcaagcacaccggtctttttgccgatggctgcggaaatttcttccatggtaaacgcaggctccaaaacggatacatgatacttttccgcttcaaagcgcacgttcttcttcgttttgtccgaaaggtctgcggcaagaatcacaacgccgcacgcgccgctgcgcatggcttccacggcggtatcaaagccccagttgagctttcccgcacgtcttgcaaggcccaaagcggacagtgctctgttcatttttgcgcctcgcccgcctttcctttcacatctgtatacagctcctgatacatggcgtcatacacggcgtcttcaattttgcaggagaacgcgcgttcaaagcgccgcgccttctgtgcctttttcaggcactcggggtccctgcaaacgtacgcgccgcggccgggcttgcggcctgtaaggtccaaagagacctcgccgcctgtctgcacgccgttctcatcttccttaacgggggcgcgcaccacgcgcaccagttcctttttcggcttcatttcaccgcatcccgcacacatacggagcggtattttcttttgtttcacgctgtatcacgttcctttctgcgagatgcaagtttcaaaagagcttacgcttcctcttcttctccgaagaagccgctttccggcttaatgtcgatcttccagccggtcagcttagccgcaaggcgggcgttctggcccttgttgccgatggcgagggaaagctggctgtccggcacggtaaccttgcaaacgtgggagccgtcctctgccgtttcaacggaaagcacggtcgccggtgcaagtgccgctgcaatgaactttgccgggtcttcgctgtagtcgacaatgtccatcttctcgccaccaagctcgttgacgatgtcggaaacacgcgtgccgcgcgtaccgatgcaggcacccacagcgtctacgtccgggttatgggacataacggcgatcttcgttctggagccggcctcgcgggcaacggctttgatttctacggtgccgtcgaaaatttccggcacttccttttcaaacaggcggcggataagatccgggtgcgtgcgggagatgatggccttcgggcccttttcggtctccttaacgtctacaacgtagacctgtacgtggtcgccttccttgacgttttcggtgccgacctgctctcccttcggcaaaatggcttctgccttgccgatcttcagggacagcgcgccggtcttcgggtctacgcgctctacaagggcgctgacaagctcctgatggcgacccttgaattcctgcatcatctggtcgcgctcgctgtcgcggatgccctgacggatgatgtttcttgcggtctgcgctgccacacggccaaactgttttgtatcgagacggtggcgcacaaagccgccgatctctgcgcgcgggtcgtactgcttgacgatctcaagtgcaatctcgcggttcgggttttccacttcttctacaatctccttgcgcaggaacacgtcaaacttgccgctttccggatccatgtcgatgacaacgtcctcgttgccgtagctgtttttgcaggcggtggcaatggccttcttaatcttatcgatcatgaaatcgaccgggatgcctttttccgcttcgaggagcttcagagcctcaaacagctccttgccgtcattgttcacttcttttttctgcgctgcttttcttgccatttttcaaattacctgccttccggtattattctttcaaatttttgtattataaacgggagccttcccgagtcagtcataatcttcgatgaggttgacgctggcacattcttttctggtgaacgtgaccgtggtgtcctcctcggtgatgacctcaaaatcgccgttttcggcaacgtcgatgaggatgccctcgagctcgcgcacgccgttttcaagcgggcgaatgagctttacgcgcaccggcgcttcaaggaaagcctcaaagtgctccgggcgggtgagcttgcggttgatgccgggcgaggagacctccaaggtatattcctgcggaatggggtcttcgctgtccaacacggggttgatggcgcgggtgaggtctacgcagtcgtcgatgcctacgccgccttccttgtcaataaaaatgcgcagataccaatccgcgccctctttcgtgaacgtaacgtcccagattatgagcccaagctcctttgcgagcggctctgccagcgcgcgcacaatctccgtggtgctgcctttctttttctctgccatacgcagcttcctttctccgcccgcttttcggcggctgtgtctgttttggatatacaccctaatacaaacaaaagagcgggtcgccccactctttcatcatcctactatcttaccgtaaagattataccacagcgccgctttttttgcaaggagaaaaacaaagttttccgcacaaatacgggtgtgtttttacgttttggcacggcatttttcacaggctgtatgcccctgccgcgcaaaacaacgtccgtgcgctttatttcccgaaaaacacaaaaaacggacgcgccgcctttttgcggtcacgtccgtcgtttgtgcttattttattccgctgcggattcaagctcggaggtcgtgctctcttcctcatcgccctttacgggcttattctgcgcgatgacttcctttgcttccagaaccttctgaatatcgctcatgcgcacggaaccggtcggctgatcgttcagtgtggcaacggcgcggcgttcggatgccgggtctgcgtagaacttaatctcctcgctctttctgccgtcaaagaaatcgtacttgattgtgaggatcgggtcgccctgcggctcctgaatgtcctcgttcaaaacggagatggcgagcaacatctggtagaacggctggtagtaatcgtagttgatttccttgccgtccttcgagacttccaaatcgtagaatgtgttcgtctcggtggatttctcctcgttctcaatgcgggtcacgtcgtagacatccgtaccggtggacgaggtgagggtcacgcgggaaacgctcttgatgtacggcaggcgcacgaagccgtcgcgcagggaatacacttcaatatccacccaagaggtcacggcgctgtccgtgatggtgtagatcgttgtgtcgtcgtccaccatcatgctgtacaggtcgccggtcttatcgccaagcttaatgacatggtgctcatcgttcatcgtgtaatcgcacacagcgaccgggttatccagaccgtattttgcgatgtcttcttccgtagcatgtacggtgaggacaccggcagccgtcacgttttgcagttgcttcacaaagtcgtcgatcttgccggagttcatgccggcgtaaatcggctctgtgatgtcgtacgcgagcacttcgtcatcggaaaggccaaactgaatttcttccggatagttctgaccggaaaggtgcaggctgttgatttcgcttgtgctgtccgtctcggtaccgtccgtcgcggtgatggtcggcgtcggaattgcgatgagagacttattgaggaagtcgtacttagactgcttcaaatacgtggaaacgggcacgatgtacacttcgtcctcatacagcatgtaagagccggaggattcaccggccttattgccgatggtgaacgtctgggacgtgccgtccgtgtagttcatggtgatcttgtagccttcgccgctgccgagaccgtactcggagaggtcctctaccgcaccgatcttcttcgtcggcgtgatggagtataggcggtctgcaaggctctttacgttcgagtagagcacgtcaaggtcgtcccagccttcaatggtgaaggtctgctcggtgtcgccgctcgaggtggtcgtttccgtcgggatgatcgtatagctgtcgtccgcggcgaggtcttcaacgccgatgttcttcacgtcttcggcggtcttatcgatcagtgcgggctccgtgctctcggaaacggtgctggagctgtttgcgtcgtcttcactgtccttcggagacgtgaggatcagcgctgcggcagccgcgcccagcacgatgagcacaacgagcgtgatgataatgtattttgtggttttcttcatggaaagcaggttcctttcttcgacttacagatgtcttcttctgaggaagatgacaaggccgatgacaaggacggcaaccggcaccacaatggtgaacaacatcataccaatgctccaagttacagcagaggaagcactaatatccattgtattcgtttgtgtctggttaacagtaagacctacgcgggtgtccgtcgttcctgtaaggttcttaatgagatccaacgtaacatccttattgccaaaggtggagttgcccaataaactacttccatcatagaaatccgctgcacaaccatcaacaactacgtttgcgcatatcttaccctgattatccatatagcgctgtgcaaatgcaagaatagtatatgtgtccgtttccggtgtttcgagaaccttttcatcgttggaaaggtaagcagtatcactggtttcaatcacagaataagtactgatatcgttgtttgctgtaaacaaacgctttacgggagcagcctgtacctttacaacattatcataagttttgctaagtacactatctgtaacatttgcaaaaattgcatacggcatattataaagagtgttattggtgttgctctccaatacttcctgagactgaggctccataccccactcagctaagaaagaagaaaggtttggcatagaactccagccagcattcggcgctgtcattacatacaacgttctggaagagcccattttctcgtcaccgagataggcttcgagcttagaaagctcttcggacgtatagtcggtagtcggcataccaagtacaacgatagatgcgtcttccggaatttcgtctgtcagcatgttgaactctttgacttcaaagttattgtcatttaacaatcctgtgaaactcgtagatgttgaggtcgtaatagcttcgctatgacccgttgcgaatgcgacgaccggaacggtatcgagattgacgaggtacagggcgtttgcaagtgcgccgtctaccttggagtagtagttatactggccggtggaagaatcctgctggatgctgaacaggtcggtaacggcgagtgtcttgtgacgcttatccgtcttgaccatgaccttgccggtcgtaagggagtcatcggcatagtcgctgatgaactgcgggttcatgtccgggtcgatgtactcgactttgatcttgtcgttcagctcatgcagacggtctgcgaggttcgcgacctgactgtactttaagctgtaattggaatagacttcatcgccgcgaatcgcgtcctcggagccgatgatgtaaatggtcgtttcgttgacgatctcctttgccacgtccgttgcttcatcgctcagggtattgaggccctctttcgtgaggtcgaagttcatggacggaaaacgcgtggtcagcgcagagaccagaacgttgatgacgataatcacggcgataaacacaaccgtgaacacaacggccaaagagccgtgcttgaatttttctttatgcaccgcggtctttactgcggaaaggttcggtttcttactcatctctatgctcctcccttagttccagcggcggctttccaccctgcgggcggtcaggaacacaaacacagccgccacgctgatgaagtacacgcagcttgaaacgctgaatatgccctgcgtgaaggtatcatatcgcgaggtgaacgagatccatgtaaggatggtgccgatgaagttgccggagagcgcagacgcaatctggtcgacgaacatcaggaaaatggcaatgacgaacgtgccgatagccgcgatgacctggctgatggtgaggccggaaatgaacacaccgatggagatcatagccgcgccgtacagcagcgtgccgatgtagttgccaaagagaatgccccacgggaacgcggaggagaaaaagcccatcgtgatggccggcagcagtgccagggtgttcgcgatgaaatacacgccgaacgccgcgaggaacttgcccataacgatgcccgtcacgctgaccggcgctgtgatgagcgcttggtcggtcttattcttgcggtcatcgctcatgctgcgcatcgtgatgatcggcataatcatcatgctgaacataaacatagtgctgaacacctgcgtgatgtacgagctggagccgatggccataacctgataatagaagaagccgtaaagcgcaagcagcgccgccacgacgacatagccgaccggggaagcgaagtacgctctcatctctcttttgaatattgctctcatttctctgcatcctccttcgtttcagcctcttcgggctcagatgcttcggtattttcgggttctgtttccacttcaacctcaggctctgccggagcagcgtgggaagcatcgccgcttgtaagctgcaggaagacttcctccagcgtgaggtctgtgtttctcaaagccagcagcggccagcccttgcgggtgagcagtgcaaacaggttgcggcgcaggtcgtagttcggctcgccctcgatagaaatctcgaagacgcccttttccttctcgccgagagagtaaacctccacaatgtgctccatgccgcggatggcctgcagaatttcgctttccgggccgtcaatacgcgcaatgatgcggtgctctgcggaaaggtcgtgcgccaacgtatccgttgcgccgtccgccacaaggcagccgttgttcatgacaatcacacgctcgcacacggcctgcacttcgggcaggatgtgggaggacagaataatcgtgtggtttctgccgaggctcttgatgaggttgcggatctcgatgatctgcttcgggtcaaggccgacggtgggctcgtccagaatgaggacaggcgggttgccgagcagagcctgcgcaatgccgacacgctgcttgtagcccttagacaggttgccgatgagacgagtgtagacgttgtcgatcttcgtcaggcggcagatctcgccgatatgctgtttgcggtcgagcttgacgcccttcagctcatacatgaagttgaggtactctttgaccgtcatatccatgtaaagcggcggaagctccggtaggtagccgatgagctttttcacttcgttcgggttttccagggtatttttgccctgtaccgtgaccgaaccgctcgtggcggaaaggtacccggtgatgatattcatggttgtggatttacctgcaccgttcggcccgaggaagccgacgatggtgccctcttcaaccgtgaagctgacattgttcagcgcggtatttgtaccgtagcgcttcgtgaggtttttgacctcgatcatgtttaatgaccatcctttctctgcgggacggaaatatgtacccgggaaattcccgtgcaaagtcctccccaatggcgcccgcgcagctgcgcgtcgctcgaaacggttttgaacatgcggtgaaccttttgtggaaaaagggaggccgcttccggaaccgtttagatcctctgttttgggtttccgcgcccctatgcagggcagcggaagcgcacaaattatcataccgcagttttcgccgttttgcaatagccatgccgtatttcgggcaaaaaattaagtcaacactgcataaagaacgtgctttgcgcagtgttgacttaacaaaacaaacgataactttagttatccgcattatagcggctttctgtgacggctatgtgaaaaaacaattcgcaagtatgaacaaaatgtgaactcttcacaaaccgtacactgtctgtacacacgcggtatttcaaaaaatcattcgccgcgcagcaatgcgatctcggcggggatgttctccgcgcggaacacggctgtgcctgccacggcaacgtctgcaccgttttcgcggcagatgggcgcggtttcacggttcacgccgccgtccacctctaaaatgagctccgggcgctttgcacgcagcgcgcgcagcttttccatttgatcagccatgaacttctggccgccgaagcccggctccaccgtcatgacgagcaccatataaaggcggtcgaggtacgggtacaggcactcaacgggcgtgcccggctttaaagacaacgccggctttacgccgtacttttcaatttcggtgatggtttcatcaatgtcgtcgtcgcactccacatgaaacgtgatgatctccgcgccggcctccgcaaactggcggatatactgcttcgggtgcgagatcatgaggtgcacgtcaaacgtaaggtcgcttaacggacgcagtgccttgacgacatccgggccaaagctgatgttcggcacgaaatgaccgtccataatatcgaggtgcagccaatcggccgcgctgacggactttgcgcactcgcccatgcgggtaaagtcgcttgcgagcatagaaggtgcaattttcatttttaccacttctttctacgagaagaaatttacggattttgcggttaaaagttatctttttcgtcgtccttttcctgcattttattcatggcggcttccgctttccagcctctgcggttcagaataaagaacacgattgccagcacaacgagaacgatgaacgtgagcacttttaatacggcgcccggtgtgccctgaaacactttccaatccgggaaaagcgaatccaaaagccaccacacgccaagcacaaggaaaaatccgcctgcaacgtagaatatcttattctctttcgacagacggaaaatcaagatcagtcctgcaataagccacatggctgcatatacataacccatggtatcctatcctttctaaagacatacgccttatcttctctttgttgacctgctttattataacggatagtgccccgaaatacaaggaaatccgcagaaaatacacaaaatatcggaattctcacattttataaccgaaaattttcccttcttctccttttgcggagtaatgaagaatttacgctccccgcaaaacacaaaaaggctgccggcaaaagccgacagccaattttactgattatattgagatcagatcagctcaatgatcgccatctcagctgcgtcgccgcggcgcggcccgagcttcgtgatgcgggtgtagccgccgttacggtcagcatacttcggagcgatttccttgaacagcttgttcgtgacgctttccttggtgatgaaagccatgacgtttcttctgtttgcaagggtatcttccttcgcgattgtgatcatcttttcagcaagagcgcggacttcctgtgctcttgttgcagttgtctcgatctttccgttctcgaagaagaacgtaacgaggccgcgcagcatagccagtctatgtgcagtgtctcttccgagttttcttgttcccggcatgattgtcactcctatcgtttggtaatggtaattaaattattcatcgtccttgcggaggctgtagccgagctgcgcaagcttccagatgacttcttcaagcgacttgcggcccaggtttctgaccttcatcatgtcttcttcggactttgaaacaaggtcttccaccgtgttgatgccggcgcgctttaagcagttgaaggaacggacggaaaggtccagctcttcaatcgtcatcttgagcacctgtgcatcatcgctgccgctcttctctacgatggtatccatcgccttacccttttcggaaaggtcaacgaagaggttcagctggtctgtaaggatcttggcagcgagcgacaccgcctcttgtgcggtaataactccgtttgtccatacctcaagggtcagcttgtcgaaatcgatgcgctggcctacacgggcaggctctacgttaaagttaacctttaacaccggtgtgtaaatagaatcaactgccaattcaccgatcacgccctgcggcatattctgcttgttgcgttcaccggaaacatagccgcggccctcatcgagcacgatctccatgtacagctttgcgccttcaccaagcgttgcaatgtgcaggtccgggttcaggatctctacttcgctgtcgcacttgatggaatctgccgttacgatgcaggggccttcagcagaaatctccacggttttcgggccttcgcagtgcaacttggcaatgagacccttgatgttcagaacgatttcggtgacatcttccttaacacccggaatggtggagaactcgtgtacgacgccgtcgatcttgatcgacttcggggctacacccggcaggctggaaagaagcacacggcgcaggctgttgcccagcgtggtgccgaagccgcgctccagcggctctaccataaaccggccgtaagtgttatcgttggataattcctcggtctctattctcggtctttgtatcatctcaatcatttgcgatcctcctttacacatttgacgtaattcgtaaaacccataaaataatgttaagttttactggattacttggagtacaactcaacgatgagatgctcttctacctcaaattcaatgtcgctgcgctccggcatgcgaaggatcttgccctcaagggcttccttgttgcgctccatccactcgggagtggtgacgagcggtgcgtctgcgccggtgagcttggagaacttcacgctgctgcggctagcttcacgcacagcaatgacgtcgcccggcttcacaaggtaagacggaatgttgaccttcttgccgttcacggtgaagtgaccgtggttgacaagctggcgtgcgtcgcggcgggtggaagcaaagccgagacggaacacgacgttatcgagacgacgctccagcagacgaagcaggttttcgcccgtcatgccggtctgacgctcagccatatcaaaatagcttgcaaactggtgctccagaacgccgtaaataaacttcagtttctgcttctccttgagctgagttgcatattcagactgctttctgcgcataccgttgcccggattgcggatggtggtcttcttgctgtaacccataacggccggagaaatgcccagcgctttgcagcgctttgcaatgggctgtctgttcttagccatattctgtaacctcctaatctgttatacgcgtcttctcttcggcgggcggcatccgttgtgcgggatcggcgttacgtctttgatcatgctgacctcaagacctgccgactgcagtgcacggatagcggcttcacggcctgcgcccgggcccttaacatagacttctacgctcttcatgccatgctccatagcaatcttagccgcggtctccgcagcggtctgtgctgcgaacggcgtggactttctggaaccacggaaaccgagctcgccggcgcttgcccaggataccgcattgccctgcgtatcagtgatggttacgatcgtgttgttgaaggtggactggatatgtgcagcgccacgctcaatattcttgcgctcacggcgtctgcggactgcggttactgctttctttccgccttttgtagctgccatttaaaatccctcccgattacttcttcttgttggccatggtctttctcggacccttgcgcgttcttgcgttggtcttagagcgctggcctcttaccggcaggcccttgcggtgacggacaccgcggtagcagccgatttcaacgagtctcttgatatcgaacgcaacattacggcggaggtcgccctcaacggtgtagtggtggtcgatatattctctcaactttgtagcgtcatcttcagaaagatctcttacgcggatgtccggatcaacgcccgtagcagcgcagatgtccgacgctgtcttgcggccgatgccgaagatgtaggtaagagcaatctcgattcttttgtctctgggtaaatcaataccagcaatacgagccatgcttattgcacctccataaatatttcagagcctcagccctggcgctgcttgtgcttcgggttttcacagatgaccatgactttacccttgcgcttgatgatcttgcatttttcacacatcttcttaacagaaggtctgactttcatttgtgtgccctccttatgcgttgtggggtcttcaaatctattttatcttacttggaacgccacgtaatgcgtccctttgtcagatcgtacgggctcatttccagtgtgaccttatcgcccggaaggatgcggatgaaattcatgcgcagcttgccggagatgtgagccaggatcatatgcccgcccgggatctctacctggaacgtcgcgttcggcagagcttcctttacgattccttctacttcaattacgtcctgctttgacattcttgtctcaccaatccttacatttaaatgttacgttgtgtgcgctctgtatgctgtgagcgccgtgcgtatttgtcgattggtcgaaaggctctcttcgctgagcaccgtcgccgtcggggctaaatgcatcagctttttctttttcggtgcttccatcctgcgacgtttgccgtctgccatgtaggcatacgcgccgtccgttttcagcaccacctgaaaatcgcctttatcatgacctttaagcgaccgcataatctgtccgcgtacacagtccatctgacacctcaatccagcgatgtgaggatcacagggccgtcgggtgtaatggctatactgtgttcaaagtgggcggcaagcttgccgtccttcgtcacggtggtccagccgtctttgaggattttaacctcgcagctgccctgcgtgaccatgggctcgatcgcgatcgtcatgcccggtaacaggcgtacacccctgccgggggtgccgtaatttggaacactggggtcttcatgcagcttcgcacctacgccgtggccgacaaattcccgtaccaccgagtaattgcgagcttcgacatactgctgcactgcggagccgatatcgccgatgcggttgcccggcacagccttttcaatcgcaaggaacaggctctctcgggtcgcatccatcagcttctgtgcttcttcggaaaccttgccgcacgggaaggtccatgcgttgtctccgttgaatccctcatagattgcgccaacgtcaatggagacgatgtcgccctctttgagaatttcgtgtgctgaaggtatgccgtggataaccacattatttaccgaaatgcaggcgctcgccggaaaaccgccataaccgagaaagctgggcacggcgcccgccttctcgattgttcttctgacgatcttgtccagttcgagtgtagaaacacccggacggaccgcttcaccggccttcagcaatgcttcctgcgaaatctttcccgcgtcacgcatataacgcagttcacgggtcgttttcaggttaatcatgcttacgcctctaatgctttgagtgtgagggcggtcgtatcggcgacctcctcctgaccttctacgatgtgcagcttgccctgcttctcgtagtattcctttaagggctcggtctgctcgtgatagacgcgcaggcggtccttaacggtatccgggtggtcatccttgcgctgaacaagggtgccgctgcagttcgtgcagacgccttccactgccggcttcttgtaaagcaggtggtaggaagagccgcacttttcgcagacacggcgtccggacattctcgtgacgatcttctcgtcgggcacttcgatatcgatgacccgatcgatcacaacgccggaagcgtccagagcctcggcctgcggaatggttctcgggaaaccgtcgaggataaaaccgtttttgcagtcttcctctgccagacggtccttgatgataccgatgacgatctcatccgggacaagctggccggcgtccataaaggctttcgccttgaggcccatttccgtgccgcttttcagcgcctctctcagaatattgcccgtagaaatggcgggtattccgagatgtttgcagataacttctgcctgggtgcctttaccggcacccggtgcacctaaaaggatcagcttcattgttcatgactcctttcgtatcttatgcgcccgggggcttaatcaaggaagcccttgtagtgacgcatcatcatctgagattcgatctgctttacagtctccagcgcaacgccgaccatgatgatgacggacgtgccgcccatggaaaggccatacatgccggtgaggttgctgtaaaggatcggcaggatcgcaacgaacgcgaggaaaatcgcgccgatgagcgttatcttggaaaggatcttgctgatgaactccgccgtcggacggcccggacggatgccggggatcgtaccgttattggtgcggaggttgttcgccatttcaatcgggttgtactggatcgtcatgtagaagtaagcaaacacaacgatgagcagcaggtacagaacactgtacagccagccggtggaggagaaggcattgaagaagcccttccagaagccggtcggttcgccgacaaagaggcgaatggtgctcggaatggagaggatcgcagacgcgaagatgaccggcataacgccgctcatggtcactttgatcggcaggaacgtgctctgaccgccgtaaacctttctgccaacgaccttcttagcatactgcaccggaatgcggcgctcggaatcgttcatgaaaacgatgacccaaatgaccgcgaggaaaaggatgatgaacagcggtgcaaagacaaagtacttgccgtagctctccggagactgcattgcagccgagaagtagctccagatctgacccatcgtaaccggaagacgtgcgacgataccggcaaacaagatgatggagatgccgttgcctacgcccttctggttgatctgctcacccatccacatgatcagcgccgtgccggcggtgaacgtgagaacaataatgatcgcagtaaatactgcggagaaaccttcattgtacagggtaattttattgtttctcaggtagaagtaataagcggtaccctgaatgaggccgagacccaccgtggtgtatctcgtaatggcagcaattttctttctgccttcttcgccttccttcgccatgcgctccaaggcgggaattgccaccgtgaggagctgaatgatgatggaagagttgatgtacggggtgatacccattgcaaacagcgttgcatttgcgaacgcgccgcccgttaacatattgatataacccagtgcagtttcattggcgcttgccatcagcgtgttgagcgcggaaacgttcaggaacggtaccggcacaacagagccgaaacggaaagcaatgatgatcaaaagcgtatacaggagtttcttacggagatccgggatcctccaagcgtttttgagtgtattaaacacttagatcacctcggccttcccacctgcagcctcaattttcgccttggctgcttcggagaaagcgttagccttaacggtaacctttttggtcagcgcgccattggaaagaaccttaacaccgtcgcatgcagacttgatgatacctgcttcaacgagtgctgcctgatcgacgactgcgccgtcttcaaaggcgttgagggcgttcaggttgatcgcaacgatctccttagcgaagatattgttgaaacctctcttcgggattcttctctgcagcggcatctgaccgccttcaaaaccagggcggaaaccgtggcccgctcttgccttctgacctttgtggcccttaccggctgttttaccgttgccggagccatgacctctgccgatgcgctttgcgtcctgcattgcgcccggggtagctctgagttcattgagcttcattcaaacacacctccttagcctttgataacctcgaccaaatgaatgatcttcttgattttgccctctgtttgtgcattatcgggctgagtggttgtatcgccgaccttatgcaggccgagcgcctcggcggttgcaatctggggctttttgcagccgatgaggctctttttcaacgtaatctttacgtctgccatattgcaaacctccttacagaatttcacttacggacttgccgcgaacagctgcaacctcttctgcggttctcagctcggagagaccggcgagggttgcgcgtacaacgttgcacgggttgttggaacgcagtgcctttgtacggatgtccttgatgccaacgctttcaacaacggcacgaaccgggccgcctgcgataacgccggtaccgggtgctgccggctttaagagaacacggcctgcgccgaattcgccgacgatctcgtgcgggatggtggagccgcgcagagcaaccttctgcaggttcttcttagcgtcttcaatgcccttgcggatcgcgtccggaacttcgccggacttgccgatgccaaagcctacgatgccgttgccgtcaccgacaacaacaagagcggcaaacttaaagatacggccgcctttaacggtcttggaaacgcggttgatagcaactacgcgctccttcagatcgagtgtggatgcgtcaattttcatagccaaaacaatattcctccttcttagaagttgaggccgccctcgcgggcgccgtcggccagctctttgacgcggccgtggaagatatagcctccgcggtcgaagaccacatcggtgatacccttttctgctgctctttctgcgatcagcttgcctactgcgtgtgctgcttctttgtttccgccgttgccggtaaacgccttctcaaccgaggatgctgcgcacagtgtaacaccgttcacatcatcgatgatctgagcgtaaatatgcatattggagcggaaaacatcgaggcgcggtctttccggtgtgccgctgatcttgccgcgaactctcttgtggcggcgcagtctggctacgttcttatctgccttactaaccatttttatctcactcctaacctattatttacccttaccggtcttgccttccttgcggcgaacaacctcatcaatgtacttgatgcccttgcccttgtacggctccggcggtctcttctcgcggacttccgctgcgaactggccgaccttctgcttgtcgatgccattgatgatgatcttgttcggagccggaacgtcgatcttgatctcgttcgtttccggaacgataacctgatgcgagaaaccgaggttcataaccaggtttgtgccctgcttctgaacacggtagccaacaccgttgacttcgagctctttcttaaagccttccgttacacccacgatcatgttgtggataagggtacgggtgaggccgtgcagagaacggttctctttgtcgtcgtttggacgtgtaacaacaatctcagcgccctccacagcgatgttcatgctcggctggaacttctgagtcagcgtgcccttcgggcccttgaccgttacgcagctaccgtctaccttaacctcgacgcctgcgggaatatttatcggttttcttccaattctggacatgttattgcacctccctgattaccaaatgaacgcgagaacttcgccgccgatgttcatctttcttgcctcgcggtcggtcataacgcccttagaggtggagatgacggcggtgccgaggcccttcatgaccttcggcagctctgctgcgttggaatagatgcggagacccggcttggagactctcttgaggcccttgattgccggcacgccgccttcaacatacttcagtgttacggtgatgacgccctgtttgccgtcctcggtaaccgtaaagctcttgacataaccttcgtcaacaagaatctggcaaatagccttcttcatgttagaagcagggatgtcaacagtgtcatgcttcgcagactgagcgttgcggatacgggtgagcaggtcagcgattgtatctgtaatctgcatgatttattaacctcctataaagcttttaccagcttgctttcttaacacccgggatctggcccttataagccagctcacggaagcagatacggcagatgccgaacttgcgaaggtaggcatgcggcctgccacagatcttgcatctgttatattcgcgcgtagagaacttctgctctctctgctgcttgagtttcattgaagtcttggccacagtattccctccttacttttcaaacggagcgcccatgagcttcaggagctcgcggccctcttcatcggtatttgccgtcgtaacgaagcacacatccatgccgcggaccttgtcgatcttatcgtactcgatctcagggaagatgagctgctctttgatacccatgctgtaattgcctctgccgtcgaaggagttggggttgatgccgcgaaagtcacgcacgcgcggaagcgctacgttgaacaggcggtccatgaactcccacatcttctcgccgcgcagcgttaccttaacgccgatcggcatgccttcacggagcttgaagtttgcaacggacttcttagctctgcaaacgatgggcttctggccggtgatcttcgcgaggtcgccggaaatggaatcgatgaccttcgcgttgtcttttgcctcgccggcgccgacattgatcacaattttatcgagcttcgggatctgcataacgctcttgtagccgaacttcgtcatgagagcgggtgcgacctctgctttgtaaaaatcattcagtcttgccattttattccctccagattaaagcgactcgccgcattttttgcaaatgcgctcttttgtgccatcctcaagcactttgtgggtgacacgggtcggcttgccgcagcgggggcaaacaacctggaccttgcaggcgtagatcgcggactctgccttgatgatgccgccggcctcgcccatcttgcggggctttacgtgcttagagacaatgttggcattctctacgatgaccttgccctctttcggggaaacagccatgatcttgcccttcttgccgcggtctttaccgctgaggataacgacggtgtcaccggttttaacatgaactttactcatttcaggacacctccaattaaagaacttccggggcgagggacagaatcttcatgtattccttgtcgcgcagttcgcgagcgaccggcccgaagatacgtgtgcctctggggtttttatcatcacggatgatgacggctgcgttttcgtcgaaacgaatgtaggtgccgtcttcgcggcgaacgccggatgcggatcttacgataaccgccttaactacgtcgcccttcttaacaactccgccgggtgctgcttttttaacagatgctaccacgacgtcgccgatatttgcatacctccggcctgtaccaccgagaacgcggatgcacataagctccttcgctcctgtgttgtcggccaccttgaggtaagtctgctgctgaatcacagtaaattcctccttctgctaaagccgattatttggctttctcgataatctcaaccaggcgccatctcttatccttagagaggggacgagtttccataatacgcactctgtcgccgatgccgcagacgttctcttcgtcatgggcttttctcttaacggtacgcttgatgatcttgttgtaaagcggatgtctgtaactgtcctcaacagcaacaacgattgtcttatccatcttattgctgacgaccttgccgacagttgtctttctcatgtttctttcgctcacgtctaatcctcccttcccttatgcgttctctttgctaagctcattcgcacggataactgtcttaacacgagcgatgtccttcttaaccgccgagatgcgcatcgggttttcgagctggttaatagcgagctggaatctgaggttaaagagctcagccttgaggtcattcagttttgtgttcagctcttctgctgtgagctgtctgatttcagaagctttcattactcttagccctcctcttttgctacaaacttgcacttaatcggaagcttgttgcttgcaaggcgaagtgcctcacgtgcagtctcttccgaaacaccgccgagctcgaacataactctgccgggcttaacgacggctacccagtactccggggaacctttaccggaacccattcgggtttcagccggcttctgtgtgatcggcttgtccgggaaaattttgatccaaactttaccgaaacgcttgcagtaacgcgtcatagcaacacgggctgcttcgatctggttggaggtgatccatgcgggctcaagagcctgaaggccgaagtcgccgtatgtcaccttattgccgcgatatgccttaccggtcaggcgacctctgtgcactctgcggtatttaactctcttaggcagtaacattacgcacgtcctccttctctcttattgtttctgcgggtgttgttgctctcgttgagcacttcgcccttgtacagccaaaccttaacgccgatgcggccgtaggtggtagctgcttctgcaaagccgtaatcgatgtccgcacggatggtctgcagcggaatggtaccgtcatgatactgctcgcttcttgcgatttccgcaccgttcaaacggccggagcacatgatcttgataccctttgcgccgagcttcatggagcggccgatgcactgcttcatcgcacgtctgaatgcgattctcttttcgagctgctgtgcaacgttctctgctacgagctgtgcgtcgaggtccgggcgcttaacttcaacgatgttgataacgaccggcttgccgagctgcttctcgcactgtgcgcggagcttctcgatttctgcgccgcccttaccgatgaccataccgggctttgcgcagtgaatgtgaatgcgaaccttggaggcatcgcgctcaatttcaatcttcggaacacctgcgaggtagagctgcttcttcagcgttttgcggaggttgtagtcctcaacgagcgtatcgccgaaatcagctttctttgcgaaccagcgggaatcccagtctttgatgacgcccacgcgtaagccgtggggattaactttctgacccatttatgtgacctcctcgcttattccttctctttcacaacgagtgtgacatgagaggttctcttcaaaattctgtaagctcttccctgagctctcgggcggattctcttgagcatcggacccgggcaaacgtagcactcggaaacatagaggttgtttctgtccatgttgaagttgttctctgcgtttgcgatcgcgctcttgaggagcttctcgagatcttcgcacgccgccttcggggtgtgcttcaggattgccattgcgaggtcaacgggcttgtttctgatgaggtccagaacgatctcaaccttgcggggagaaattcgggtatacttcagaactgcttttgcttccatcttatactctcctttctcttagcggctggtcttggaaccggcgtgacccttgaaggtgcgggtcggggcgaactcgccgagcttgtgaccgaccatatcttctgtcacgtaaaccggaacgtgcttgcggccgtcatggacggcgattgtgtgaccgacgaaatccgggaagatcatggaagcgcggctccatgtcttgacgatcttcttttcgccgttctcattcattgcctgaatccttttaagcagtgcgggctgacaaaaaggacccttttttaagcttctgctcatgttcttttaagctcctttccgtgccttacttaccgtttctgcgcttaacgatgaacttgttgcttgccttcttcttggaacgagtcttataaccaagagccggcttgccccacggtgtaaccgggcccgggcgaccaacagggctcttgccctcaccgccgccgtgcgggtggtcattcgggttcatgacggaacctctgacggtcggtctccaacccatgtttctcttacggccggccttaccaatcttcacgttctcgtggtcgatattggaaacctggccgacggttgccatgcaggcatccggaacatttctcagctcgccggacgggagtctcagcagagccatgccgttttccttagccatcagctgagccatgatgccggctgcacgggcaagctgtgcgcccttgccgggataaagctcaacgttgtggacaaaggtaccggtggggatatttgcgagcggcagtgcgttgccgggcttaatatctgcatccttaccggagaacacctgatcgccgaccttcaggccgttcggtgcgatgatgtatctcttctcgccgtcttcgtactgcacgagtgcgatgaaagcggaacggttcgggtcgtactcgagggtgaggaccgtagcagccatgtcgttcttctggcgcttgaagtcgatcacacggtacttcttgcggttaccgccgcctctgtggcgaacggtgattctgccgtagctgttgcggccggcagctttattcttcggagccagcaggctcttctccggacccgtcttgctcaatgcgctgaagtccgtggtggacatgttgcggcgagcattcgtagtcggcttatagttaatgattgccattgtgtttcactccttgtttggctttgcgggatcgggcaaattcccattcatgcccttggggttcgaattactcgagccgaattaaaccatggactcgaagaactcgatggacttgctgccctcggtaagggttacaacagcctttttccaagctctggtgtagccttcatatctgccctggcggcggaacttgccgcgaacgttcagggtgttgaccttctgaaccttgacgccgaacagctcttcaaccgccttagcgatttcaatcttgtttgcatcctggcagacttcaaatgtgtacttcttattcgcaacgccggtcatggatttctccgtgatgatggggcgaatgacgatgtcctgcgctttcattatgcgtacacctcctcaattttggagacggcatcctttacaacgatgaacttgtccgcgttgaggatgtcatatacgttcagcgtgttgacctgtgcggtcttaacgcccgggatgttcgctgcggaagcgatgacctgtgcatcgacctcggagagaacgatgagcgccttcttctcgctgccgagcgccttgagcatctcagcaatcttcttcgtcttgtaaccctcggttgcgatggaatcgacaacgatcatttcgttatcctgaaccttgctggagagtgcggacttcatagcgagacgcttcaccttcttgttgagggtgacggtgtaatctctcggcttcggtgcgaacacgatgccgccgtgtgtccactgcggagctctggtggagccctgtcttgcacggcctgtgcccttctgtctccacggctttctgccgccgccggaaacttcggaacgggtgagggcggactgtgtgccctgtctctggtttgcgagatacgccttgaccatatcattcatgacggaaacgttcggctcaataccgaaaacgccttctgcaagctcgatcttttcgacctctttgcctgccatgttcaaaactgctactgtaggcattctttattcctccttcccttacgctttcacgctgtcgcgcagaacaacggtgccgccgttcgggcccggaatagcgcccttaactgcgatgagattgttttctgcgtctaccttgacaacagcgaggttctggactgtgaccttctctgcgccgaggtgaccagccatcttcaggcccttccaaactctggacgggctggagcaagcaccgttggaaccgccgtggcgtgcaaccgggccggaaccgtgggtctctttaagtctctggaagttccagcgcttgatgacgccggcgtaacccttacccttgctggtgcccgttacgtcgaccttgtcgccgtttgcgaacacgtcagccttgatgaggtcgcctacgttgtaagcgccgcaatcgctgaatctgaattccttcagggtcttcttcggggcaacgtcgcccttcttgaagtggccggtgagcggcttgctcacgcgctgcggcttctgatcgccgaagccaacctgaactgcatcgtagccgtcgttttcaacagtcttcttctgtgtgacaacacacggaccggcttcaacaactgttacgggcacgactctgcccttttcgtcgaagatctgcgtcatgccgatcttcttgccgatgattgctttctgcattttgtatcctcctttaggttattggtcggatctctccgacatgaccctcctgcctgtaggttgagcggttatctgccgaacgaaatcagagcttgatttcgatctcaacaccggcggggagctctaagcccatcaacgcctcaacggttttgttgctgggtctcaggatgtcgataagtctcttatgggttctcatctcgaactgctcacggctgtccttgtacttatgaacagcgcgcaggatcgtgacgatctgcttctctgtcggcagcggtaccgggccggaaactcttgcgcccgtgcgctttgcggtctgcacgatcttttcagctgcctgatcgacaacctgatgatcgtaacccttaattctaatcctgatcttttctttgactgccacttaaatcgcctcctgttaaattttagttggcgggcgggggtttttatgaacactggcccgggtgtttcaccaagaagccatataaaaaccggatattcacttttgtgaaatccgggatgcttttgggtcggtgtaaaatcacaaaaccctcataaaaaaccattgatctgccttttttgtccggcctgtgcgccttagaaatcaacgcatggttccgcgcgccactcccgtaggagccgctcagcgtatcaaattgtgtcgcccggtttgaaatcggacatactccacggaaaaaccggcatgtctcagccgcaacctcccgcttcatcgcatatctgtcgcagtcacgcaagtattattataacaggcaaagtatgaaattgcaaccccttttttcgaaaaatttttcagattttctgcgggtttttcagggccttatttcccgcgtttttctttgcacgctatttttcagtataccgtatttttgaaaatttatttttctttttgcggaattttttgaaattttaaaaaatgcagccaagagcagacgctcttggctgcaaaatcttattttatttcattttttgcttaacggagacggttctttgatttaccagcctgcgcgcacaacgtagacgatcatatcgcgtctgccgaatgcggtgcagtcttccagcgtatcgtagtagaggtctgccacgatgtcaccgcacatggccgctccgccggtgtccatggcgtagcagtagccatatgtccacgagccgtccaccgcggtgatgtacagcagtgaaccgtacgggatgcggtttgggtctacggcgacataaccgacctgcggtgtagcgccgatggatgtgacggcgcctgccggtgcatagtatgcagtgcaggagcccgtaaggctatactcaaaggaggacggtgcgccggaagcatccgtgaagacgttctgcttctcttttgtaccgcgcagcacgaccgcgctcttcgcttcctttaaaacttctttcgtcttgacgacgcggttttcttcctcgccgtccgcatacgtgaccgtataggtaactttggcttcgccttccacgccctcggtcttcgtctccgtttcgccctcatagagctcttcggtatcttcgtataccgtgctgtacgcaacagcttcgttctcggtgatctcttcggtgcggatgcgcacaacgcggatcacatcgccgctcgatacgttatcctctgccttcacctgcttttctccctctgcggtcgcgaccaaaatgcggtcgttctcgccgagcgtaatgcccatggcttctacggcatcactgtaattttcagcggcaacgctcttctcgaacgttttgccgtctgccgtaacggtgaggttaaggtaacgctgcacgcggatgcgcataccgtttgtaagtgcggtatccacggccggtgtgacggtgtcgttttcgccgagcgtgatgccggcggctttcagcgcgtcttctacggtgccctcgttgaggtcttccatgcggcgcttgccgtctgccgaaacaaacacacgctttgcacggataatctgcacggcgatgtctgccgtaagcgcggcggtgagatcggcatctgccgtatctcttgcgccgagcgtaatctcgttttccgcaaacacgtcggaaagcgttttgcctttcggggctaaaatcatctgggaggcgttatcctccttgacggaaacgcgcacaaagcgctgcacagtaagcgtgccgttctcaggggagaagtcgtaggtatcgatgtccgaaacgggcgccatgccctcggtctgcgcgcgggaaagaatatcctgcgggttctgaccgatcatactgaatctgtatgtttcggagccgtcatatacggtgatatcggcggtatttgccataaccgtaacaacggaagagatgctgagcgctgcaaccagaacgacgatcagaaggatcttcggcatcaggctcttttgctgttttctaacatgccgcatagctcttgctcctttcaaaaaactgtgaagcgttttgcgcttcgatttggcaaagcttcggcggccaccccgccctcttgctttgcgtccactaccttttctgacctttgaaatacgggtacaaaatgccctttccaaaagtcatttgagagtataatgtgaaaatgatagtctgtcaagttttttgaaaggctatttttgtgcaatatgctgagttacgcatggtgttttaatttacataacaactcatttgatatttttgaaagcgattatttgccttttttacggaacttttttgcggcgctctgtgcaatttgcaaaaattttgcaaaggcaaaaacatcgaacaaattttcttataccttaatattgtatattcttgcatattcattttgatgaatttcgcgcactttctgcgttttcccgttttatgtcgtatattgttccgaatttgatacatttcatgtgctgtgcggcacttttcctttacagcagaaattttcaaaaaactgcggtcaaaaggcaggtatatttcataaaaaacgtgctgtattttgggcagctctccgaaaaaatcgcatttgcggctttggaaagcgggatgtccgtttcaatcgggccgattttgtgtcgaaatgcgtctcactgtgtccgcagaaaaaattatcgtcaaccgatgtatagaatacacatgttaagtttacataacccgcgttttacatagaattttgtttccgtgccgcgcacgtttttgatttgcttcttatatataatagaacatcacgggcagctttttagggccgaccgtgatgctttatctcatgcgttctgtttctttatataagcgataagctcgtttgccgcggtgcggtgtgcgcccacaccggggtggtcacggcagccgcgatttttgaggtcatccgtcagcgacagaaattccgcgttcgcgtcgcccgtttccgctttgtaatcgtctatggccttttgcagcgccgggacaagctccaagccgagcataccgtagatccacacaagacgggcgttggggtaatacccacgcaattgctttaaaaacgcggtcgcgccgtgcgcaaaacgcgcttcgtcttcggggttcagcttaccgtcttccgtgcggcggttctgaaacgtctcgccggttgtttcatctgtccaggcaggctgtgaaaacgcaccgcagtcgtttgtaccgaggttgatgaagacgtaattcggctgccattttgtgaaatcatacggctctttcgcgccgagggcaatgtttttttcgccgctcaaaaggccgcaaagctgcccgtagatgggcggaatggcgctgtttgggtcattgttccagccgcagcacacgccccagccactctgcgatgagacacggatatcggcgtttaaagcacgagacaccatgacagcgtagttattctccgcgctgaagaacatggaaatccagtctgtttccgctttcgcgccgatgtcgccctcgccgctcgtgatactgtcgccgatgaattcgatctttaaattgcgctccggcacgggcaggaattcgccgtctgtttcgacggcgttaatctgcaaaacactctccgggtcggcgttcatggcctgcgtatctttaaagatgcgcacgttcttgaccttttctgggtccatgccgcggaacacgcacacgcgctccgtgcccttctgcgccatgcggcgggagaagaactcgccattcaccataaagctgtaccacggctcgtgaatgtcccaatccgccgtaaattccacccacagctcgctgccgcgcacattaagctctaagcccgccgccgtccagaacagcgtgagcggcgttaacgagccgtttgtgcgcccgtgcacaaggtgcggaacttcgggtaaggtatatcgcttgacttcgctcattttgcctccgcctcggcaagctccttcttataaagatacttgtcaatgtcttccttgatattgtccggaatcttcttttccaccgggaataccgctgcattaattagcgtatcggcatacgtgagcacaatctccagcgttttgccgagtgcctctgcggaaaggaactccatggtatcaaaacggttgtggatatacgccgcaccttttgcaccgtcgcgggagaagttgattgccggaatgccgttatccgcaaacgggatggaatcggaagaataaatgctttggcgcgtcacagcggagaggccgttgattttgagcatgtaatcggtgtagtgtacgagggattcctcgcctgtgaccgccgccgtgttatagccgaggaccggcgcaccgacgtcaacgttaatcatgaaaacgtgatctttcagctcatccttgtggtcgcgcacgaaggccttactgccctcgagtccaatctcctcgctgccgtaccagcagaactttacggtacgcttcggcgggtgctgcgcgaaccaacgcgccgcttccatgttgatgacggagcctgcgccgttatcgtatacgcctttggaaaattcaacggagtcataatgtgcgccgaaggagataatctgctccgggtgctcggtgcccttgatctccgcaatcacattgtgcgacgtgagtgtaatgttcttgttctgtacagtaacctttgcgcgggatgcacctttgttgacgatctccatagcgtccacggtgcgcagctgcactgccggtgcattgccgaacgtacgcagcgcactgcgcagcttgcgctgatgaaggtcggtattctcgaggtcatcgtgaatatcgccgtccatggtgacgacagctgcggcgcccgcttccatcaggctgcggtacagcggcacgcgcaggaagccgttgacgagcacaatcttgcccttgacattcaacaggtcgaccggaagcgcgttttccacgtagacaaaatccgccgtaaggccgtctgcggcggtgctttccgcgcactggtaaccgcgcacggtgtagctcttgcggtacggctccagaatctcgaaggtcgcttccacttcggcggattcgatctcaaacggctcaatcacagcggacagaccgaagctttcacactccgctttcaggatttccgcggcttttaattcttccgaggagccggccacgcgcgtaaagccgattttatcgagcagtgcgaacgcacggttttcgtcatattttttcaatgtaaacaactgcctttctctttgattttatacggtatttattcctattatatagtatacaaaataaattgcaagcaattttgcgctaaaatgaaagtgtacggctttaaaaatgcaaaaagcagggtcattccccgcttttagagaataatcctgcaattttgcatatgaattcacttaaaatgcttgtgtgcagacgattttaatctcttcgatctccataccggtctggccgaagtagagcttgagataattcgtgccgccgaacagcacgccgatgtcctgctctgcggtaacgacctcgccgttcgtgccgttgatcatgaccatgccgcgcaggttaccgtcgatgaagatagacatcggaatctgcgccacttcattggcgtttgcttttacgcgcatgacaaacttatagaggccgtttttcttatagcggatgccgagaacggtggaagcgcctttttccgtattgactgcggaaatgtcgagcggaacttcgtcatcgatgaactgatactcgccgctgaaatcgacgtaatcttcgctcgccttctccgcttctgcggcttcgcgctcctcatcgctcatgcggccaaggctgcgctccatcacaggcgagttcatcacggtgcggcagatattcatcgcagagcgcacgagcgcgtcacgcgtcagtctgccgtctgcaagggcgtcgtccaaattatcgtgttggctgttcgaggcggcgtccgcgttaaccatgttgaggtcattctgcgcgcgcacctgtgcggcgacgttctcgcgggtggcttcttcgccctcgcgatcgttgccctttgcccaccagtcggtcataacggtacctgtgaagccccactcgtcgcgcaagatggtcgtgagcaggtcgaagttgctggccgtccaaacgccgttcagaccaccgtaggtggacatgacggagtatgcgccgccctcttttacggccgtttcaaacgcgcgcaggtaaatttcacgcagtgcgcgctcggaaaggacggaatcgatctcggttctcttaaactcctggttgttgcaggcaaagtgcttgatggtgccggtgacaccgaagcggcgcataccgcgcagctgtgcggcggcgagcttgccggtgagcagcgggtcctccgagaaatactcaaagtttctgccgtttaaagggctgcggtggatattgagacccgggccgagaagtgtgtcgacgtggtttttgcgctgctccttgccctgcatggcgaaaagttcttcattcagcttttcgttaaaggtgcaggcaagcaaggtgccgttcggcaggctgaatgcgatggtgccgcagtccatacgaatgccggaggggccgtctgcacagcaggctgtgggaatgccgaagttgacgaggttttccgtgacgccgccgaacgcgcctgcggtgcccgccgtgaccttcggagagttcatgccctcgccgcgcataaggcagatgaggtcttcgtcggaaagctgcgctacaaagtcttccagctccgctttgccgtcgaatacatcgccgagcttgatgcccttgtcgcccgtatacggctttgcaggctttaatgccgccgcgctgcgggccgccatatcgtattcgcgctgcggtgcgggctcgaatgcgatcgtgttattgtgattcaccatgcggtcaaacttcgtgaccggcgcgcacgcctgcacgcatgtgcgggtgacggtatcttctttcacttcaaagctgccggagagctttgcgcagcgcacgcagccgcccgtgtagacgttatacgcgccgctttcaagcacatagcagaatctgtgtcccgtaacgccgctgtcgtcgtaggacgcaagatttgcgattgggaacgtgagcgtaagcgtttcgctttcgcccggctgcagggtttcggtctttgcgaatgcggcgaggcttcttacggccttgccgagcttgccctgcggtgcttcaacgaagacggtgatgacctctttgccctgcacgtcgccggtgtttttcacagtgactttctctgtaacggtctcgccgtcgaaatcgaagctttcaaccgtgcgggtgaaggtcgtgtagctgagaccgtagccgaacggatacagcacacagtcttttgcgaacgtctcaaagtagcggtagccgacgtagatgtcttctttataaatgacccgtgtgggatcaccgaagccctctgtggacggataatcgctgatgtcaagcgcgatggtgtcgctcagcttgccgcacggcgtgacagtgcctgtgagaacatctgcagcgcctgcgccgccctcttggccgccctgccagacgtacagcacagcggcgggatcgtattctttcacccacttcatatcgatgatattgccgacgttcagcagaaccgcaacacgcttgaacgcgccgcaagcctcttttaacatctgatgctcggcggccgttaagagatagctgccctctgcggcgctgttgtccttatcttcacccgcggtgcggccgatgatgacaacggcgatatcggactttgcagcagcctgctcggcgagctctttcgtgacgggcatttcctcctgacaccacggctcctgtgcccagcccatgcccttttcaaacggatggtccttcagccagtcgcggtaggtctgctccagctcctcgttgacggaaatgtctttgttttcttttaaagcgtccagaatattcgtgacgtagcgggtattgactgcgccgccggagcctgtgccgctcttataatagtcgaactgaattctgccgaacacggaaacgcgctcaccctttcggattggcagcgccttgtcgtcatttttcagcagcacgcagccttccgccacagcctgacgcgccagcgcggcatactcgttccaatcgatcttatacggattgctcattttatttttcctttctgcatgatctatgccgtttacggtgtattctctttgttataatgataaacgattttgtggattttatcaagccgcgcagttaagtttctgtaaaaaaatcacgtgaacgaaaattttcgttgtaaaacgctttaaaaacggttatgatacatataaatagaaaccctttacggaaggagttaccgttatgcctgctttttatacccattatcgctttggctgcgatgttttaaaacagctgccggaggacatccgcagcatttgcaccgcgcaccgcgggctttttgacattggcttacacggaccggacatctactttttctatcgacccgttctgccgaacaaggtgaaccgcatcggctatgcggcacacaagcgctccgggcgctactttttacagcgcgcacagaaggtcattgcgtctgcacatgacaaagatgctgcccgcgcgtatttctacgggcttttgtgccactttacgctggattctatctgccacccgtacatccacacggcgatgaaagaattcaacgtcacgcacgcggcgacggagaccgctttcgaccgcgctttgttactcaaagacggcaaagacccacagcactttgacccgtgcggtcattttgaagtgaacacgcgcaacgccgccgtgatcacgcccttctacacgccggaagctactgtggcgctgaccgaaaagagcatctcctccatggtattctacggccgtgtgctgttcacgccgaacaaggcgctgcgccgcgccattgacaccgggctttacatcacgttccaccacgacgccattgccgatatgatgatgaccacgcaggacgtgccgagctgtaagctgtgcacggagcaccttatcgaactgtacggcaaagcactggagcttgcgaaaacgcttttcccggctgcgcaaaagctgctccaaaacgaaaaagtctcctgtccggagcttgaccgcacatttgacggctgattttaaattttcaccaaaatacccgccatgcaggaaccaaaacgttctgcacggcgggcattttatttcccgggttttaccctatagcaaaagctcccgttcacgaaagcctgtgaacgggagctttgattttcacttacagatccgatcagatttccggctctaccagatggcaggcgcagaaatgacccggacgaatttcacgcagctgcggcttcgactctctgcacttgtcgcaggcgaccgggcaacggccggcaaagttgcagcccttcggcgtgttgatcgggctcggcacgtcgccggaaagaatctggcggtgcttctgcgcttctgcactcgggtccggaatcggcactgcggaaagcagagccttggaatacggatgcagcgtgtgcgcatacagatcgtcggaagaagcgagctcaacgacattgccgaggtacataacggcgatacggtcgctgatgtacttgacgatgttgaggtcgtgcgcaatgaagaggaacgtcagtccgagctgctgctgcaggtcgtgcagcaggttgatgatctgggactggatggaaacgtccagtgctgagatcggctcatcgcacacgatgaattccggctcgatagcgagcgcacgggcaatgccgatacgctggcgctgaccgccggagaactcatgcgggaaacggttggcgtgctctttgttcaggccgaccagctcgaggagctcgtatacgcgctcctgacggcgctttgcgtcgtacatgccgtggatgaccataccctcttcaatgatggaggaaacggtcatacgcggatccagagaagcgtacggatcctggaaaatgatctgcgcttttttcgcatacttgaaacgcgttgcggcgtttttcagattcagttcttcgccggcatagtagagcttgccggacgttgcgggataaatgcccatggccacacggccgagcgtggacttgccgcagccggactcaccgacaaggccgagcgtttcgcccttataaatatcgagagaaatgtggtcgacggccttcagcataccgccggaaaccttaaagtgcttgcatacgtcgtccagaacgatcagtttttcattactgctcatccggctcacccctttctgctgcgctcgggcaatcgggatggagcagccagcatgctgcctcatgaccctcgcccaccttgaataccggcggctgctcctcatgacaaatcttcatgcagtgtgtgcagcgagcaccgaaaccgcagcccttcggcgggttcagcaaatccggcggtgtgccggggatggaaacaaggcgctgggtcttgttcatatccacggacggcaggctctttaacaatgcctgcgtgtacgggtgcgcattgcggtagaaaatatcctcgcaggtgccggtctctacaaccttacctgcatacatgaccgccacgcggtctgccatggacgccacgacgccgaggtcgtgcgtgatgaggataatcgcggtgctggtcttctctttgatctcggcgagcagatccataatctgcgcctgaatggtcacgtccagtgcggtggtcggctcatcggcaatgaggagcttcgggttgcaggaaagtgccattgcaatcatggcacgctgacgcatgccgccggagaattcgtgcggatactgctttgcacgctcttccgggttcggaatgttaacaagggagaggtacttaatggcttccgccttcgcctctgccttggacagatggcggtggtgctgaatggcctcgacaatctgcttgccgacaggctttgtcgggttcaggcaggtcatcgggtcctggaagatcatggaaacttccttgccgcgaatcttctgcatttctttttcgtttgcggctacgatgtcgtgctcgccgagctgcacgctgccctctttaattcttgcgggcggcatggggttcagcttcatgatggtctgcgccgtgacactcttgccgcagccggactcaccgacgatggcgagcacttcgccctcgctcagcgagaatgtgacgccgcggacagccttgacctcaccggcgtaggtatcgaaggaaacgtgcaggttctgcacatctaatactttattcatgttgaattacctcctcaagcgcgggtcaaatgcatcgcgcaggccgtcgcccaacaggttgaaggaaagcattgtaaggctgatggcaactgccggcacaacaagctggtacggatacgtcatgaacacggcctgaccgccctgtgccagaacgccccaagacggctgcggaaccggaacaccgagaccgatgtaggaaaggaatgcctcggtgaagatcgcgctcggaattgcgagggtgacgttgatgatgataacggaaagcgcattcggaatgaggtgctttgcaatgattctggagctctttgcgcccatggcttctgccgccacgatatactcctgactcttgagctggagcacctgaccacgcacaagacgtgccatgccggtccagccggtgatgccgtaggcgacgaccatggtgaagatgcccttcgggagcaccatcatcaaaaggataacgacgatgaggtacggaataccgttgacgatctccacgatacgcatcatgatggtatcaaccgcgccgccgatgtaaccggaaataccgccgtagatcaggccgacgatgaggttgacgaacacggctgcgaacgcgatcatcagagagacgcggccgccttcaaaggcgcgcaggaaaaggtcacggccgagattatcggtgccgaaatagtgtacatggtgctgtccctcatagcgggagtctgtacaaactgtcatgaagcccttgttgacttcgccaaggtgctgttcgcggctctcaaacggagagaagaacggcacgatgatgcaggaaaggatgaggagcacgatgatgaagaagcacacaacggcaactttgtttttcatcagtctgccgatggcgtctttccagaaggtcgtgctcgggcgggaaatgccctcgcggcgagcggagtcggaaccgatccactcaaaacggcttttatctatctgtgtcatactcagccctccaatttcacgcgcggatcaatgagaccatacgcgatatcgactacgaggttcgcaacaatgaggaacgcgccgtagaaaaccgtggtgccgcagatcatggtgtaatcgagaccctgaatgctctgcacgaaatacttgccgaggcccggaataccgaaaacgctttctacgacgaagccgccggtgaggatacctgccgtgatcgggccgaggaccgtgacgaccggcatgatggcgttgcgcattgcatgcttaaagatgatgccgctctgggaaaggccctttgccttagcggtcttgatgtaatcctgaccgagaacgtccagcatgctggtacgcatcagacgggagatcgttgcgagagaaccgaagccgagtgcgatgaccgggagaatgtggctgttgaagccttcccagccggtaacggcgaaaaggcgcatgcccgttgcctgatacagcttgaggccgaggaaatactgcaaaacagaggccacaacgaacgacggaacggaaacaccgagcagtgcaataatcatggcaactgtatcggataccttgccgcgcttaatagctgcaagtgtgccgaggagtacgccgccgatgaaggcgaagcaaatggaacggataccgacgtcaaacgaaatggcaaatgcttcggtgatcatcaatgtgaccgcacggttataggtaagggaaacgccaaggtcgccctgtacaacattaccgatataaatgaagaactgctgccatacgggcttatcaagaccgtatttcgcataaagcgcttccatctgtgccgcgggaagctgcttatcaccggtgaacgggtcgcccggaagaagctgcatcatgaagaatgtgatcgcgatcaacaggaacagggtaacaatggaatagcccacgcgctttaagatgtacttagtcatgtgcaatccacctctctttgatagtttaatagaatgattaaaggttatgcggacaaagccgccgacgtttttgggaccgatgccgccaaagcgtccgcggccttgtccgataaacgacaatatgacaatataacaaaaaatgtgcgcaaaagctcggaatttattctgccgcctttggcacatcattttgtgaacttagcgaatgcagcttgtattgccgttcgcggaaattcccgaaatttcggggaaacaaggctttactcacccaacacagtgatgcgtatatcacctaaaagtgttgaagtaaaagattaaaagaataaatacagttcggtgcggcgcacccttttaagatacaccgcaagccgtaaccgtatttgaatttcttttaagtatccgggtcagcgcccgtaaggttttcgattaggaaagctttacgtaaacagcgttgatatcctggaacgtagatctgtgcatgccgcccttgatcttatcggagcaagcataggacgaagctctccagaaggtcgggccgatcgggagctgatccgcaataatctgctcgcactcaacgaagtaggattcacgcttttcgaggtctgtctccttggctgcgaggtcgatgagctcatcgtatctctcgttggagaagccggtctggttgttgccgccgtcggtgacccacaggtcaaggaaggtgttcgggtcgttgtagtccgggccccaaccggtgacggacataacatagttgccggtcttacggttctgagaaccctgcttggtgatcatggagttaacggtaacctcgatgccgagaacctgtctccactgctcctgatagaaggaagcttctgcaatagccgtagcggagtcgccgcagtcgatggagaggtgagcggagagatcgtctaccgtgcagccgagctcggagagagccgtcgcaagatattccttagccttttcctggtcacgggacggcgcatacagctcgccgaccttacctgcaaaggaggtgccgtcagcagcggaaacaccgggcgccgtgaaggaagtcatcggctcgttatcgttctgccaaaccgtatcaatttccttctgcgcgtcaattgcattgaacagtgcacgacggagatttacattggagagatactggtcattgttgttgaagtaaatgtagaatgcggtaccatccgtataagactgaatcgtagcacctgctgctgtagcctgcttgatgagttcgccggtgccgagaccgaccatatcaaggtcgcctgcgaggaaggaggagagagctgcgttggcatcggtgatgatcttccaatcgatctcttcaacttctacgtctgctgcgccgtgccatgcatcgtttttctgcataacgatcttatcgttgtggctccactcggtaagagcgaacgggccgttcgtgcagaagtactgcgcttcggtggagtagaggtctgcgcctacagcctcatagaatctctgattgatcggagcaagagtgccgaaggagaacaggaacagtgcgtacggagtcggctgctccatggtaacttcgagggtataatcatcgacaacctttacaccaacttcgtcccaagcaacttcaccgttgaagtacttttcagcgttcttgatgaagtagaggaagtaagcgtaatcagaagcaacatccgggttcaaagcctgactccaagcaaactcgaagtcattcgccgtaaccgggtcgccgtttgtccaaacgccgtccttacggaggtggaaggtgtaggtgagggtatcctcatcgtagtcccagctctcggctgcgcccggagccgtattgtcctcgtcatccagcgtaacaaggcactcatacatgtgcttgaacaaggagaactcgatggcgtatgtggaggtcagggtgttcaggcctgtcggctccatgcctgcgttcaggctgatggtctttgccgcgtctacggtcttcggggtgaaggttgccgtagcgtcaccggatgcagccggggtggaatctccggaggcggtggactcggtggattctgcgctgctttcagaagctgcgatgctctcggtagatgtcttggagctgttgccgccgcacccagcgaatgcggaaacaaccaacgccgcggacagaaccagagctaaaacctttttcagtttcatttcttgttcctcctaatgtgataggtgatagaattatgaaattttcgttcaaagaaaattcatattgcatacataatacagcataaagcgctaaatcgcaagtggcaaaactatggaaatcctgtcctaatttttgtgtatttttgtgaattatgaccttgaggcatatacacaccgtgcagtttttcatgatagtattgcaattttgtaattaaatccgcccaaaatccgccaaaaaaagccgcgtcaggggtgtgtcctcgacaaaaatacaagtttccgtgtattgtgcacgaacgacggatagaagccgaattcctgcattttacagcgaaatccgacaagttttctcctgtttttgaaagagaacgcgtaaaaatgcagtttacccggaaaatatgttggacattttcgaagttttgtccacctgcctctcccctatgtgcaccgtttcctatgcgtttttttttgctgcaaagccatcctatatataatagtatatgatattccaatatcgatatagaatacggatttttgctttagtttgcatcagatgtccttcactatgcatgcttaccggtttttgtgcaactgcgggaaacaaaacagaacctcttcgccgtgcagacgaagaggttccgtaatgcaaatttaaaatcagccgtggatggagtagttcggggcttccttcgtaatctgaatgtcgtgcggatggctttccttcaaacccgcacccgtaatgcgcacgaactgtgccttctcgtgcatttccgggatatttgcgcagcccacataacccatgccggagcgcagaccgccgaccatctgataaatggtatctgcgagcggtcccttataaggcacgcggccctcgacgccttccggaacgtacttcttgttgtttgcctggaagtagcggtcgctggagcccttacccatagcgcccagagagcccatgccgcggtagaccttaaactgtctgccctgatagagctcgtactcgcccggggtctccttgcagcctgccacaagggagccgagcataacaacgcttgcacctgctgcgagcgccttgacgatatcaccgctgtacttgatgccgccgtctgcgataaccggaacgccgtattctgccgccgcgcatgctgcgtcatacacagccgtgacctgcggcacaccgataccggcaaccacacgggtggtgcagatggagcccgggccgatgccgatctttacgcagtctgcgccggcttcgataagcgcacgggtgccttctgccgttgcaacgttacccgcaatgagctggaggtccgggtatgctttcttgacctttttcactgcttcgatgatgccgctgttgtggccgtgtgcagaatcgagcacgacaacgtcgacctgtgcttccacaagggcagcaacgcggtccagaacatcagctgtagcgccgatagccgcgccgcagagcagacggccgccttcgtctcttgcggagttcgggtactgcacggctttttcaatatctttgatcgtgatgagacccttcaaatagcccttttcatcgacaatcggaagcttttcaattctgtggcggcgcaggatctcctgtgcatccttgagggtggtaccgaccggcgcggtgacgaggtgatccttcgtcatgacgttttcaatcttctggtcgaaatcggagccggacatgaagcgcaggtcgcggttcgtgatgatgccgacgagcttgccgttctcgcagatcggcacgccggagatcttgtagcggcccatgaggttatccgcttcgcgcacggtgttctccggcgcaaggaagaacggatcaacgataacgccgttctcggagcgcttgaccatatcgacctgatcggcctgacgctcaatggacatgttcttgtgaatgatgccgatgccgccctcacgcgcaatggcaatggccatatccgcttccgtgacggtatccatagccgccgtcataatgggggtgttcagcttgatcttctttgtgagatgagtggaaatgtctacctgactgggcagtacgtgtgattctgccggaatcagaagaacgtcgtcaaaggtgagcccctctttgacaaacttagaggtgaattctgtgttcagcataccgtcaaccatcctttcgccttgtgcaccgtgttttgttgtctttatgcggtaatttccgcataccgcatagaaaaaatttcccggcaagccggagaaaatatattatttgatattagattgtaccactttcgcggtacattttcaactgttttgtcctcgaaaaaacagagatacccgctgagcgttctatgcgctttttagggaaaaaccacaaaaagcggttttatatggctaacttccgggtttcggggcgatttttgcaggattttgacggaccgaacttctaaaaagcactccagttgtaaaaaacttcatacagaaattacaaaatatcttgacactccgctccgtttgatataccctaaaactactatatcaaaagcatatctcccgtacccgacatattcggcgcacggcacattttccgcgcttcccctattacactcggccctattgggctaaaaggatggtttttcatgaacaagcttcgcagattgcgctccctctccccggagatggcggaaacgctgcgccttgccggcgtgcagggcattttttgggcggctatggcggtaggcaattatcaaacagtctacctgcaaagcatcggctttcccgctacggatttcggcttattaaacgccattgcctgtgccgtcgctatttttgccatgacgttttggggcacggtgagcgaccgtatcggcagcgtgcgcaaaattgtcattttaacgctgacgctcggctgcggccttttcatttttgtgccactcattccgacggggcaatcctactcgacgctattatttctaatcttgatcccgatcatcaactttttccgcgtaccgatgtcgccgtttgtcgataaccttacggtgcgcaactgtgcggagcatcgactgaattacggcatggtacgcagcagcggctcgcttttatttgccattgccggtgttatcacggtaaacgcgctcattcctgcggcgggtgtgccttcgaccttctgggtgatgggcattgtgatgattcccgccattgtactgacgtatttctgctttgagccgcagagcggcaagcgtgtgaaaaagagcgcagcgggtgccggcgtactgctgaaaaactacgcatacatggcgtttctcatttttgcgttctttttccagatggccgtggcgtttgaagcgaactttttgacgtattacatggcggatatccagattgataccgtcaatcttgggctcattctctccgtgcgcgctatgatggaaatcccgtttctgttcttcatcggccgcctgcgccgctatatcaagatgaaatacctcatcatgctttctgcaattttgatggcgacagagtgtctgtgcttctgcttccttgtgaattcgctgccgactatgttggtatttgccgcgttttacggccttggcaacggtgcatttctcggcacaggcacgaactatatctatgagcttgcacccgtggagctgcgtgccacggcgcacagcctgttcatttccgtggcgcaaatctccggcattctcggcaacctgctcggcggcgttctgtttgacaccatcggcggcaaagcgttctatggcgtaacagcctgcgtattcctcgtttccgttgcgatcttcgccgcaagctttctcttccaccgcaataaaaaagaaacggctgcggcatgaccttcaaatactctgtgctcttaaaggctcgcttcggcgggccttttgttttgtctgaaaacacacgccttttttgtatatgccgaaatgacgtttccaatccattttacgctgctttttagcgtactcgcacgcaacatgtcgtaaaaatgaatgcgtaaagtatattgcctttccatatatagctgataccttgtgaaacgctttgctttctccactataccgtgtgcttttccacactttccaccgagttttccacaccataattttgcagaattatgtatgtttatacgcaacttcgttttgcagctgtatggctgtttgttcttgtatcgtggacacaactgcgtatatccgtcgaaatatgtccgcaaccggagatacatacgttcgaaattgctgaatattctttcactcatttaagttgaaaatcggttttccacatatcctcagaaaaagttttgcacaagacgatgacgaaaactgccgccttttaaaagttcgtgttctttcgttccgctttgcatcatttctcctattttttaatacggtcgtcagagcaagtctttctataagcagacgacaaaagaggcacacgcattttactttgcatgtgcctcttttatcacctatttaatttgcaaaaatcactttttcgggacgataacttccttgccgcccatgtacggacgcagagcttccgggatgcgaacgctgccgtctgcctgaaggttgttctcaaggaatgcgataagcatacgcggcggtgcaacaacggtgttgttcagcgtgtgggcaaggtacttgccgttttcaccgtttacgcggatgcgcaggcggcgcgcctgtgcgtcaccgaggttggagcagctgccgacctcaaaatacttcttctggcgcggggaccacgcttcaacgtccacagacttaaccttaaggtctgcgaggtcgccggagcagcactcgagcgtgcggaccgggatatccatgctgcggaacaggtctacggtgttcttccagagcttatcataccacttcatggagtcttccggcttgcagacgacaatcatttcctgcttttcaaactggtgaatacggtaaacgccgcgctcctcgatgccgtgtgcacctttttccttacggaagcacggagaatagctggtcagtgtgagcggcagttcggcttccggcaggatctggtcgatgaatttaccgatcatggagtgctcgctggtaccgacgagatacaggtcttcaccctcgatcttgtacatcatggaatccatttccgcaaagctcataacgccggtaacgacgtcgctgcgaatcatatacggcgggataacatacgtgaagccgcggtcaatcataaaatcgcgcgcatacgcgataacggcagagtgcagacgcgcgatgtcgcccatcagataatagaagccgttacccgcaacgcggcgtgcagcgtccagatcgataccgttgaagctttccatgatctccgtgtggtacggaaccgggaaatccggcacgaccggctcgccgaaacgctcaacctcgacgttttcgctgtcgtctttgccgaccggcacgctggcgtcgatgatattcgggatcgtcatcatgatcttgaggatcttctcgtcgagctccttttccttcgcttctgcggcgatgagctcatcagactgtgccttgacctgtgccttgacctcctcagcctcggccttcttaccctggcccatcagcgcaccgatctgcttggagagcttatttctggaagcgcgcaggctgtcggccttctgctgcgtagcgcgtttttcggcgtccagctcgatgacttcatcgacaagcggaagcttcgcgtcttggaactttttcttgatattctcgcggacaatgtccgggttttctctcaaaaacttaatatcgatcattttggaacattcctttcggttatttgtggctttttaagcatttttcttggttcttgggctggtttcgcatcgcgaaactccaataggcaaaaaagtatttcgagctccacggagctcgaccatggggtctacccttggaacacacagtcttttgaaaaaggccggcgaaaactttatttgccccgttcactttagctttgtgctttactcgcccgttttatcggtcaatttcaaatcatacagcaggttcttgaggtcttcctcgccataaaactcgattgtcagcgccgcctttttctttgtgccggagatatgcaccacacggtttaaaacgtcacgaagtgcaagctcggcctcgtcatagtagcggatgcggcgctttgcgggtttatctgccttttccggcttctcctcgtttgcgcgctttgccattttttccagctcgcgcacggagatgccctccatggtcacgcgtcttgccgccgctttcatctggtcttcgtttttgaagctcagcagcgttctggcatggcccgcagtcatttcgccgcgctccagcatgttctgcatatcctccggcagattcaaaagccgcagtgcattcgtgatcgccgggcgggatttgcccactgtttttgcaatctcctcctgcgtaaactcgaagttatccatcagcatcttgtaaccgtttgcttcttccagcggcttcaaatcctcacgctgcaagttctcaatcagcgccagctgcatcacttcgctgtccgtcaggtcgcggataaccgccggtacggtcgtcagccctgccatgcgagaagcacgccagcgtcgttcacccgcaacgatctgatagccgccggaaagcagtgggcgcaccaagattggttgcaaaacgccgtgctgcgcaatagaatccgccagctcggtcatcgcgccgtcatcaaagctctggcgcggctgcgtacggttcggctctaagtcgtttatgctgagctccaccgcgccggcatcatcctcacgcgcattgtcatagaaaattgcgtccagccccttgccgaggcctcctttttttgccattgcgaaagaccatctccttcttgtcgcatttataccgataccacacgattttgcgcatgaaaccggtttttccgccgaaatcagcggtttttcttcaaaatttcgtccgcaagcgcaccgtatgcgatgcagcctttgttggatttatcgtagtacaagatcggctgtccgtaactcggcgcctcggaaagacgcactgtgcgcggaatgactgttgcaaacaccttgcgcgggaaatactttttgatttccgtcacaacctgctgcgtcaggttcagtctgccgtcatacatcgtcagcaaaacaccttccagctctaaacggtcgttgtaacggcgcttcacagcctgcacggagctcatcagctgcgaaaggccctccaacgcgtagtattcgcactgtaccgggatcaaaacagagtccgaagcattcagcgcgttcgttgtaataagccccagcgacggcgggcaatcgatgatgatatagtcaaattctgtgcgcagtggcgccaaagccttctttaaaacggactcgcgcccgttcaaatccgcaagctcaatctctgccgcagccagatcggccttggaaggaatgacagaaagcttttcaaattttgtttcgagaacggcatcttcgccctttgccccgttaatgagaatatcatacgaggtcgttttcagcgttcggcgatcaaaacctacgccgctcgtggagttgccctgcgggtcaatatcgaccaaaagcgtctttttcccttttgcgccgagccatgcggcaatatttactgcgctggtcgtcttgcccacgccgcctttttggttcgccacggcaattaccttgctcatgtaccgcgcccctttccttcttctttctattatataggatattgtagcacatatccggcacagaataaagagaaaagttcatttttttgcaatgtttcatgtgaaacagccggattttatcgcgttttggcaaattttgatgtttcatgtgaaacatttgcagttttaaaccgaaaaaagcattaaaaacacagaaggactgccggcatttgcagacaatccttctgtgttgtgggaaatgaataagggaatgggtttacctcgtactcaatattaagttctggcgcatcagcttgccttgtgtgcagctgattttgggatgcggacgacgcattcgtaatactcatccgtttccttacgctgaaaagccgcgccgatgccggcctctttcatggtttggacagcatggtcgatcgtgttcaggaacaggcgaacatctttcacaataaatgtcctcttcggccttttcgcctgtccctcctgctccaaaagtgatttgatatacatatccgtctgcgccacgttcattttgcgctctatgacagtcttcaacgctgccatgcgcttttccggatcttccattctaagcaaagcacgtgcatgacgctccgtaaggtggttttccagcaccatgcgctgctcttcgccggaaagccgcagcaaacggatcttgtttgcaagcgacggctggctcatgccgagcctacgtgcggtctcctcctgcgtcatagagcggtcctgcatcaaagcatagattgcagcagcttcctcaaagaagttcagatcactgcgctgcatattttcaataagcgccaacaccgcgccgtcttgtggagaaagctcctgcacaatggccgggatggttttgagccccgccatacgcgaagcacgccagcggcgctcccctgccaccaaaatgtagcggtcgcggtctctgcgcacaagaatcggctgcaaaacgccgttttgacgaatgctttctgcgagctgcaaaagctcgtcctgcggaaaatccaatcgcggctgtgcaggatttggcacaatcttatccggtgaaagctccaaaagctttttcttttccgtaaacgccatacgccgcacctcctgcttgaatttccagtgtaagaagttgtcctttgtgagggcttgttctctttacaggaaatagcttaccacaatgaaaaggcagattttgccgcaatctgtcaccgtacaaaaagtttttcttgctttttcaaaacgcggtgctataataatagaaatattcaaacggaaaagcgtcgaaaaagcgcatattcccgccatttttagagaaaaggagcgaaagaacatgatctatgcagaaaccgaaatcaagctgaaaaacgggtgcaccgccgtcgtacgcaatgcacgccccgaagatgccaagcaaacgattgaatacctgcgcaccgtttcgggcgaatctccgtttttattgcgtgagccggatgaggtgaatttcaccgtcgaaaaagaacgcgcaatattgcaaaacaaagcggaaagtccaaatgagatcatgctcaccgcttatgtgaacggcgagcttgccggcaactgttcgctggcgtcgcaaggtgataagcgccgcatgaagcaccgctgctgtgtttccattgcgttatatgaaaaatattgcaatcttgggcttggacgtatattattaagtacagtcttggggcttgcaaagcaatgcggatacacacaagcggagttgggcgtgattgaaggcaacgagcgtgcaaagcatgtttacgaaagcctcggatttaaagaatacggctttttgccaaatgctatgcactacaaagacggtgccacgcgcggcgaatacttcatggtgaaagagttataagttccacgtgaaactacagcaggagaatagaatggaaaacaaagatcaatggctcaactgggccatcgaactgcaaggcttagcgcaggcaggtttaacctacggcaaagatgtttttgacctcgagcgctacacgcgtattcgtgaaattgccgccgagatcttgtctatgaaaagcgagattccggtagaaaccgttaaaaatctattctgcaacgaaaccgggtaccaaacgccaaagttagatacccgcgcggcaattattgaaaacgaccgaattttactggtacgcgagcaaaacggcaagtggtctttgcccggaggttgggtcgatgtggataaatccgttggagaaaacgctgttaaagaggttttggaagaagccggattgcgcgttacagcagaccgtatcattgccgtacaggaccgaaaccggcacaatttgccgcgctacgcctataacatctgcaaaattttctttttatgcacgcgtacaggcggtgaatttcaagccaacgccgaaacgaccgaaagccgatggtatgcggaagatgaattgccgcagcttgcggaggaaaagaacaacgcagagcaaattcaaatgtgctttgcagcttcccgcaatccaaactggcacattctttttgattaaaaaacggctatacaagagtttctccttgcatagccgtttttatatcgtctttcttacaaatactttttaaagcccttcacttcactgtagccgatggcatcatagaatttatgcgcgccggtacgctgcaggccggagaccaaaatgcagtagtggcactctttttccttgccccacgtctcaatggcttcaaacatgccgcgtccaatgccttttccgcggtacttttcgtccgtaacaacattttcaacgagtaaaatcggcttgcaggtatcgcaaatatcttcaaatacaacaccaatcaaagagccacaaagatcgccgttttccgtattttcagctacaagcaagtagttatcctcatttttttcgatttttttcatcttttccgccattttcagcggatctgccatcgcatcggaaagctgcgccaaaagtgggttcagcttcggaatgtcgttcaattcggctttacggtaaataatactcattttgcttcccctttctgctctaaaaataacggttttttggtgatcgtgccgccgtgacgcggatacattttcggtgtaaagcgcagtttgcgcattacggcaacaaagcgctcgctctgttcctcatccggcagaatgaaaggaaccgtttttacaacatcgcatccaagcgaagagattgcttttcgggcatattccagttcatccggcaagctcggacctttcatcgcggcaaaatagcccttcattttgatgagcggaatgcaatattccgccaaaatattcatgtttgcgaccgcacgagccgttgcaacatcaaagctttcacgtagcttagcgtcttttccggcttcttctgcgcgtttatgaatcgtctcggcttcaatgccgatggcatcacacacttcgcgcagaaaaacaagccgtttattcaaagaatccagcagcgtcagttcaatgtccgggcgcatgatcttgagcggaatgccgggaaagcccgcaccggtgcctacgtctataactttcgcattctttttaatttcaagcgctttcagcagcgtcaggctatccacaaaatgttttatgactgcctcttccgggtcggtgatagccgtgagattcatcacggtattgcgctccaaaagcagatcaagatagatctggaactgctccgcctgtgcaggcgaaacctttacgccaatctcttttgcttttgaaattagaagatttttaatatccataatcaaaatttcagcccgcataaagcaaagctgccctttcagttttgttttataaatattatagcaattaagttcaattcattacatgttaaatgtagcggacattacttttcttcattgtgtgcagagagccaaatcagcagcacggaaatatccgccggggaaacgccggaaatacgccctgcctgtcccacgttttctgggcgcacgcgattgagtttttcctgtgcctcaagtcgcaggcccgaaatctcggagtagttgatctcttttggcagcaacttcttttccaaccggcgcatttcggcaatgtcctgcagctggcgcttgatgtagccctcatatttaagcgccgtctccacgctttcaaaaatctcacgcgggtaattcgggcgttcggtgtcgataggtgtcaggtccgcataggtcacctgcgggcggcgcagcagctcagaaaggcgcacacccgtcgtgaccggcgatgtttcacatgaaaccagcacttcgttcagcgcgtccgtcggcgaaaacaccgttttctccgcgcgcttcatctccgcttctttctgcgcctgcttcttttcaaacttcgcccaacggcggtcatcgatgagtcccagctcgcggccgattggcgtcagtcgctcatcggcgttatcctgccgaagcacaagacggtattcggagcgcgaggtcatcatgcgatacgggtcggtgacgccctttgtgatgaggtcgtcgatgagcgtgccgatgtacgagcccgcgcgatccaaaataagcggatcacgatttaagactttcagcgcagcatttgcacctgccacaaaaccctgcgcggcggcttcttcatagccggaactgccgttgaactgccccgcgccgtaaagtcccggataatcgcgaaactccagcgtggcgttcagctgcagcgggtcgcagcaatcatattcgattgcatatgcgtttcgcatgatttctacgtgctcaagccccttgatcgtgcggtaaaacgcaatctgcacttcttccggcagtgaagagctcataccctgcaagtacatctcctcggtttccgcgccgcacggctcaataaaaagctgatggcgcggcttttcggaaaagcgcatgatcttatcttcaatgctcgggcagtagcgcgggccaacgccttcgatcatgcccgcatacagcggcgaacggtgaatattatcgagaatgacctgcttcgtgcagtcgtttgtccagctcacatagcacacagccgagtttttcggcggcatttccgcatcgaatgagaacggcgtgacaggttcatcgcccttttgaacctcgaggtcggtaaaatcgatggatgagcgcagcacgcgcgccggggtgccggttttaaagcggcgcaacgaaatgccaagctcttttaaagaacccgcaagttccgtcgccgggaacatgccgtctgggccgcccgcatacgaaacctcacccacgaagatgcgcccgccgagaaatgtgccggtcgccagcacgaccgcgcggcacgtgtaaaccgcgccgagacgtgtcgtcagcagccagttttcgccgtctcgctcaatgtcgatgacctccgcctggcgcatcacgaggttttcgcactgctcaagtttatgcttcatcacgcgcgcgtacttgttgcggtcgatctgcgcgcgcagcgagtgcaccgcagggcctttaccaaggttcagcatgcggctttgcagcgtacattcgtccgccgttttgcccatttcgccgccgagcgcgtccacttcgcgcacaaggtggccctttgctgtgccgccgatgctcgggttgcacgggcagttgcccacagcgtccatgtttattgtgaagatcaccgtgtggcagccgagacgcgccgaggctaaagccgcctcaattcccgcgtgtcccgcgccgatcacggcaacatcgtattttcctgcaccatagctcataatttaacttcttttccgatttattctgaaatactgcctattttaaagataaaatataacaattttgatatcttattttcccacgcagaacttttcaaatacctgatcgaccaccgcatccgaaacacgttcgccggtcagttcattcaaagctgcaatggcaccctccagcgagaccgtcaccgcgtcccacgtcatgcccataagcaaagcgttttccgcttcctccaacgccgtgagcgccttttgtacgtccgcgcgttggcgctccgtatagagaatgccgtcgttcgggttcagctcagcggttttcagtgcgcgcgctgcagcgttttgcagcgcaggcagtccctcgccggaaagcgccgagaccgtcacgacctctttgaaatgcttatcgatctccgcacggtcgatcttcggtgcgaggtcggatttattgatgaccgccacggccggtgtatcgcctatggcgtccatcaacgcgcggtcgtcgtcgttcagctcttcactcgcatcaaacaccgccagcacaaactgcgccgttttgacgcgatctaaagccatgcgcacgccgatctgctccacgcggtcttccgtatcgcggataccggcggtgtcggcaagacgcagcggaatttcaccgagcagcacagtctcctccaccacgtcacgcgtcgtgcccgcaagatcggtcacaatggaacgctcgcaacccgcaagcaggttcatcagcgtggatttgccggcgttcgggcggcctgcaatgaccgtcaccacaccctcgcgcagaatgcgcccgccgtcaaagccggcgagcaagtctttcagcgccgcttttccggcggcaaggcgcgttttcagcatcgtctcatccacctgtggaatgtcgtcgtccgggtaatccgcccatgcggcaaggtgcgcaccgatgtccgtcagatccgaacgtagcttttcaatgcggcgggaaagtgcgccgtcgtgtcccgcctgcgccgctttcatcgcttcgcgcccctgcgcggagatgatctgcatgacggcttccgcctgcgcaaggtccattttgccgtttaaaaacgcgcggcgcgtaaattcgcccggcgccgcagagaccgcaccggcagcaaaaaccgcctgcaaaaccgcttttaaaacgaacaatccgccgtggcaggaaagctccaccacgtcttcacccgtaaagctgtgcggtgcggcaaaaacggtcgcaacgcactcatcgaggcgctcgccgtccagcgcatacacgtgtccgaagcggcacgtgtaacccgccatatcacagagcttcgcgccggaaaccgacttaaaaacacggtcgccgaccgcgcgggcctcatcgcccgaaatgcgaatgactccgatgccgcccggcgccgccgccgtagagattgctgcaatggtcttcatcgtttatcccttcttctcgttcgctgcacatgcaacactttctcattttgtattataccacgcggcgaaaagattgtcacgcagaatgtcggaaaacgcaggaaaatcacagagaaagtgcaaaaacctccgcatacacaaagtatacggaggttctctgttttgaagttttagtttttggagatcttaccgtacggcgtggaaacatcgtccagaacacgcggtgctgcgggagcagtgcggttctgtgccggacggctgtcacgattatctctgcgcggagcgcggccgccgcgattatcgcggttgtagccgccgtttctgccgcggttattgccgccgcgacggttatcgcgtcttacgtagcgctcgccgccctcagggccgatcacaacgtgacgggcaaggtcttcaccctcgctccaggacttcgcaccctcaacctcctgcacggcggtgtggatgatgcggcgctcatacggattcatcggctccaaggaggcattgcgaccggtctttacggcgcgggcagccatctttctgccgagattttcaagcgtttccttgcgcttttcgcggtaattgcccacgtccagcgtaatgcggtaataagactcgtccacatggtttgcaacgagagacgcaagatactggagggaatccagtgtttcgccgcggtggccgatgatgaagccgatattttcgccggtgagtacaagctctgcgcctgcctcttcctcgcggatctcaatatttacgtcgccgaggcccatgccggaaagaacgttgcgcagatactctgcagcggcgtctgccggtgtggaacggatgaacgcgcgcacctttgccggtctgccgccgaaaaggccgaagcgctttttctcttccgtttcaagaacttcaaactccgcgtctgcggggtctacgcccagcattgcgcatgctttttcatacgcttcttctgtggttgcgcctgttgcgattgcttcttttaccatggctttcttcttcctttcttcttttcaatactctatctttatcccgtttcggagtgaaaggaggtggggataacagcctttatttatttcttgcttccgagataatcggtagaattacctttgtttttctgcgcggctccgccctttttaccggtcgctttcttttccttctgcgcagcctggcgctctgcctgcgcctggttcttcgcctcaatcttatcggcaatctgcttttgcaggtttgcgggcagcggctttaccttccgatccgcctgtaaaagcgtcacatagcggctcgcttccgactttgcggagacctgctccggcgaaaaatacttgtgcgtgatgagcgtctgtgcaaaaccgaccagcgcggaaataatccaatagaaaccgacagctgccggcatgatgtatgcccagtatgcggacagaagcggcatgccgtacatcatgaccttcatgcagccctgacctgcgccctgctgctgtgtgggctgcagcttctgcatgacaaaggactggccccagtaggtcacaagtgccagcaccgggatgatccacagcatagaagcgaacgagctcgtgttcggggacgcgagcaggtcaagcccgaagcacttgaatcccttgccgaaaaactcaatcttctgcacatcgtccgcggagaacatcgtcaggtggtccttcagtgcgtcgaaattcttaacgatctcaagctctacatactggttcgtgctcgcaatgcccggaatcttagaaacgaattccgtagcctgcgaaatggtgtcctttgcaatatgcagggtgttcgagagcggataaataacggagtaataaatgccgagcatgatcgggaacggaagcagcgtcgtcagacagccgccgccgggattcacaccctctttttcgtagagcttctgcagctcttcgttatacttcatctggtccttggcgtacttcttctgcagctcctgctgcttgcttgccaatctggactgcgccgccatgctcttctgcgatttaatcgagaacgggaacatcagcgcctttacgatgatcgtgaacaggatgatcgcgataccgtagtttttgaaaacggtgtacaggaaccacagcagataaccgagtacgctgccgaagaaattaaaaatagacatcatagtagttgaccaaatccttcccggatcaaaacttattcttttttccgcttttccggcacagggtcatagccaccgcgggaaaacggattacaccgcagaatgcgccaaagcgcaagcacgccgccgagtaaggcgccataccgctccacggcttcttccccatactgtgagcaggtggggatatacttgcagcagccgcgcgttgcacgcggtctcatcttccgatagagatggatgagcccaatgacggcgcggcgcggccaataccgcacaccctttttcgccgaaaagcgtccgcccttatattgtatcgcagcggacacaggctctttctgttttctcatactgcttttctgatctgtcgttatgacaattcttctttcgttacacttgcggtttcttcgcccgtctccgacgtcctttcggagtcattttccgccgtttttgcggagttatttttatctttgggtagggcaacaagcacgccgagttcctcaagcgcgctttttaactgcgaagatacgatttgatagtttgcgaacggcgttctgccgcggctgacgaggacaaggtcataccccggcttcagctgcgggtacagcgcacggatgctttcacgcagaaggcgccgcgcacggttccgcttgaccgcgttgccgatctttttgctggccgtaatgcccacacgcgcctgcttcacctttttattgcgcaggcaatacagcacaagcgccgggcgcaccgcgctttttccgcgggcgtaaacgcgcttatactcgtggttttcggtcagcggcacaaggatgtccatgggtaagcctccaaagccgttcggtaaggccaaagctgcgtatagcagagccttgccgccgaaaaaatcaggcaaaacaaagaaaggtcacgcagcggtgaccctcaaagcatacattaataggttaaacgtgctctgccctttgctctgcgacgcgccagaactttacgtccgttgcgtgtagacattctctttctgaagccgtgctccttctttctgtggagcttcttcggctgataggttctcagcatatcaaaaaccctcctttcacgaggttacttatcaaaatgcggtctgcaaataacagtccgttacagataagcattataccttaaaaccgtagaagctgtcaaccttttttcgggtttttacggaaaaaaacttggaatgaagcgctgcaaaggcaaaagcaaaggaaaatagaaggcctacatgttttttcagcctgaaaaaacacaaagcaaagtgcgcaatgctaaaagtttttaatcgatcctttttcaagaaaggttataggagctcggggcaaagtttcccattcctgcgttaacaatccgccttcgcgctccctttttccaccctttctgcgtataaattgccgaaaacacgtttctttcccgctttttgcctgtgaagtccgtcagatttttcaacattccacaggttttctgtggacaactttgcggttttgtgctacactatatattagtattttagcgtcaaaatgcactttcaatgccgcttcttcggtcatcatgaccgccgcggcgcggctatgggcgcataccgataccaaaacctaaaagaaagggaataaggaaatggaatcattcttagaagcatgggacctcatttgcgactactgcaaaaagcaggtcaccgacgtgagctatgaaacctggttcagcaagctcgtccccatctcgctcgatttcggagcaggcgttgcaatcattcaagcgccgaacgaatttaacaaatccaccatcgagcgcggctttcacaagtgcttgaacgacgccgtacagagcgttttcggcgaagctttcacctataagctcatcaccccgatggagaaaaaagaaaaagagcgcgtgccggacgatgacgaatacgagtacacgtttgaaacgttcatcgagggcagctccaataaatttgcctgcgcagcctgccgctatgttgcaaaagagccggccaaaaactacaatcccctctttatctacggcaactccggcctcggcaaaacgcacctgctcaacgccatcggtcacgagctcaaaaagaatttcccggataaggatatcatttacgtcaagggcgaccagtttgcaaacgagctgatcgaggccatccgcgccggtaccaccgtgagtttccgcgaaaagtaccgcaaggccgacgcactcctcatcgacgatattcagttcatcgccggcaaggaatccacgcaggaagagttcttccacacgttcaatacattatacgaatccaaaaagcagatcgttttaacaagcgaccgtcccccgcgcgacatcgctaccttggaagatcgtttgaagacccgctttgagtggggccttaccgccgatgtgcagccaccggactttgagacccgcatggcaatcatcaagcgcaaagccgagcttgtcggcctcagtgtgccggacaacgtctgtgaattcatcgcacagaagctcaagagcaacatccgccagctggaaggcacggtcaaaaagctcaacgccatccaccttgtggaaggcgccacccccactatcagcacagcacagcgcgccatcagcgacatcgtaaacaacgagcagcctgcgcctgtcaccgtcagcaaaatcattgaagaagtcggccgcacctacggcgtttccccggaagatatcaagtcctccaagcgtaacgcaaatgtttcctttgcacgtcagatctccatgtacgtcgtgcgcgagattacacagatgcctatggtcgagatcggcaaggaattcggcggcagagaccactccaccgtcgtttacgccatccagcaaatcgaagaaaaatccgcgcgcgatcccgtgacgaaggccaccgtcagcgatatcatcaaaaatattcgtgaccgctgatcctctttcacccctaaagtgctccattcccttattctttcctatatactggaatatcggcaaaaccgctgcacttttaaaaatatcaaatacagagcatttcctataacgttctgtataattgtcgcagagctccttgtggccgcctttgaggttcaaccacaagatatagggctcgattgctggtgtccttacgcgcgaaagccaaaataaaatcaacgagttttcaacatttcacacagagttttcaactgttctgtggacgaaatcaaattttccacactctccacaatccctccacatccattttcgcaaaactttcgcgtgattttcacctatccaaagccactttttggagtttccaactttttcacacccactacgactactgctataacttatacttaaaataaatataaaaaaggaccgcaaacttactccttccacatctccgcaccaaaaaacacacagaaatgtgaaaaaccaaaatgcgcggtaaaacttttgcggtccaaaatgctaaacaaaagaccaaaacaaaaaaagccgcgcagaaaggaagaacttatccacatgaaattcaccgtagaaaaaagattgttgaacgaagccgtaaccaatctgcaaagagcggtttcctccaaaacttccattccggcgctcgaaggcatcctcatccgcagcgaagaaaaccgcctcattttgaccgcttacgatcttgaaatcggcatgcagaccgagctgcccgccattatttccgcgccgggcgcgatcatcctcaccgcaaagctgttcgccgagatcgtccgccgttcgccggacgaggacatcaccatcgacgtggacgaccgcaacaccgccaccatcacctccggcgtgagctgcttcaccatcatcggtatggattcagcggaattcccggagctgccgaaaatcaccgacgccgatacaatcaaaatgccgcaggaactcttaaaaagtatgattcgccagacgcttttcgccgtcgcggacagcaccgcaaagccgatccatcagggcagtttgttcaaaattgaaaacggaaatttagatgttgtatcggtcgacggttaccggttggccctgcgccgcgaggcgattaactacgcgaacaacaccgaatttgtcgttcctggaaagacactttccgaagtactcaagctcttaaaggacagcgagggcgaagtggagatttgtccgagccgccgccacattttgttccgcatcgataattatacggttatttccgctttgcttgagggagaattcctcgattataaatcggcactgccgaaggataaaaaaaccgaagttacggtttccactcgtacgatgatcgaaagtgtcgagcgcgtttcgcttctcatcaccgaccgtctgaaaagcccggtgcgctgcgtgatcggcgaagacaccgttaagcttttttgcaccaccactatgggccgtgccaccgaccagatttcggcggaaatttccggagaccagcttgaaatcggtttcaataacaaatatttactcgatgcactccgcgcagcggagaccgacgaagttcgactgcagctcggcggcccgatcagcccgatgctcgttctgccgaaggagggcgacgcgttttcgttcctcgtcctgccggtgcggctgcgcagcgaaatgtgattgatgtttcacacactgtctgctgatcacggacaagtgctgcgacttttgtgaaacattaacttgtgaagttttgacaccaaaattcagagtacaaattccgtacaactttaatgtgcgaacaaacgcaaagattcgtatattaaatttatctttattttataagggatcgaatatattatgaaaaatgagatcatcacgatcacaacggagttcatccgtctggatgcacttttaaagctcggcggcgcgttggataccggcgggcaggccaaattcgtcattcaaaacggcgaagtcgaagtaaatggcgaagtctgcaccatgcgtggcaaaaaaatgcgtgacggcgactatgccgaatataacggcggccgctatacggtaaaagtggaggaatgagccggtgaacgtactgcgcctcggctttgaaaatttccgaaatttgtgcccgggcgaaatttttccgggcgagaccatcaatgtcattcacggcagcaatgcccagggcaaaacgaatttgcttgaggccatctggctgtttacaggcggacattcgtttcgcggcacaaaggatagtgagttgccggttttaaaagacggcaaaaatgcacctgcggcctcactttccatgacgctgtttacagaaggacgcgagcaggagctaaggctcgaactgcgcgacggtcggcgctccagtgtcatcaacggcgtggagaaaaagaccggctcggcgcttgtgggcaagttctgcgccgtcattttttcgccggagcatcttttgctcgtcaaagaaggcccttcgcgccgccgtgcgtttttagacggtgcgttgtgccagtcccgcccggcatttacgcgcgttttggcgcattataataaagctctcatgcagcgcaatgcgcttttaaaagatattccgcgccacccggagcttatcgatacgcttgatgtttgggacgagcgccttattctgttcggcacggaggtcgtacaggagcgcgctgcgttctgcaaagatctggagccgcgtgcggcggaaatttaccggggtatcgcgaaaaacagggaggaaatcacgctttcctacgcgccgtttggcggtgcggagacaaaaacggagattgccgagcggttttccgaagcgctgaaaaacgccagaaatgccgatgctcgcgcggggtttacgtccgtcggcccgcacagagatgatttgacgctcaccatagacgggctttccgccagaacgttcggctcgcaggggcagcagcgcagcatcgtgttggcattaaagcttgcggaagccgatattctgtaccgaaaaaccggcgagcgcccggttatcctgctcgacgatgtgatgagcgagcttgatatgagccgccgcgattaccttttgaaccaccttgacgggcggcaggtgttcatcacgtgctgcgacccggaaactgtgcgcctgatggaaacgggacgcgggttctatgtggaaaaaggtacggtgcggcaggatacggacgaaaaagcaggggaagtgcacgcggaaaacgaaacgccgacttgcgaaagcgagtaaacctgtggtatgataaggagcatagtatgtatattcaccttggtatgggcgttgtagtgcgcgaagaagacgtcgtgggcattttcgatatggaaaacaccacggtctccggcgcaacgcgcgattttttgaagcgcgcccaaaaagagaaccttgtggaagacgtgtgctatgacctgccgcgttccattgtggtttgcagagactatatcggcggcgaacgcgtgtatatcacgcagattgccccggccacgcttttaaaacgctcccgcgcggagatcggcggcattgcgctgagaccgcacgccaagggactgtaacagaaaggatcttcatttatgcagtatttcggcattcctacctgtccgtattgcaaaaagcatgtcaaccttgttcgcacgtggagattgaagcgtgagggcgagtataaatgcccgcgctgcggcggtatttccaatatctatctttctccgctcgtgtatgtgtttgccgtgttggccatctgcgccggcgtgtgcatctatttcttccataaattcgttttggacgacatcaagctgttcacttgcctgcaaattttcatcccgtttgcgattttcttctttttaagccttttcacggtgtatttaaagcgccctgtcatccgcagagtacaacgcgaagccccgcgacaggcttcgcagcgcagtgcggaaccggaaagacgtgctccgagccgtgacgatacgtttacggagatgaatacgggcagatacagagaaaataacgagccggagcgcagagtggaccgacgcgtctgaattctgacggcaagtaaaatgtaaaggtctttgattaaactttcttcagaaagcttatagagtctcggggcaaagccctgaaaaacagaaaatccacacggaaaagagctgccggattgtaatttacgggcggctctttttgtgttcttaccgaccgaaaaaccgcagaaaagaggggaaagcggtgtgcattttcaaatatacatgcttttgtatgtttatgcacaaaaaaccgcagaaaatctaagctttcagcggacatttttcaaaaatgaccttgtaaattttaccgttttgtactatactattatataaagataaccgcctgcggaactgtacaaatgaaacaggcggcgtttctctttgaatggataacgaatgaatgtcttttatttcaaaggcacaaaaacacattcggcgttttcgtgccgaagaaaggaaaatgagagttaatatggatattaacgaaatgacgcatgtggatacgaattacgattcggatcaaatacaggtccttgaaggtctggaagccgtccgcaagcgcccgggcatgtacatcggctccaccggtccgcgcggcctgcaccaccttgtttacgaaatcgtagataacgccatcgacgaagcgcttgcaggctattgcgaccgcatcgatgtgcgcatcctgcccggcgacatcatctgcgtacaggataacggccgcggcgtgccggtcggcgtgcagcaccagacgggtctgccggccgtgacggttgtgtacaccattttgcatgccggcggcaagttcggcggcggcagctataaggtttccggcggtctgcacggcgttggcgcttccgtcgtcaatgcgctttcctcgtggctggaggtcgaggtgcgccagggcggtcacctgtaccgccagcgcttctcgcgcggcaacgcggaatatgacctgcaggatctcggccccatcgaaaacccggagcagacgggtaccatggttacgtttaaggctgaccccgagatattcaaagaaaccaccgtttatgattttgccacgctcgaaacgcgtctgcgcgagcaggcatttttgaacgccggcgtcaacatcatcctcaccgatgagcgtgacccggagaacatcaaaagcgaccgtttccactacgagggcggcgtagcaagctttgtggagtacttgaaccgcaaaaaagccgtggaggtcatccacccggatgtcatttatttctccgcgaccgcgccggacaacaactctacctgcgaaatcgccatgcagtatacggacagctttaacgagctgattttgtcctttgcaaacaacattcacacggtggacggcggtacgcacgaagacggcttcaagcgcgccttaacgcgcgtgatgaacgattacgcaagaaagtacaacatcttaaaggaagccgataaaaacctttccggcgaggatgtacgcgagggcctcacgtgcgtcatcagcgtaaaggtgaaggaggcacagttcgagggccagacgaagggcaagctcggcaatacggaaatcagcggccttgtcagcaatctgatgagcgacaagctgatgacgttccttgaagagaaccccgccgtggcacgcgccattttcgacaaagccatggcggcctcccgcgcaagagaagcggcgagaaaggcaagagaccttgtgcgccgcaaatctgcgcttgaaaacgcaacgctgcccggcaagctcgcagactgccagtcccgcaacccggaagagaccgaaatttacatcgtcgagggcgattccgcaggcggctccgcaaagggcggcagagaccgcaaatttcaggcgatcctccccctgtggggtaaaatgctgaacgttgagaaggcacgcttagaccgcgtttacggcaacgataagctcatgccggtcattacggcgctcggcacgggcatcggcgaagaattcgatttgaataagctccgttacggccgcgtcatcatcatggccgatgccgatgtcgacggttcgcacatccgcactttgcttttgacgttcttctaccgctatatgcgcccgcttgtcgaagaaggacacgtgtatatcgcacagccgccgctgttccgcatcacgaagaataagcgccactattacgcgtattccgataacgagcgcgacgagatcatgacgcagctgcagagcggctacgatattcagcgctacaaaggccttggtgaaatggactccgagcagctttgggagacgaccatgaacccggagacccgcgtcatgctgcaggtcacgccgagcgatgccgcacaggcagacgaaatcttcaccattttgatgggtgataaggtagagccgcgccgcgagttcattgagcgcaacgcaaagtacgtaaagaatctggacatttaagcgcgaaaggatcagcaagcaatggataatatggaagaaaagaaggaaaacctcatacaggtggacctcagagagatcatggagacgtcgttcctcgattactccatgtccgttatcgtgcagcgtgcgctgccggacgtgcgcgacggcttaaagccggtccaccgccgtattctctacaccatgtatgaaaacgctctgtggccggaaaaggcttacagaaagtgcgcggataccgtcggttccgtactgggccgctaccatccgcacggcgatgcttcggtttatgacgcgctggtgcgtcttgcgcaggatttttccatgcgctatatgctcattgacggccacggcaacttcggttccgtagacggcgacccgcctgctgcataccgttacacggaagcccgcatgagtaagctttctgtggaaatgctgaaggatattgagaaggacacggttgatttctccccaaactacgacgaccgtctgaaagagccgaacgtgctgccctctcatttcccgaatatcctcgtaaacggctccacaggtatcgccgtcggtatggcgacgaacattccgccgcacaacatgggcgaagtgcttgatggcgtgtgcgctatggtggataaccccgatatcgaccttgacggcctcatgcagtacattaaagggccggatttcccgaccggcggcatcatcatgggccgcagcggcattcgcgccgcatacggcaccggccgcggcagaatttacgtgcgtgcccgcgcagagattgtggaaaagccgaatggccgctaccagatcgtcgtcaccgagctgccgtatcaggtcaacaaagcaagactcatcgaaaacatcgcagagcttgtcaaggataagcgcatcgacggcatctccaatatcgacgatcactccgaccgcaacggtatgcacattgccattgacatcaagcgtgaggcttccccgcagctcgttttgaaccacctgtattcgctcacacagatgcaggtcacgttcggtgtcatcatgttggccattgtagacggccagccgaagctgctcaccctgcgcgatattctgcaggaatacatcaagttccagagtgaagttgtgctgcgccgcacgcagttcgaccttaaaaaggcgcaggagcgcgcccacattctggaaggcctcatgatcgcgctcgacttcatcgatgaagtcatcgccatcttgagaaattccaagtctatcccggaaggcaaagtcgccctcatggagcgcttcggccttgacgatgtgcaggcacaggccatcgtgcagatgcgcctcggccagctgaccggccttgagagaacaaagctcgaggaagagcttgccgcactgcgcctcaaaatcgccgatttcctcgacatcatcgcaagcgaagcgcgccgctacggcatcatcaaggatgaagccatggagatgaaaaagcgctttagcgacgagcgccgcacggagatcgccgccatttccggagaaatggacgtggaagacctcatcccggaggaagactgcgtcttgacactgacgaacttcggctacgtaaagcgccagacgctcgacacgtaccgcacacagcgccgcggcggacgcggcatctccggcatgagccgccgcgaagaagacgttgcgagcgagctgttcattgcaaattcgcatgacttcgtactgttcttctccgatagagggcgcgtgtaccgcttaaagtgctacgagattccggagggctcccgcacaagccgcggcatgaacatcacaaatctgctgccgcttgagcccgaggagcgcatcacctctatgctgcgcgtcacaaagtccgaggaggcagaccacttcctcaccatggtcacaaagaacgccgtcatcaagcgcgttgcgctctctgcgttccgcaatgtgcgcaaaaacggtcttatcgcactcgatctcgctgaggacgacgagctcagctgggtgcgcctgacgagcggcagcgacgatctgcttgttgcaacgcgcttcggcaaggtcattcgtttccacgaggccgacgtgcgcgaaatgggccgtcaggcccgcggtgtgcgcgccatccgtcttgcagagggtgacgttgtggtcggcatgagcgtcctgcgcgaaaacggtctcgtgcttacggtttccgagaccggctacggccgtctctcgaaccccgaagattaccgcctgcagcatcgcggcggcatgggcatcctcaactaccacgttgaaaaatacggcaatgtcgcggccattaaggttgttgatctcgatgacgacatcattctcatcgcagatgacggtgtgattatccgtatcgaagccggttccattcgcatctgtgcacgtcccagcaagggtgttcgcgtgatgaaggtcaacgagggcagcaaggttatcaccatggcccgcgctccgcatgacgacgaggaagaaatcagcgccgtagaagacgacggcaccgccgaagagggcgaagatgagcccgtaacggaagcggaagacgtcatccgtgacgatgaacccgcagaagaaacagaagaaaatacggaagagtaattttccgggcaataaaaaagagcgttggtcagaagaccggcgctctttttgcaattttttaattacgcgttcggatccataatggcgccgtgaccgcagcagtaggtgtatacgtctgtcgggaacaggctctgcaaatatttgcgctccgcggcggcgcggcgggaatcgaggttcacggtggtcattaaatacggtgcaagcaggttaaaatcatactgttctttggagaagcccttgatgtttaccatgatgtcgccgctgaaaacaatgcggtgcgcgtcgtccacaagcacgatctcgcccttaaagtgcccgccgttgccgtcgaaaacacgcagggtaagaccctcaaactccagcgtgccgcgcggggagatgggtgcgtcgcttgcaggctctgtgtgctcaattacgcgcagcgtgtgcatatcgggtggcgtgtagcccgtcatcagcttgcagatgcggttatacggcgcacaaatgcggttctgctcgcgcagatcgggcagaccgttgttctgcaaggcgaaattcagccgcgtttcctcgttcacatagaatgtgtcgaacaggtcgtgcaggccgcaatggtcgatgtccgcatgcgtgacgataagcgtgcgctccatattgtcaaagttcgggaacaggctgcggaaaatcttcagcatctcgtccttgtagcacgggaagccgcagtcgatgaacagcagcttgcggtttttctccagaatatacgtattgcccccgcacggcggctcgatgatgtgcattgtaaacccgccgaacagactgcgctgcgaaatgcgcgcgcggaagttttcacccttaaagctgtgcagcatttcggcgattttgccgatgtacgaaaacgtcttgtgcggcgcttcgcctttttcgtcaaggtgctgcatcaaaaggttggagtctgcaatgagcgcgtccatatcttcctgcggcaggtgcagggtagaagccagctggtgcgcaaacgaaaggtaaaacaccgtgttgtcgagcaccttttggcttttgtcgtagtttaaaacacgcatttcgcacagctttgcggcgcggtctaaaaacgccttcgtctgtgcgggatcctgaatgtaaatgccgacctttaaatcctgatggtcggtgtcgttttcctgcccgctcatgtacgtgatgttaaaattaaagctgtcgatgagttccaaaacgggcagcacggcgctcggtacgttcggcaggtggaattccagcaaaatcgttttgccggggttatcctcgtttaaaatgtagcctacgtcgtttaaacgcgcggcaatggtatcaagctgcgcctgcgagccgctgacctccaaaaacagcacgtgcaggtcaacggctttattgtagctgacgcgcgtgatgtttgcgccggactgcgccacaatgcgcgtagccttcaaaaacgcaccggccttgttcggcagtcgcgtgatgaatgttcttttcatgcgcgcctcttaaagcttgccggcctttacgagtgcggcggtcttcaaaatgcccacctgcgttttggaatcggggatttcattgtttaacaccatctcaacggctttgtcgagcggaatgcgctccacttcaaggaactcatcctcgtctaagtgcatttcgcctttttgggccacacggcacgcccagatgcggatgatctcgccgcagtagccgggagaggggtacagattgccgagcgaaatgtagttttcgcccgtggtgccggtttcctccatctgctcgcgctttacggcctcaaacgggtcttcgcccttttccagtttgccggcgggcagctccagcagcacttccttgtacggataacggaattggcgcacaagcagcacttcattttgttcggtcagcgccgccacgcacacgccgccgttgtggcacacaacctctcttgcactcgttttgccgttttccagctccacggtgtcgcgcagcaccttgatgatgcggccctcaaactttgtttcgcttgtcagtgttttttcaaagagcttcataaactgtcgttcctttctctttatgataaaaactgcttgattttctcgggaagattaccctactattatataaacattttcttaatttcgcaaggcgcgggcgggattctcttgcataaatcccgcgaatgtggtacattttatcagaaccaaaaatttctcgcggcggtgccgcgtgccatatcccatttttgaaaggaacatgaacatgaaaacctgcattcgtttgctgtgcgccgtttgctgcgccgcgatgctgctcaccacgaccgcctgctcgggcggcaataaaaatacgtcttccgccacggcagaagcgacccctgcgccggagatcactcctgcgccggaggcaacagcggcccccgaagaagaacccacccctgcgcccgaaggcaacacgtcctccgaaacgggcgaaaatcgccacacaagcaccttgccggtaccggaaacgggcagcgaggaattccgcgccgcgtttgaaaacaaccccatcgatacgcagtatgcggacgatatggaaacggcgggctctgttgcgggcatgattactgcgtgcaacacggcttccgacagctggaaagagcagattgattccgtctacacgcagattttggagtatggcgacgataaaacggtcgaaaccgtcaaagaggagcagtcccactgggtgaacgagcaaagcaccgctttgcaggacatccgcgattccgtatcggagaatgacccccttgcggccatcaccgtggcagagagcatcatggtctattaccgcacaagggccatcgacctttgcgccgtattatatgacattaacggcacgttggcgttcggctaaaatcaaaaaatacagaggatttgtatatgaaaaaagcattcggcgcaattttaatcgcggttattctcattgtctgcgttgttaccctcacggtgcagcgcggcgaaaacgccatgctggagttcccggagcgccccgcagagggctgcacggtgatgtctcttgaaatcaccgacggcaaagcgcagaccgaagtcatcggcacgtacaacgtaaatgaaaatgtgctgacgatgaacacatcggcgcttgaaaacgcagagcctaccgaaagcggtgaaaactacacatacacgctgccggaaagtatcccgaatttttatttcagtgacaccacgcagggccttttgctctacaagggttatttatatgtggtgacggcgacgacgagcggccagacgctggaaatcataaatctgaaaaccggcaccctcggcggcaaaatctactattcgcagtttgtgaaagaacaaatcagcgggagcgcagcgtcggaataagtctcttttattcgttttttgtatttctgactctgcaaaataagtattagacatttatagactctttcgttatactggaattatccaaattcagtacacggaggggttttatgttttctgataaagatttgagaaagctcatcgtgccgcttgtcatcgaacagattttggcagtgctcgtcggcacggcggataccgtcatggtgtcttatgcgggcgaagccgccatttccggtgtttcccttgtggatatgttcgcttacatggtcatcacaatcttaacggcacttgcaacgggcggcgcggtcatcgtttcgcagtacctcggcaacaaggagcaggaaaatgcgaaccgcgcggcggggcagctgatggtcggtactttgctcgcttccggcgtggtgtgcgtcatctgcgccggctttaaccgcccgattttgcaccttttgtacgggtctgcggaagaaaacgttttgcaggcggcagaaacgtatatgtttatcacggcgttctcgttcccattcctcggcatttataattcctcggcggcgatgttccgctccatgaaaaagaccaacatgaccatgtacgtttcgctcctcatgaacgacatcaatgtggtcggcaacgccatcggtattttcgtgctgaaagcaggcgttgcaggtgttgcggtaccgacgctcctgtcccgcgcggtggcgggcatcgtcatgacggcgcttgcgttcaacgcaaagcacgaggtttacctcaaggcgaaaaacattttctgccgcaactttgagatgctgcgccgcattttgaaaatcgcaattccaaatgcgattgaaaacggtctctttgcgctcggccgtgtgcttgtcaccggcatcgtcgctatgttcggcacggcgcagattgccgcaaacggcgtggcgggcagcgtggacctcatcgccattatcgtcgtcagcgccatgaaccttgcggtcgtgacggtcgtggggcagtgcgtgggtgcaaaccgctacgacgaagcggaatattatttgaaaaaaatgatgaaaatttcgtggctcgcaacggccgttctgacggttctcgtgtggctgtgcctgccgtttattttgggctgctttgcagtctccgaggagacgtaccgatatgcgtacattctcgtgatgctgcacaacatttttgcaacgcttttccacccgatgtccttcaatctgccgaacggtctgcgcgcggcgggagacgcaaaattcaccatgtacatcggcatcggctctatggcgatttttcgcatcggctcggcggtgctgttcggcatcgtgctcaatatgggtgttgtgggcgtgtggatcgctatgggcatggattggcttgcacgctccgtggcgttcgtttggcgcttcaagagcaaaaaatggcagaaattccgcaccatttaataaaaaaaccagcctgcacggttcgtttgaacactgcgcaggctggttttgctttatctgaaattacttatgaaacgggttctccgacggatagggcagggacttcggctggttgtagccgatgttctcgacgccgaggtacttgaagacctcaaacagcgccttgccgtagtgaccgaacgccactgcgccgtggtgcgggaagttcttctcgatgagcacatggcggtagaagcggcccatttccgggatggcgaatacaccgatggaaccgaaggagtgggacggtacgttcagcacttcgccctctgcaacgtatgcgcgcagctgggtgtcggccgtgctctggagacggaagaacgtgatgtcgcccggggcaatgtcgccttcgagcgtgccctgcgtaacctcaatcggcagggagcgcgccatgatcttctggtacttcatggagcagaacgccagcttcttggagcaggtgttgccgcagtggaagcccatgaaggtatccttctgcgtgtatgtggtcttgtccttgatgtcgctgttgtagaggtctgccggaacggtgttgttgatgtcgagcagcgtgacggcatcgaggctgacgcaggtgccaatgaactcggaaagcgcgccgtagatgtccacttcgcaggaaaccgggatgcccatgccagtgaggcggctgttgacatagcacggaacaaagccgaactgcgtctggaatgccggccagcacttgcctgcaatggcgacatactcgcggtagccgcggtgatcctctacccagtcgagcagggtgatctcatactgtgcgagcttcggcagaatctcgggcttcatgttgcccttgccgagctctttttccatgtcttcgacgaccttcgggatacgcgggtcgccctcgtgcttattgaacgcctcaaagaggtcgagctcggagttttcttcaatctcaacaccgaggtcgtaaagcggcttaatgggcgcgttgcaggcgaggaagttcagcgggcgcgggccgaagctgatgatcttgaggctcttcaggccgatgatcgttcttgcaattggcatgaattcgtgaatcatgtccgcgcactcgtcagcggtgccgaccgggtattccggaatgtaaacctttacattgcgcagcttcaggttgtagctggcgttcagcatgccgcaatatgcgtcgccgcggccgtccatgaggtcttctgcggattcttccgcggccgcacagaacataacggggccgtcaaagtgctttgcaagcagcgtctcggaaatttccggaccgaagttgccaaggtaaacgacaagcgcgttgcagcctgcgttctttacgtcttcaagcgcctgtaccatgtggatctcgctctccacgatacatacggggcactcataaatttcggtagcaccgaacttctttgtgtaagcatcaatcagtgcctttctgcggttgacagaaagggattccgggaagcagtcacggctgacggcaacaatgccgaccttgacctggggaatgttgttcataaagtgattcctcctgtaaataaacgggtgtgtatgtgttttgtgccgaaaaaacggcgcaaacgatttgtatgtacaactcatacacggctattgtagcgcatcgcgcggaaaaaatcaacaggaaaaaacggggttattattcgtcttcgtctgtaatctccgggcggatgaactcaaaaatgcacagggcgccggcgtttttgcacactttgtactcctccgccgtgcgcagcgtccaattcacttcctgcatcttcattttgtcgcaggcaatgcggtggctgatgttgttcctgaaatgcacgtcatacgcttcaaagtgcgggcgggtaaggacattcgtccacaagtttctccagaacaacgcgcggaaaaagcccttgcactcctcgtccttgccttcaaagtggcccatcagctgaccgcgcagcacatacgggtggttcttcctgaaccactgcacaatgtacgggtcaaatgattccacgcagtacgggcctttatagttgcgcagcagttcccacacgagcgggcacagcagatcggcatcgtcgtagtgcttcagttcaatgatgagcggcgttctgccgtccacaagcgccagcacatcgctgaaaagcggtacgcgctcctcggtgttctgcaaacggtactgctgtaattccttatacgtcaggtcgccgatggaaacatcagcgccgcagacgcgttttaagctgcggtcgtggtgcacaacgaccttcttgtcctttgtcagctgcaggtcaaactctatgccgtagcccgcttccacagctgccttaaagcctgccatggagttttccggcacggaaagatctttttcgtgcaggccgcggtgggcgtagtcatattttttcatctcggcaaaatcgccgcgcggcgaagccggcgcaatgcagaaaagccacgccagaaagcccagacatacaacaatcagtacgatcaaaattccccaaatcatttttaccctctactttactttttaagtttatttcggcaccttgatttcttccagctttttgcggtactgcaaaggcgtggcgtcgtattcggtgcggaatacttcgatgaaatagctcatggagttaaagccacagtccatggcaatgtcgagcacgcgcaggtttgtggcggtgagcagctccagcgcgtggcttaaacgcacgccgttgatgaattgcaccggcgttttcagtgtatactgtttgaacacgcggcagaaatgtccctcgctcatgccggcggcgtgcgcaagctgctgtacggagacggcagaccggtaattttcctgtataaacgcaatggcagccttgatgctgtccgctgcggcgcgcttagaagcgctgatgcgcgccgacacgccgttttgcaccagtgtgccgaacgccgaaagcatggcggcttttacgggaaactcaaaaaacggcgggcggttttccagcatcgtgtacgcggtctggaacgcggcggaaacgctttcgtgcaaatttgttccggctctgatcagccgcggcacggtcagctcgccgtccaaaacgggctgtatgtactttacgcggatgatgtcatttgcggtgctgcacagcaaatcggggctgaacacgatggcttcaaagtaaagctcctcgccggcttccaccggcacggcggcgtgcagctctccgctgttgaaaaacacaatgtctccggcgtgggcctcaaacagatcggtgccgcactgcacggtcagcgtgccctgcatcacacggaaaagctccatttcgctgtgccagtgacaatcaagcgcgtgaaagcggtcttcgcgtcgaatgcagtagttcatcacgggcatcagcgcgtcgccgtggcggcgggcctcccgcatgcggtcaaattgatttttgtccgtaaaacgcacctcctttttttaggctcagtggtcaggattgttataaaagcggacaaattagcggtagactttccaaagcatatcgcttatacttatgatagagcaggtgcgcgaaaagcgcaagtgccaataacagaatttttgattttttttgaaaggcagtgagctgaatatgaaatttacgaaaggctactggatgaatcttcccggcgtgacgaacacggacgccgtgcaggttcgcgaagtcaaggtagaaaacgaccgcgtttacctctacaccgtgccgtaccacgcagacatgcgcgccatgggcggcccgcttctggaaatgtacatttcctctccgcagccggatatcatccgcacggaagcgtaccactttatgggcggcaaccagaaaatgccggcgttcgagctgaacgacgcacactgcgcactggaggtcgagaacaccgaaacgaccgtgacgatcaagagcggcaacacaaagctcgtcatcggcaagaacccgtgcagctttgattactactataaggacaagaagctgacaagcatcggcaaccgcttcggcaacgcgatgatcagcaccatctccaccccggacggcaactacatgcgcgcccagatgaaccttgacatcggcgaaaaggtctacggcctcggcgagcgcttcaccccgtatgtgaagaacggccagaccgtggagacctggaacgaagacggcggcacctgcaccgaaatttcttacaagagcattccgttctacatcacgaaccgcaactacggcgtgctcgtgaacgacccgggcccggtctcctatgagatctgctccgagcatgtcacgcgcgtacagttctccgtgccgggcgaaaagctcgatttcatggtcgttggcggcgacagcatgaaaaaagtgctcgaaaactacaccacgctttccggcaagcccgcactgccgccggcatggacattcggcctgtggctcacctcctccttcacaacgaagtacgacgaagagaccgtcatgggcttcgtaaacggcatgaaagagcgccacattccgctgcacgtgttccacttcgactgctactggatgaaggaaaacgaatggtgcaacttcgactgggatcgggccatgttcccggatatcgagcaccagctgcaggtgatgaagcacgaaaacaacctcaagatctgcgtttggatcaacacctatatcggccagaagtctccgctatttaaggaagcgaaggagcttggctacctcctcaaaaagccgaacggcgacgtttggcagtgggatctgtggcaggccggcatgggtatcgtggacttcacgaacccgggtgcatggaagtggtatcagtccaagctgcgccacctgctcgaccagggcgtcgattgcttcaagaccgacttcggtgagagaatcccgaccgatgttgtctactacgacggcagcgatccgctccgtatgcacaactattacacctacctttacaataagtgcgtttgggaagtgcttgaggagtacaagggcaagaacgaggcatgcctctttgcaagaagcgccacggtcggcggacagaagttcccggtacactggggcggcgactgctcgtcgaactactcctccatgtccgaatccctgcgcggcggcctttccctgtgcctttccggcttcggcttctggagccacgatatgagcggtttcgagggcaaggctccggcggacgtttacaagcgctgggcggcgttcggcttgctctccacgcattccagactgcacggctccgattcctatcgtgtgccgtggctgttcagcaaggagggtgaagagaacggcgaggaatccgtagccgttgtccgtaagttctccgagctcaagtgcaccctgatgccgtacatgttctccgctgcggtcaatacacataaaacgggcgtgccgaccatgcgcgccatggttctggaattcccggatgacatcccgtgcgaagacctcgaccgccagtatatgctcggcgacagcctgatggtcgcgccggtcttcacgaaggaaggcgacgtcacgtactacctgccggagggcaagtggacgcacctgctctcaaacgaaaagcgtgagggcggtcactggctgcgcgagaactacgatttcttctctctgccgctctttgcaagagagaactccatcgtcgccatcggcgcgaacaaccagcagccggattacgattacggcaaggacctcaccctgcacgttttcgagctttccgatcaggcaagcgcaaaggtttgcgacagcaagggcaacgatatgctcagcgtttccgcagtgaacgagaacggcgttatcaccttcaagttcgacggcaaggcagagaacctcagcgtgctgctgcgcaacgtggagaacgtgaagaacgtctccggcgcagaagtcgagcaaagtgagctcggcaccgtcctgaaggtcaacgcagacctcagcgacgttgttgtaacgctctgataaaataaacccaacacccgcagaacggcatgaaaaaccgccctgcgggtgtttttctgcaacgctttatgcgaccaaaaagaaagcgcagagcacggggaaaacccacgctctgcgcttatctttatcttagaaaaattacttcttgctgttcagatattcctgaatggcagaaaagaccttgtcaacatccaggccgtgtacggcacatgcgtcctcaagggactcgtggatggaggacgggcagcctacgcagtgcatgccggactgcatcagcacataagcgatgccgcggtcataatccagcatttcgcccatagtggtctgctttgtgatttccatctgaaaacatcctttcttggtatagcatcccatcgggtcgccccgatctatccgtataaatcaaactcccgcaaacttcgcgtgaactctaatctacacgaatttagtatacaataggatatgccaaaaagcaagtgtttttgcagatttttggcatatcccttaaattggaagaaacgacaaaacagggggataaattcagtcaacttgcgccttgacgctgctgcgcattttcctttataatcaaggtagaaaaatattaccatttttagaaaggcattgaggaatatgaaaactgtgaaattcaggttaaataagttgattaagaaggtaaatttatggaattagaaacagcacgtcttattttaagaaaatttactgaggcagattatgatgatttatatgagttcctgtcacagttaagagacagcgagtttgaaggctatccagggattgattatgaaaatggaagggaacacttaaagtatagagttggttctgatgaattttatgcaatagagttgaaggaaacaggtaaagttatcggaaatgtatattttggcaagcgtgattttgaagcaagagaaattggctatattgtgaatcgggattttcgacggcagggatatgcattggaggcaatcaatgctgtaatagatatggctttttcagagggaatacatagagtatttgcagagtgtgatccaagaaacgagtgttcatggcggttattagaaaaagcaggattggtcagagaagcccattttagaaaaaatgttttctttcatagggatgagtatggacagccaaaatggaaggatacatatgtgtacgctaaaatcgcaacttgtagagatggcaaagtgaaaggcggatgattttatgaaaaaacgaatgaccgtaatgctttctttgtgctttagcttgctcctgcttttgtccgcctgcgcttcgggcggcagcacggcaaaaaatgcggaaaaagccgcggccgcgttggcggaaagtatgctgaacgcgccgagtgagcccatgcagcgcttcggcaatattttggaaaacggcgaagaaagcgcccttacggcgtacaaagatgcttgggaagacgaaaaagccctgtgcagcgaaaaaggctttatggattttacagaaaaaccgctcaacgtacagaaaatggcaaacgaaatgaacgagaccgtgaaggtgaccgccgtcaagaccgagccttacgaagaaaaagaccgcgtggtgcgctttacggccgatgtcaccgtgaacgatacggaaaacatgacggttaacggcaaatgtcagttcgatgaagacggcaaagtctcgttcatcgagctcgatacgaacgaacttgaaatgacgctcatcgcaaacgataacgccgaccccacgcaaaagccgcccgcaaacggcaacgccatcacgttaaatgagtaagcaaaagatgaagcccgcacaaaactgcgggcttcatcttttgaattcggcctgcgcggcacataaaaccgcctgcaagccgaatttctgtttttaaacataaaaaaacgaacatcctattggatgtccgctttaagtgttggcgccaacctatcgtcccgggccgttgccagccgagtattttcagcacaaacgagcttaacttctgtgttcggtatgggaacaggtggaccctcgttgtaatcaacaccaactattctgtttgccgtctcatctgacggctttgttataataccacatccattctgaaattgcaagccttttttcaaaaaaatttcaaaaagttttgagaaacctatatatagttaaaattcaaataatttctctaaatatagggccagaaaacacaaaaatatccgtatgcacgcggcggtacatacggatatgaaaaaacttttttgagtttacgtcgtaaaaacaaggtcacattgcttttcaacggggtaggaagtgaagtagaggttctcgagcgggatccatttttccacgaacatcttgtgccgcacggggccgttgcgttttaaaatgcgtgcgctctgcgtctccggcgaggtcttgagaaaaattttgagatcgtagcgcccgatgagctccggatgcgtagagtacgagccctctaaaatgttcagcgtcttcggcgtgacctgcaccgcgtcgccgaggtccataacgccgcaatcgaacacgcggtaggaaaacgactcgttcttcggaatctgctccagaatatccgacaaaatacgctcccagtgcacattgccgcccggggtggcgtagcgctccggcgtgcgcatgggcatcggcaggtaaaaatcatcggcgtggaacaggttgcagtcgtaaacgctctgcaaaagtgccgcaaacgtcgttttgcccgagccgcacagcccgtcgattgcaatcgtcacgggggctttttccgccgtcaacttatcgatcgcgatgaatgccggcagaaaatccgcatacgcttttttcaccacgcggtatgccgggtgatacgcacggcggtacgcttcgctgtggtgcacggcagggcagcccgccgcgcggtacgatttcaaaaacgccgttttctcggctttgtcgaacaaatcggcattttcaagctcgtccaaaagtgataaaaacgctgttttgtccgtgggcgtgtcttcggaagacgctttaaacatagcaaaaagtgttttcggtgaaagctcctgtaacgcgctcaagttgatgcgcgcgtactgctcgccgagggcttccgtgtacggtgcatcaaggctggcaatctccgcttcctttaataaatatagatacgcgccgtcggggtcgctcaaaaagtggccgccgccaaaactcgcctggtacaaaaacttcaccgcgtcccgcacttcggcttcgggatgcgttttcaggtgggcacacagcgcttcaaacacgcggctcacagcgcagcaagcgccttgtagcaatccttcagcgccgggtacagcttcgtgtacatgcggtagaacgcctcgtatttcggcacgttttcctcaatcggctcctgcgggtcgttgaggcggatgacgcggcggcagccctcctgcacggatgggtacagccctgcgcccacaccggcgaggatggcaacgcccagcgccgggccttccttggaaacgaccgtgcgcacggcgcagttatacgtatcggcaagcatctgacgccacagctttgaggaaccgccgccgccgcaggcgagcatgccgtcaatggaaacgcccatggttttcagcacctccacgctgtcgcgctgggagtatgttacgccctccatcacggcacggagcatgtcgtacttcgtgtgcatggcggaaaggccgatgaacgcgccgcggcagtccgggtcaaggtgcggagtacgttcgcccatgagatacggcagataaagcagacggttgcagccgatcggcgaacgcgccgcctgctgatccatcagataatacgggtctacgcccatgccgactgcggtctctttttccgcgccgcagaagttatcgcggaaccacttaagggacagacccgcgccctgcgtcacgcccatcacgtgccatgcgcccggtacggcgcagcagaacgtgtgcacgcggcccttcgggtcgatggaaatattatccgtgtgcgcaaacacaacgccggaggtgccgatggtcgtaaacgccttgccgtcctccacaacgccggtgcccacggccgctgccgcattatcgcccgcgccgccgaccacgatggtgcccgccgcaaggccggtgcgatttgcggcttcttcggagatgacacccgtcacttccggggattcgtataccttcggcaagagtgccttgtcaatctcaagcttttcaagcacttcgtcgctccagcagcggttcggcacgtccaaaagctgcatgccggaagcatcggagacctccgttgcaaagtcgcccgtcagcatgtagcgcacgtagtccttcggcagcagaatgtgcgcgcactttgcataaatatccggctggttgttgcgcacccaaaggattttagatgccgtaaagcccgtcaaagccgggtttgcggtaatctcaatcaggcgctctgcgccgacgcgtgcggtgatctcctcgcactcctttgccgtgcgctggtcgcaccagatgatggagcggcgcagcacgttgccgtccttatccagcatgacaaggccgtgcatctggccggaaatgccgagtcccttgatgtctttgttatcgacgccgctttcggtgattacggcgtgaatggtatccgccgccgcattccaccaatcgagcggctcctgctctgcccagccgtttttttcctgatacagcgggtattctatcgttttgctcgcgactacattgccgtcttcgtcgaaaagcacggtttttgtgccgctggtgccaagatctacacctaaaaggtaattcatattaacgtcctttcttttcggaaaatggtttcaaatatatagggcattctgcctccgttttattttgaagcattttcccatttgtgtcaagccttttttgttgaaattatgcagactattttaattgaaacgcgcggttttgtatgatacaataaaaaacaagagcttcgtcggcgatttataggggaaaagccgtttgaagcggtcttttggtgtatttgaaaggattgaaacaaaaatggagaaaaaacgatatgacgccgtcgtgatcggcgcgggcgttacgggcagcgccatcgcccgtgagctttcgcggtatcaggcagaaatatgcgtgctggaaaagggcgaagacgtctgcaccggcacctcaaaggcgaacagcgccatcgtgcacggcggctttgatgccaaaacgggctcgctgaaagccaagatgaacgtcctcggcaaccgcatgatgacgcaggtcgcggaagaactggatgtaccgttccgcagaaacggcgcgttcgtgctgtgctttgacgaaaacgacatgcctgcgttaaaggagctttatgagcgcggtgtgacaaacggagtagaaaacctcaaaattcttaccggcgacgaagcgagagaaatggagtctgcgctcagcgacacggtcgtcgcggcgctgttctgtccgtcctccggcatcgtatgcccgtttgaattgaccttgggctttgccgaaaacgccgagaaaaacggtgttgaattcaaatttgagtgcggcgtgcaaaatatccgccgcgaaaacgacctctatattctcgaaaccgaacagggcgagatcgaaacgcgcgccgtcatcaacgcggcgggtgtgcacgccgatgaaattcacgatatgctgctgccgcacgcgttcaccatcaccccgcgccgcggcgaatactgcctgtgcgacaaaaacgcgggcaatttggttgataaaaccatcttccagctgccgacaaagctcggcaagggcattcttgtcacacccaccgtgcacggcaatctgctgctcggccccaccgccgagaatatcgaagaccgcgagaacacggccacaacgcagagcggccttgcattcgttttggaaaaagccggtatgagcgtgaaaaacgtgccaagccgacagatcatcacatcgttctccggcctgcgcgcctgcgcggacagaggcgacttcatcttagaggaaagcgcgccgaacttctttgaagccgcgggcatcgaatccccgggcctcacaagcgcgcctgccatcggtgtttatatggcggaaatggcggcgaaagcgcttggccttacggaaaaagaaagcttcgaccccgttcgtcacggcgtcgtgcacctcaattcgctcagcgtcgaagaacgcgccgagaaaatccgtgaaaacctgctctacggcagtattgtctgccgctgcgagacgatctccgagggcgagattgtggacgccatccgccgtccgctcggcgcgaaaacgctggacggcgtaaagcgcagaaccagagccggaatgggccggtgccaggcaggcttctgctccccgcgcgtcatggatattctcgcaagagaacttaacttgccgctgacagccatccgaaagaacgaaaaaggctccgaaatcgttttcgggaagacgaaatgaggtttattatggaaaataaaatcacaaaatcgcttgtcatcatcggcggcggtcctgcggggcttgcggcggcggtcgccgcggcggaaaacgggcttccggctgaagacatcttaattttagaaagagacgggcgtctcggcggcatcttaaaccagtgcatccacaacggcttcggtctgcacacgtttaaagaggagctcacgggtccggagtacgccgcgcgctttgaagaacgcgcaaaggctttgcatatcccgtacaagctcggcgcaatggtgctgagtatttccccggaaaaggtcgtcacggcagtcagccgcgaagacggtctgttcaccgtggaagcgggcgcggtcattttggccatgggctgccgcgagcgttcccgcggcgcgctgaatatccccggctttcgcccggcgggcgtgttctccgccggcacggcgcagcgccttgtgaatatggagggctatatgcccgggcgcgaggtcgtcattctcggctccggcgatatcggtctcatcatggcgcgccgcatgacgttagagggcgcgaaggtgcacgtcgtcgcggagctccagccatactccggcggcctcaagcgcaatatcgtccagtgtctcgatgacttcggcatcccgctgaagcttagccataccgtgacggaaattcacggcaaagatcgcgtaacgggcgtcaccatcagcgccgtagacgacaaattaaagcccatcccgggcacggaagagtattattcctgcgatacgctgcttctgtccgtcggtctgatcccggaaaacgagctcacccttggtgcgggcgcaccgctctcccgcgtaacgaacggccccgttgtcaacgaaagcctagagaccggcgtgccgggcatcttcgcgtgcggcaacgtgctgcatgtgcacgaccttgtggactatgtttccgaagaagccgcgcaggccggccgtgccgccgcaaagtacgtgcagggcggcaacaaagaaactgcagagccgctttcgggcggcatcaagctggaagccaagggcggtgtgcgctacactgtgccgagcgtcattcatcccgaaaatatgccggatacgctcacggtgcgcttccgcgtgggcggcatctataaaaattcgttcatcagtgtctattacggcgatcagcgcgtgcagcaccgcaaaaagaccgtcatggcaccgggcgaaatggagcaggtgttgctgaaaaaagcagaccttcaaaatattgattttgataccgtcaccgtcacggtggaagcggaataaggagggcattactatggaaacgaaatcgtttatctgcatcaactgccccttgggctgcccgctgaccgtcacggttgaaaacggcgaggtgaaaagcgttacaggcaatacgtgtaagcgcggcgagctctacgccgtgaaggaagttaccgcgcctgcccgtaccgtcacgtctaccgttcgcgttttaaacggtgaacgcccggttgtcgccgtgcgcacgaaaacggacatcccgaagggtaaaattttcgactgcatgaaagccatcaacgcagcggaaatcaccgcccccgtccatatcggcgacatcgtcatcgaaaatgtttgcggcaccggcgtaaacgtcgtagcatccgcggacgacgagttgggttaaaagtctttgattaaactttcttcagaaagtttatagggactcggggcaaagccctgaggcgcgctccgcagagcgcgaaatccttttgcttaccccaaaatcaggacgggaggacgaacaatccagtgaattgttcgtccgagggagaccctattaaggggtctccctatgaatttgcacggcaaattcataaaagataaaacttttagaaagagagaataaacgtatgaactacaccgacatcaacgccaaaaccgtggacagttgggtgaaaaacggctgggaatggggcaaacccatttcgcacgaggtgtttgagaaagccagaaacggcgaatggggcgtctatctcacaccgacaaaaatcgtgccgcacgaatggttcggcgagatgcgcggcaagaaaattctgggtttagccagcggcggcgggcagcagattcccgttttcacggcgctcggcgcagactgcaccgtgctggattactccgcagagcaattaaagcgcgaagaagaagtcggcgcgcgtgagggatacacgccaaagtgcgtccgcagcgatatgacaaagccgctgccgtttgaagacggggcgtttgaccttatttttaacccggtttcaaattgttatgtagaagaactggagccgatctggaaagagtgcgcccgtgttctgaagccgggcggcgttttgcttgtcgggtttgataacggcatcaattacctttttgatgacgacgaaacgaagattacgaacacgctgccgtataatcccttaaaagacgaagcactctataaaaagtcgctggagctcgattacggcgtgcagttttcgcacacactggacgaagaaatcggcggccagctgcgtgcgggatttatgctgacggatatttatgaagacacaaacggcgaaggctttctgcacgagcacggcgtgccctgctttgtggcaacgcgctgcgtgaaaaagtaatagctgaataaaaaccgtaaaaagcacggctttcccgaaaaacggcggaaaagctgtgctttttaaattttgccgcaaaaatatttttttgaaatcgcacattcaaaaataagagcataaacgagaaaaacgaagaataaacgagattataattcgcagcttaaaaaaccgcaaaaaagcgcttgacaagccgtttttcgtgtggtactatcatttagcgcccatgggaaagctatgggcattttcagagatttcgtatcgcagcgcacaaagcgtttgccggtaccgagataatttaaatcaattttggaggtaaacgctatgtccacttatatggccaaggctggtcaggttgaccgcaaatggtatgtaattgacgctgcaggcaagccgctcggccgcgttgcagcacaggccgcagttcttctccgcggcaagcacaagcccacctttaccccgcacgttgactgcggtgaccacgtcatcatcatcaactgcgctgaggctgtcctcaccggcggtaaggctgaaaagaagtattattatcatcacacgggttatatcggccacctcaaggctgtccgttatgacaccctgatgcgcacaaagccggaaaaggcgatggagcttgctgttcacggcatgatcccctcgaacaccatcggcagagctgcagaagcaagacttcgtgtctacgccggcagcgagcacaagcacgaggcgcagaagccgacggcttgggaactttaataggaggtaaacgaatatgtacgataaggcaccttatttctacggcaccggcagaagaaaaagctccgttgcacgtgtaagaatttaccagggcaccggtaaggtcacgatcaacgaccgcgatatcgacgattatttcggccttgataccctcaagacgatcgttcgtcagccgctcgttctcaccggtaccgaagagaagttcgacatcgtttgccgcgttgcaggcggcggtgttaccggtcaggccggtgctatccgccacggtatctccagagctctgctccagtacgattccgagagcctccgcgctacgctgaagaaggccggtttcctcacccgtgacccgagaatgaaggaaagaaagaagtacggtctcaaagccgctcgtcgcgctccgcagttctccaagagataatcatccgcaaggatttttctcgagggacgcaaaagcgaatctttcgaacatttccccgcagacaaagcatacgctcgtatgccttgcctgcgggtttttgttttaaaacaagcatcacccccgctccgcaaaaaacggaacgggggtgatgctatttataattctattttactccgcaatttctgcactcagcaggtctaaaatcgcgtcttccgcgttccagaagtacgcggtttcaccgagaagcaccgtgatgcccgtgcggtcaaaataggtgcgcacgccgtctgccatgccgcagcaggcgactgttttgccttgcttttgcaggctttcacacagctccaaaacggcctgcgcgccggaaacgtcaatgttcggcatgccgcgcaaggagaagatcacatggtcgtaggcgggcatttccgccatgcggcggttgaattcatccaccgcgccgaagaacagcgagcctgtcacgtacacaacgccggtcgtctccagcaccggcggcttgccttccaccgtgcgcagcttattcgcgtcaatgtcggagaagcttacgccaatccggctggattttgcaatgtacaaaatcgcagagtacgcaacaccgagcaaaatcgcgaccgtcaaatcgaaaatgaccgttgcgagcatcgtgatgaggaactggctgatgccggattttagcttgtggctgaaaatgtagcggatgccgccccagtcgttcatgcgccacgccgttaccatcaaaacgccggcaagtgccgcaagcggcaggcgcgccatcacgccgccgagcagaaacatggaggcgagcaggaaaacggagtggaacacgctcgcaaggcgcgtctgctggccggatttcaccgctacgctcgtgcgcgcaatggccgccgtagccggcacaccgccgaaaagcggcagcagaatgttgcctacgccctgcgcgatgagctcttggtcggcgttgaacggctcgtttttcatgcgggaagccgaagcaccgcacaaaaggctttcaatcataccgagcgctgcaatcgtcacaatgggcgagatgaggcttttcagcatgtcaaggttcaggctgccgaggtcaaggcggtcagcgagcatcagcgtgcgcggaatgtcgcccaccgtcgcaatggaatccatacggaacagggcggaaacgaccgttgccaaaatgatgcccacaagcgagcccggcacgcgtgcgccccactttttcggccagacaatcatcacgacaacgacaagcagaccaatcagcaccgcttggaggttcggatgaaagccgaggcgcgcgtaagacgcgatttttgccaaattcgagctgccctcggacgcagtgccgaagagattatcgatttgccccatcgcgataataatcgcaatgccggacgtaaagcccatgatgacgggcatcgggatgaagctgataagccgcccaagcttaaaaataccggctaaaagcagcagtgcgcccgccgcaaagcacgcaaaaaacacgccctgcaagccgtaagacgccacaatgcccaccaaaacggcgctcatcgcgcctgtggggccggaaatctggaacgaagcgccgccgagtaccgcaatgacaacgcccgcaataatcgccgtaacaagacccgcagctgccgtagcgccggaagatacgccgaacgccagcgcaaggggcagcgccaccgcgcaaacagtcaggcccgccatgatgtctttcatcagcttggcggtattgtagcccgaaaactcctgcttcaggctcgttaaatagttttttatcatgtttccctccaataaattgattttcccgcataatttgccgcttttttaccgcaacctattaactataccattaggagccgctttaaggcaaggaaaaaaatacgccgttttctcgtacttttctgtgcatacagcccgcgtgacacactttataaaaatctttactttttatcgagaatacgctatactttatacaaaagcaaatgcgaaaattccttgttttaatccaaacaaagaggtatgaaaatgaacgtgaaaaaaacggaaaaagacggcattgtccgcgcctatcccgaaaacggcaagccgctcgcgtggtctgcgtcgtccggcgtagagctcatcgaaaaagacggcctgtattttaaagacttggagaagaccggcgagcttctcccatatgaagattggcgtttgcccgttgaggagcgcgccgcagaccttgcttcccgcctgacaacagaggagattgcgggtcttatgctctattcgccgcatcaagcggtgccgcccatggcgttcggcccgttcggcggtacatacggcggcaaacagtacgcggaagcaaatgtccctgcgtatacgcttaccgaccagcagaaggaattcatgaacaaagagcacattcgccacgtcctcatgattacggtagaagacgcgaagactgctgcaaagtggaacaatgagctgcaaaagcttgccgaaagcatgccgcacggcatcccggtgaacatttcctccgacccgcgcaacggtgcgcgcggcagcggcagcgtagagtttaaaaccgccggcagtgacgtcagcaagtggccggagggcgtcggctttgccgcgtgcttcgaccccgaggtcgtccgccagttcgcggaggatgcgtcgaaagaataccgtgcgctcggcatcaccacggcgctcggcccgcagattgacctttgcaccgagccgcgctggatgcgctttgtcgatacgctcggtgaaaatcttgaaatgacaaagaaaatggttaaggcgtactgcgacggtatgcagaccaccaagaattccgaaaacggctggggatatgacagcgtaaacactatggtcaagcactggccgggcggcggcacgggtgaggccggccgcgatgcacactatgcctacggcaaatacgcggtttacccgggcaataattccgaagaacacaggaaaccgtttacggaagcggcgtttaaattagacggtcccaccgaaagcgcctctgccgtcatgccgtactacacggtttcttggggcctcgacaccaaaaacggcaaaaacgtcggcaactcgtacagcgagtatctcatcaaagatctcctgcgcgaaaaatacggctttaagggtgtcgtttgcacagactggggcatcacgcaggatcccgcacccattatggatacgtttgcaagccgctgctttaatatggaaaacatgaccgagggagagcgctgcttcgccgccatcatgaacggcgtagaccagttcggcggcaacgcggagattgcgcccatcatggaagcgtatcaaatcggctgcgaaaaggtcggcgaagaagccatgcgcgccagaatggagcgctccgctgcgcgcctgctcaaaaatattttccggtgcggcctgttcgagaacccgtatctcgatcccgaagagtccgccaagattgtcggcaacgcggaattctgcgcccacggctatgacgcacaacgcaaatctgtcgtcttattaaagaatcgcaatcactgtctgccgctccaaaagggtatcaaaatctacgtgccgcagcgcaagctccgcaccatgaagggcttcatgcgcaacgatattcccgcccacacggaagaccccgtgacggacgaggtgatttcgaaatacggcgtgcgcgtccatacgcccgaggaagcggacgttgccctcgtctttgtggaaagccccgcgtgcaacgcgtattctacggaagacgtcgcaaacggcggcaacggttacctgcccatcacactccagtaccgcccctatacggcggtgaacgcgcgcgaagtgagtattgcgggcggcgatttccgcgaggatttcacgaaccgcagctaccgcggcaaaacgaacattgcctataatgaatgcgacctggataacattctaaactgtcgcgaggcgatgggagacaagcccgtcattgtctgcgcagcgatcaacaatcccatggtcatgcacgagtttgagcgtgaagcggacggcatcgtcgtcgagttcggtgtttcccgcgccgcggtgctcgacgtcgtcttcggtgattacgatcccaccggccgtctgcccgtgcagatgccgaaggacatggacaccgtggaaaagcattgcgaagacgttccgtttgaccttgaagtgcacgtggatgaattcggtcatgcgtatgattacggcttcggcatgaattatgaaggcgtcatcgagaaataaggggtgacaacgaatgaatacagtagaaaaatgggggctttttgaagtttctctcaagggtccgtctgcgggcaacccgtttacggagcagtccgtttccgccacattccgcagcaaaaacgagatcgtcacggtagacggcttttatgacggcgacggcgtttataaagtgcgcttcatgccgtcttttacgggcgattacgtctatgaaacggtcggcagcttcccggaagcggagtctgccggcgatttcaccgtaacggagccgaacggcaataaccacggcccggtgcgtattgcgaacacgtaccatttcgcctatgaagacaccacgccgtattattccgtcggcaccacgtgctacgcgtgggcgcaccagccggaagaagtgcacaagcaaacgctcgaggagctcgataagggctacttcaacaaaatgcgtttctgcgtctttccgaagcactacatccacaatttccgcgacccggagacctttccgtatgagggcaccccggtcgataattcaaacctcaccgaagaaaacttctcgtatttcgtcgatttttccggcaacaactgggattttacgcgttttaaccccgagcattttcgccgcatggaacgctgcatcgtagaattgcaggagcgcggcatcgaggccgacatcatcgttatgcacccctacgaccgctggggcttctccgtcatgaaccgcgagcaggacgacctttactggaactacgtcatcgcgcgcttctccgcctaccgcaacgtgtggtggagtcttgcaaacgaatacgacctcatgcgcgccaagaagcttgaggactgggagcactacgcagacctgctctgcaaaaaagatccgtacaaccacatgcgttccatccacaactgcataccgttctacgaccacacccgtccgtggattacgcattgcagcttgcagcgccaggatctctaccgtcacgtggaatacaccaccgattaccgcacgcgctaccaaaagcctatcgtgtgggatgagattgcctacgaaggcaatatcgatatgggctggggcaatatctccgggcaggagctcacccgccgcttctgggaagcttccatgcgcggcggctacgcaggccacggcgagaccttcatgaaccccgaagacatcttgtggtggagccacggcggcaagctgcacggcgaaagccccgcgcgcatccgcttcctacatgaaattctcacgcagacgcccggtctcggcttaaagcaaggccccggcgcatttgatgagaccgtcgctgtgccggacgagatgatccccgtcaccggctacgagattcactactacggcttcggccgcccgagcttccgcgatttcgtaaagcccgcgggcgaaaactggcgcgtggaggtcatcgatacgtggaacatgaccatcaccgatgccggcgtgcacagcggcaagttccgcattgcgctgccgggccacgagtacatggccgtgcgcctcacgcgcgtgtagacattcataaagcgtataaatttaaataaaccgtaaaagagggcacccgcagcgctgcgcagtgtcctctttacttgacagaatctttcccgcgccgtacaataaacccaagataacaaagaaatattccgaaaggatgactatattttggcgaataaaagaaaacgccccgctgctatgcgcgaggaagagcggcaggcacagcgcgcagccgcccgtgcggagcgccgcacaaggcgagccacagagcaggccgcacagaatgtcccgcagaagacggaaaccccgaaagcgccgcaaaaagcaggcgtgcctcataaaaagaagatcaacaagttccgcgtggcggttgtctgcactgccgctgtgctcgtggcgctcgttgccctcggcgtggccagcgctgccggtgtgcgcacgcccatcagcagtatcgccgcagacggcgagctggagttcttctccactgtaaaaccgcaggccagcgctgcaccggcagaaaacaccgcttccgctgcgcctacgccgtcttccgctttcgacggcgcacttttcatcggcgacagcatgacgacgtgcctgaaaaactacgtcacggacggcgcaggcagcaccaccgctttgagcgatgcggaattcatgacccgcagcgattattcgtggggcgaagcgcaggacgaactaaacggcggggagggcggcctgtggctcgatgacgacaccgccctcaccgtcacggaagccatcgaccgtttctccgcgacgaagctttacattcaactcggcaaggaagacctcacgtataacgacgtctccgacgtcacgtccactgcgcaggcagttatttccgcgctgcaaacgaagtacccgaaccttgaaattaccgtgcaggccgttacgcccatgctggagtggattgactatcaggggctcagcagcggcaccatcgcgcagtataacgaagcgatgcagacctattgcacgggcaaaaagaacctgaagttcttaaacatcgccgcattctgtacagagggctaccttcccgcggagtattgcgctgaccccgagggcttgtgcatccacttaaacgacgagggctgcgccatttgggcagattatctcctcggcaataaaacgccggagccgtcgcccacccccacgccgacccccgatccgaacggcgacagcaccgataacaccgatacaacggacaccgccggcgacacctacacggacgattccggcgattatacggacaacacaggggattacaccgatgatacgggcgactatacggatgacaccggtgattacacagaagaataacctacaaaatatggtatgcaaaatgtttgatataccatattttgcttttttcaaaacttattgaagtttttttaaaaaaaggcttgcaatttagaaagagatgtggtattataacaaagccgtcagatgaggcggcaaacagaatagttggtgttgattacaacgagggtccacctgttcccataccgaacacagaagttaagctcgtttgtgctgaaaatactcggctggcaacggcccgggacgataggttggcgccaacacttagaagaatcacagaaatgtggttcttttttttatttttcaaaaactataagctccctctgtcagagggacttttttcatttacgcttgcttttagctgtccgcgcagaaatcttgagcaaaactttattccttcaacaggttttacttcacgacttatcatattcagcaaaacaacgggaaaaaacgttttccgcggaaacatagtgccaaggaatattgacatattcgtggatttattgtaaaattttttggaattctgttttttcccaatcacgggaaaaacgatagataaatggaggggcggagaccggcactttcctgtgtggccgcacgcgtacctcgaagaaaggtaagtgttcaaaaagtggaaaaaaccctgatttgtctggccatcgctctggtcgtcggtctgctgatgtcccgcttggcaaagctcgtacatctgcctgcggtcacggcgtacctcgtcggcggtctgctcatcggtccgttctgtctcggcgcgctgaacattccgtacatcggcttcaattctctggagcaggtggagggcctcagcgtcatcacgcagacggcgctcggcttcatcgcgttcgccatcggcaacgagttccgcgtctcgcagctcaaaacgatgggtaagcaggccatcaccgtcggcattctgcaggctgtcatcacgactattgtggtcgatatcgccctcattgtcctgcatctcatcaatcccgccctcctttcgctgccctctgccatcaccctcggtgccatcgccgcggctacggccccggcggctacgctcatggtcgtgcgccagtataaggcagacggcccgctcacaaagctcctgctcatggtcgtcgccatcgatgacgccgtgggcctcgtgctgttctccgtgtccttcggcatcgccggcgcgctcgaaatgggcagcatcagcgttgtcagcgtcattttagagcccatcatcgagatcgtgatttccctcgtgctcggcgcactttccggccttgcgctcaactggttagagacctatttccactcccgcagtaagcgtttgtccctcacggtcgccttcgtgcttctcatggttggtatctcctccatggaatttgagctcggcggcgtgaaaatcggcttctcactgctgctcgtctgcatgatgaccggtacggtcttctgcaatgtgtgcagcgcttccgaagagctgatgagccgtctggatcgctggacaggccccatcaacattttgttctttgtgctttccggcgcagagctcgatttgaacattttaagcaacccgctcgtgctgctcatcggcatcatttacatcgtcttccgttctgtcggtaagatctccggctcttacatcagctgcgccatgacaaagtgcagtgaccacatcaaaaagcatctcggcatcacgcttctgccgcaggccggcgtggcgctcggcatggcgctcaccgctacgtcccttgcagacggcagcatcgtgcgcaacgtcgtgctgttctccgtgctggtgtatgagctcatcggcccgtctctcaccaagcgttccctgcttgccgcaggcgaaatcaagcccgagggcaagaccagcgcccgcgaggagaacaaacctgtaaagcccattaccctcaagtaatttcatagaatacaaaacgcaggaagccaaagcgctttcctgcgttttttcgaaaaaagggagtaaagttgacgaatgtcaactttactccctttttaaacgtctgatgaagtgaatttgcttaatttaagcgtatgtagaaagaacaacagttaacttaacatttccgttctttccagcgtttgaactggcataaatttcaaatgatcccgaaacgtttttcaaaacaaacgaagcggcaccacccaaacttattgtgcgcggaccaattttgttgccagcactatcaagggcgtatacagatattgaggttggcccttcagaagaagtaaaacgaacaatgacaagttcctcgccaaaccaattgccgtcactcataacttggcgcgttgaagaagttagatatgttgtgtattctcgagtaaaagattgaggctgaacttccgagtttggagaaggaatgtcaaccgtttgtgcagaaatggaaatcggcagtgcaataacaaagatgatcgctaagaacagggatgtcattttaattttaaaattcttcttcataactttacctccaaatgagattttgtgatattcgatgtacgattcatgtggtgagatggattgtgcattggaatcactcctatcttagaaaagacaaaattaaattttaattatgcaggtgttgagtatatagagcaataacaagtgtgccgggtaggcgatataatgaaaccattggcagtaagcttttccttttttttcgttgtaacttatgagcaacagaataccaattagtgcacatgcacattcaaggaagaaagatgaggtgtcatagcgaggatttagccattggaacggagcgtctaaagaacctgtaaattgtttgataaaagcatagtatataacaataaggatacctaaagaaataacggaagccgttttgttgtgacgccggtaaagaacataagggatgataatgcaaataacagcaaaacctccaccctcaacgtttagaatttctgctaaaaatacaaggagtagaacgggaatccaagctgcccatgaaaaaatttgctttttaataaaatcatagagtaagcaacagacagcaccgagtaatagagtaaaaagaatattgttgaaggcgaattttacaaaaccatatcgcaatgtgagattataaggaacttcggcaatgatagcaaatactaaaaggcggagacaataaaaaagtgcattatccgtatgtatacagccttgcgctataccgaaagcataaataggaaaagcaatactaccgatacattgcagcgcagtgacaacggggtaagaaacatcaggttctattttgaaataagtcaagagtatagtttgaacaggtacagccgcgtaaatatgccctaaaatcattgaaaataaagcagtccatttcaatttactccaagtcacgaaaaagcctccttttgcaaaattaggaatttatttattctgtgtattttataccataaaagaaaatttttgtcaatgattttaaataaagtaaaaaacttttatttaaatattccaaaaatcaatataaacaaaattgattgaagctaaaaatttgccttgaaagcagggaacaaatgtgctattatgatgaaaagaaattcttagggggcgttttgagtgcgcgttgtgatcgcgatggattcgtttaaaggcagcttgtcttccatagaggcgggcaaggccgtggcagagggcgtacgccgcgcagacggcacaatcgagtgcgtggtgtgccctgtggcggacggcggcgaaggcacgtctgcagcgctcacagagggcctgcacggcgaaacggtgcgcgtgcgggtcacgggcccgctcggcgagaaggtcacggcggaatacggcgtcaaaggcgacctcgccatattggaaatggcacaggcagcgggcctgccgctcgtaccccaagataagcggaaccccatgaaaaccaccacctacggcgtgggcgaaatgctgcgcgatgcaataaatcgcggctgcaagcggtttatcctcggcatcggcggcagcgcaacgaatgacggcggtgcaggcatgctgcaagccctcgggttcgatcttttggataaagacggcaaccccgtcccgttcggcgcagaggggctgcgcgtgctcgcgaaaatcgagaacaaaaatgccctgcccgcgctcaaaaactgcgtcatccgcgcggcgtgcgacgtcacaaacccgctgtgcggcgaaaacgggtgcagtgccgtctttggtccgcaaaagggtgctacgcccgaaatgattcgcgaaatggacggctatatgcgaaattacgccgcattgacgaaagaactgtatcccgaaagcaatcttgatacccccggtgcaggcgcggcgggcggcctcggcttcgcgctcggtatgttcctgcacgcagagcttatgcccggcattgagatcgtcatggaggaaacgcatttagaggaaaaaatcaaaaatgccgatttcgtcgtgacgggtgagggcagattggacgcccaaaccgccatgggcaaagcgcccgtaggcgtggcgaagcttgctaagaagtatcacaagcccgtcatcgcgtttgcgggcggtattgaaaagggcgcggaagcgtgcaacaaagccggcatcacggcgtttttccccgccgtgcgcggcgtgacgacattagacgaagccatgcaccccgaaaccgcggcggaaaatctcgccgaaagcgcagagcaggtctttcggcttcttaccctgcgataaggaggtacggtatgcacgatatttggaacccgtggcacgggtgcgtgaagtgcagcgagggctgcgcacactgctatatgtattttctcgacagtcagcgcgggcataacggcgcggaaatttaccgcacaaaaacgggctttcactatcctttaagccgcgaccgcgcaggcaactacaaagtaaaaagcggcgagcagctgcgcgtgtgcatgacgtccgatttctttttggagcaggccgatccgtggcggcgtgaagcgtgggagatcatggatcagcggcgggacatctcgttttttctgctcacaaagcgcccggagcgcgtagaaaaatgtttgccgtataactggggcgacggttgggagcacatctttttcaacgtcacatgcgaaaatcagcgccgtgcggacgagcgcatccccattctgcacagcctgccgtttaagcacaagggcatcatgacagcgcccttgctcggccccatagagattgaaaaatacctcgcgatggggcagattgagcaggttatctgtggcggcgaaaactacgacggcgcgcgcccgtgcgattatgactgggtgcgctcgctgcacaggcagtgcgcaaaccaaaacgtcacgttctgctttatcgagacgggcacaaacttcatcaaggacggtcggcggtacttcctgccgaataagcgcgtgcaaagcgaaatggcgtataaatccggcatatcgtatcagggcaagccgatgaaattcaagctcgaagacgattacggcctgttcgatgccgggcgaaaatacgaaaaatacttcggctcccagtgcgaaaaatgcggcagccgcatgatctgcaacggctgcgcaaggtgcggtaaatgcacggtgctggaaggaaaatagaaaagagggtttagctttgtgttgctaaaccctcttgattatttactcaaagtgatttcaaaatcacaaggagtaagattttcacccgcgtacttgactttaagaatgacataaccatcaggaatagttttacaaactggattactttttgagtagttttcgggataaatggtgatgtcttcatagcattgatgttgaacgtcgtttgcatcatagacaagcaaagaatagagcagggaagaattttcattaaattttgtttcgggtgaaagacagacagataaaaaactgtggttaccgatttcaatttgctctgatttaccgtaataaacagtggtatattctgaatgcaactcacaatctgaaatctgtaatgtttcagacatatttgtggatttgcagcttgtcaaaaagcaaaacaagagtaaggttagaataaaaaacggctttttcatatagataatttcctctctttgagtttgatacctttaaactagttttcgctagtcccatgtcaaatcaaattccccatcagtgccatcaggtatactaatgccgttggaagacaaattttcatattcatattcgcaaacggtttcctgtgcaatgggtcttgaaaatagaaagaatagcaaaattgcaaaggaaacaccgattaagaagcctaacaagaggacaacaataatgtgcgcgggacgttcaaagaaacgtttctttattttaaaaagcaaagatttgcgaggggaaagcggttcggtcgaatgttcggttgataatatcgatttatcaagtgatgatgtgtcgagtggttcagctttgggttcgtttaataaataatcaataggaacttgatagagcttgctgatttcaattagacgttttgaaggtggaacacttgtccccaattcccagttagaaacagtttgtctggaaattccaagcttttctgctaattctgattgagtaaagccggatttcttccgtaattgatatagtttttcgtataattccatgttgtctttcctcgctttaattctgcacaaaatcagccataatgtaaaccaaatttaaatggcagatgtgcaaattttacttgcgtttgtgttttttagcgaaaaataagttgtatatgctcggataaaacaaaagggataagaactttgtcgttcttatccccgataattaaccgtttacttcactttccccgtcttcttccgtcccgtaaaaatcgaaacgccgaagatgacgaaaagcagcagcaccgcaaagcacatccagctcacaaacaccgccgtgctcttgccgctgaacatatcgtagtagcctttcaggtaaatgatgaccacaatcagaggcagaatgtactgcatgtaaaggcggatccaatgcgggaacttgatgccctcgcctttattcgcttccttgaggaaattctcaaagccccaaccgtttttgcgcacgcagaacagtacgaacacaaggctgcccagcggcagcagattggaagaaacaaggaagtcttccatatccataatgttgctgccctcacccagcggctgaatgccggaaagcacattaaagccgagaatcgccggcagggaaagcaccgtgatcagcacaaagtttacgcccacagcctttttgcggctccaaccgccgatatccatgaagaatgcgagaatctcctcaaacaccgcaatgatggtcgaaagcgccgcaaacgacatgaagatgaagaacagcgtgccccaaattctgccgcccgccatattattgaagagcgtcggcagcgtgatgaacagcagcgacggacccgagcccggctccaccccgtaggcaaagcacaccgggataatgatgaaacccgccatcagcgcaacaaacgtgtccagcagcacaatgttcaccgcttcgcccgtaatgcgctttttgcggtccagatagctgccgaagatctccatggagccgatgccgatggaaagcgtgaagaacgcctgcgacatcgccgcaaacaccgcgttgccgaagcctttctttgccacttcaccgaagtccggcacaaggtagaacttgatgcctgccgcggcgttcggcaaaaatgcggagttcacagccagcgcaatcatcaaaagcagcagggcaatcatcatgactttcgtcactttctcaatgcccttttgcaggccaaagccgcatgcaccgaacgaaataacaatggcgacaatcgcccagaacgtcagcgtgcccggatttgtcagcatatcgccgaacacgccctctaccgccttgccgtctaagccgacaaacgtaccggttgcctccataaatgcgtatttcagcatccagccgcccaccatggtgtagaacatcatcagcaaaaagctgccgagaatgctgatccacttcatgcgatgccatttcgtgcccttcggttccagtgtatcgagcgccttgcccatgcccatgcggctgccgcggcccacggtgaattcgcacaccataatgggcagccccagcgccacaaggaacacaagatacatcaggatgaatgccgcgccgccgtatatgccggtaatgtatgggaatttccacacattgccgataccgatggcgcacccggccgaaactaaaataaatcccaaccgagaaccgaatttttctctttctttcatacgttttcctcccaaaattttttcccctgtatattttaaagaacgcatatttgcgttctaatcgggcgaggttatgtgcggaaagcgtttctttgccgcacaacttcatagaacatcacggtcgccgcacaggcgacgttaaaggagcttgcgctgccgttcggatccatcggaatcgtggcgagcacatcgctcttttctttatagatacggcgcagaccttcggtctcgttgccgatcatgaccatggtcggcagggtgaagtccacgtccgccaacgtcttttcgtggtgcgccgtggtacctacaagctgaaagcccgggtactgcgcgcgcaatttctcaatgaacgcgaaaacggagtcgttgtccgccatgcgcacggtcggtacgcagaagaacgagcccatcgtagaggagaccacgttcgggtcatataaatccaccgcgtgacccgtcaagatcagtccgtccacgccaagcgcatcgcaggagcgcaggattgtgccgaggttgccgtggttcgaggggcggtcaaacagcgccagaaacggcaccttggaaagcggcaggctacttacgtcgtcctcgcgcattttgatgattgcaagtagctccgaggtatcctctttgccgctcagctcggcgatgagcgccggtgtcagcgcgtaatttacctttgtatgtaccgtaccgagcttttcctttgcccagctcgaaagctcgcgcgtctcatcataaaggaaagagataatttcccagccgtttaaaacggcgttattgatgttgcgtacgccctccacaaaaaattcgccgtacttatagcgcttgttgcggtttgtttttaaaacttcaaatttctggaaagtcgcgtttttagaagcgatacgttcggttttcatacaaattctcccttactgcatgtttttcagcatggttaccgcatcccgcacgtattccgagagcgtcttgtcctgtacgcccactacgcttacggagcagcggttgacgggaatcagaattttcttagcaacgcattcggaaacggccgccgccattttcggcgtgatctcgccccaaagcgcgtttgctaagataatgccgatgggtcccacgatgacgtctgcccacgtgcagtttaccacaacggggttttcgcccgtggcggcagcgtctgcaccagcgcgcagcatggcgcttgtggcaaggctgttcgtgcccacggcaacgacttccgcgtccggcatgttctttttaatctggtcggtcagtgccgcacccattttgccgccctggccgtcaatcacgagtattttcatcaaaatcaaccctccgtaggttcgtttgtgtcgccgtccaaaacggcggaaacgggaagctcgccgtacatcagcgatgtgcagttgatctgcatatcgcccacggtgacgggcttgccgtccgaatacacctcaagcttagaaagcgtcatgcccgcagcttcataaaatgcacggaacgtttttgcaatggcttccagagaagacgtggagctggcggagtctaaatattcctgcaaagcgccggaaaactgcaaacgcacctccggcatttcgccgctcttcatcgtggagacaacctcgccgtctttaacgtagtcgagcgcgtccagcgtcacatcctccggaaatgcgcctttttctgccattttctgcacgagcaccgcaccgtctgcgggcaggctcttgtagctgtactggtcaaggccgctgtcgctcggcacaaaaatcgaaagcgacatgttcacggcttcgcgcgtgtcttcggaagcggtcggctccggagtcagcgtcacgtggctcacttcgctttccgcggcggacgagaccggcgtgtcgctctctaaaatcacgtccggcgtgcgcacgtatttcgtgccgaaccaccccgcgcgtacggcgacaacgcacaataaacagattacgatgacgcctacggccgcaaacggcatggcgcggtctacattgcgcttcagacgctttgcgcggctgttcgcggtaaaatgcgggtctttcgattcattcaaaacagaataatacacgcggtgcagaagatcgtccggcgtttccagggtttctacccattcgcgcaggtcgtcctcgctcatgttcgcggctctttttgctttttccagctgattttgcacggcagaagcggattttccggtcacgcggccgataaagcgcgtgttgtcacctgcaccgtagtgcagcgccaccgccgtcagcagcgtgtaatgcaggcgtaaaatgtcgcagagctctttcggcgtttcaaacggcatgtcttttgagcgctgtgcaatctgctcgtccgtcagcttttttcgaattttctgtgcataatagtccatgcaggtcttgtgcgttgtgcgcagcacccaaaggcgctcctcactttcgcttttaaaggtttgcgtgtctaaaaagtactgcataaatacatcggaaagcagcgtaagcgtctctttgccgctttttgtgtgcatataacagatgcggaacgcgtcgtcgccaaagcgcatcacggcgctttgcagggcggtttcacttcttgtctgcggttttgccatttgcatcgtttcctttctctgagatgagtttgcggcggcgacgttctgttttcaggtcggaaacatcgcggttgatgccgctgtgctgcagccacatggcgatctcgccgccgatgagcaaaataaacatgcaggcatacagccataccattaaaatgaccaaagcggcaaggctgccgtagatggtggcgtaatttgcgaagttctccacgaaaacggagaagaaaaacgagaataagacccacccggcagaagccagcgctgcgccgaaaaacgcgttgcgcagggatacctgcttgcgcggaatggcaatgaacatcaaccagaagaagaacagcagcaggacataggacatgatgggcttaaagcgattgatgagcgtcggaaacgccggcggcatcaccgtgatgagccattcatacagcatgtcgccgaagaccatcaggcccatgctgacaagcagcgtcatgacgaacacgaccgtgtataaaatggctaaaatacgcataaaaatatagttgtggtttttggaaacgtcaaaaacggagtaaagccccttaatcagcgccaccatagccgtggaagcggaccaaacgcaggtgatagccgtcatggaaatgagcgtctgcggcgcgtgcacctcttgaaataagtaactgacaacttcttccaccggcggcgggagcatttgaacgaatgccacgagaagcgaggtgtcttcaaaccgaatgacctgcaaaagggccaaaatcagcatgaggaacggaatgaacgaaatgagaatccagaacgaaacctgcgccgcgtaggagtcgatggcgtcgtttttcagtttttcataaaaccagccgaagtgctttttcagcagaattttcacggcgctttctcccttctcacgctttccttatgtcttatcgcgcaatttgagaacagtataacacagaaatatagaattttccagtgaaaaagcacttgacaaaagaaaaaacgtgtattataataaactacgctacattatagagcagatatggcggcatagctcagttggctagagcattcggttcatacccgaagtgtcgatggttcgaatccatttgccgctaccatctggcccggtggtcaagcggttaagacaccgccctttcacggcggtaacacgagttcgattctcgtccgggtcaccagaaaaaagagccttgtctttttgacaaggctcttttttcaacgaaataaatcccttcggaatttgtgaaattgcccttcgggcagtgaaatgttgctgcgcaacgtgaaatacctgtggtgtgtgaaccgcgctgcagcgcgtagggatttatttcatttcaattgatgcgtagcatcaaatttcacatttcgcagcgcgaaatatttcacttaaaaatgtcgaatcttgtcaaataaaacacgccgtctgcgaaccgaaagcggttcgcggacggcgctttaaaatttatttataaattacacaaataatcattcaaagtcgtgggtgtagatttcgctgccgtcaccgtttaagtagacaaggcggacgtgcacaccggagagacctacttcgctttcgagcgtatcggcgatatcctcaaaggtagaagcattttcttcgcagccttcttttaaagcatcgagcacggactgcttgatgtcttcgtcggagagatcatattcatctgtgaactgatattcatagacgagcgcattgccgtctgcgtagaccttgatcgtcatgctgtcatcggtctgatttttaatttcggcatcgatggacgcttttacgtccggatcggcgagataatcggcgagggaggcaaacatggcttccccagaggaggccgaagattcggtttcggaggaagcggaggcgctgcttgtgtctccctttacgacggttttggcagaggtgcagcctgcaagcgcagagagcgtgagcagaccggcgagtgccaatgcgcagagttttctgagtttcatttgattttacccctttgtactctataaaaatagagaaaattttggcggattttgttgccaccatgcactcaatatagcacatgggtttacaaaaatcaagaagcgcacggcgaattaaaaatttggagaggaaaggaaaaaagcgggacaaggattcggacggcaagacggtaaaattcatatttcctggaacaggcatgaccgaaatcatgcctgttccgcttttatcggctcatcttttttgaccatcgaccgttttgtaagcttattatgccgttcgggcataaagactgtgttaagcaagaggactttggggcgattgaaacagcaaaagactggcttttacaacgcggttgacaaaacggatcatttcctctttactgtacttgtcatagccctccacaacgacatgcatcaaaccgtttgacagatgggtatacatcatctcaagctctgtttcgtcggcatagggcagctctttccgccagtaagcaatgctttcctccttggccaaagcaatcatccgcatgaggactgttgcgcttgtattccccagaatcaaaacccggcaggcgtcctgattctgatcgaccatatcgtaaatggcttcgatcagtgccgtcacatcaaacagattgacatagcgaagggatttctcaaaggcatcgatgagttcattctcaatgctttccatcagggcaaagcaatcgctgtaatgggcatagaaggtggcacggttaagctgtgccagcgcacaaacctccttcaccgtaattctgtttacgggtttttccttcagcagcttcagaaaagactgcttgagcaccatttgcgtatagcgtttccttgcgtccattttctccatatagagcccctcccaaaaaagtttacaaaaaaagcaacacttcaacagacaatgttgcttttctttcagtcgtacggcaagtgccgattgtttccgtctttcctctcaagtatactgtacttgtgaaagataatcaacacttgtatgtttatttgagaggaggctttttgcatgtttgatcaatatcttgttacaggcgctaccggcttcctcggtagggctgttgcggaggagctggtacgccgcagagcgcaagtgcatgcgcttgtgctgcgtgatgacccctatatccatttgctccccaaagaagtccataccgtcatcggtgatgtgtgcgtggaaagttcgttgaaagacttctttgcggatgccgacagccgtacctgtgtgattcactgcgccggtatcgtctctgtcgcgtccagacccggttcaaagctctatcaggtcaatgtaggcgggacatggcgggttctccggcaatgtatggagcataatgtgggcaaaatggtctatgtcagctccgtccatgccataccggaaaagtcaaaggattgcatcattacggaagattgcgaattctctccggggcttgtggacggagattacgccaaaagcaaggcaactgcaacagagctggttttcgaggcggcggagcgtgggctgaatgccagcattgtctttccctccggcatcatcgggccgggcgacatacagggagggagcttcacctcaatggcgaaatcttttctttgcggaaagctgccctttgccgttcgcggcggatatgacttcgtggatgtgcgggacgtggcaaaaggcattctcgactgttccgagaacggagaacccggtaagggatacattttgtccggccactatgttaccattcgcaagatgcttcagcttgtgggaaagaccgcaaagcggaagtatcgccccatctgcctgccactggggcttgcaaagctggcggctccatactatgaacatcgaagcctgaaggagcgaaagccgctgtttttcacaccttattccgttgccgtccttgcctcaaacggacaattcagccatgccgcagcatcggaatgttttgcatatcatccgcgcccggtgaaggatactttgcgggacatgacagcctggcttttggagcagaggagaaaggacgaagtgtgacctcacctcagccaaaagcaccttgggcaggctgcgcatgctattggcatgatctgcggttccggttgctatctgtacgtatcctgtgatataatttgaccaagagaacgcggaagagccgtccgacccgcgctttcaggaacagcaccgaaattccggcagggcaagcgcctggcggatacccctctgcatttggagcacccgcaaaaaggaagtgaacgctatgacctgcgacgagactttttaccaccgatatttgaacggcgacgatgcagggctggaggccctgatgaaaaaatacggcaatccgctaaccctgtatatcgacgggtatctgcacgatgtccacgaagcagaggatttgatgctggatgttttcgcctatctgttcacgaaaaagcctcgcatccgggacggtggcttcaaggcatatctgtataagacggcgcggaatatggcgctgcgccataagagcaagcggaagtgtctgttccgtttggacgagctgaccgatgaatcggacgggcagctgcttgtggaggaggttatccgaacggaagaacgaaaccgcattctgcacttctgtatgggtgaaatgaatccggattaccgggaggttctgtatctgacctattttgagggtatgagttacgcacaggcggcggaggttacgggaaaaacggtaaagcagattaccaacatggtgtatcgcggaaaggaaagcctgcgaagacttctggaacgggaggggattacaaatgcggagtcatgaagagcgcgtcgcggagacaaagcggcgcatcgccaagatggagcgggagaaacggctgcggcgcaatacgattaccgcggcttccgctgtggcggcatgccttgcgctgattgtgggtgtgtctttcgtcatgcctgatgttgccgtaaaaattcaaaccggcggctatgcgggctttgaaacggcggcaagcatctttcacggcggcgcggccttgggatacatcgtcatcgggcttctggcatttcttctcggcgtgtgcgtgactgttttgtgcttccggctgcggcaaatgaatcaggacgacacacaggataaggaaagcgaggaacggcatggagctgattgagaacctgctgcagctgctggtcacgttcgtcggcgcgctgctttcgggcatatcctaccggaaaagccgcaggcaggcgtattttctgttgctgtgcttctacggctgctttgccctcggcgcgctctactggacgctgtatctgctgctgttcgataccacgccgaaggtgttttatgtgtcggagttcggctgggtggccagtgtgatttttctgcggatattgcaggccacgctggcaggcgcagatgagcacagcttccgctgccgcagggcgtggcttgcgcctgcgttcggcgtgccgctgctggcgttctactgcaccttcggggacattctctccaacctgatctggtgcggcatgatgatatggctttcctactgcgccattcgagggcttgcctatgcagagacccggacgggcgcggcgcggaatatgcggtatttccacatcggcgtgctgtgctttgtatgtgcggagtacctgctctggacggcgggctgcttctggccggatacttccccggcaagccccgtcttctggtgcgatatactgctgacgctgaccatattggggctgctgcccgctgtgagaaaggcggtggacgcatgacctatattgaaaacatatttctgtgcatggtgtccccgctgctggtggctgctctgtgcatgggcaggcggcatctccgcttttttctgttctgcatcgttggaatgggtgtgtgcctgctttcggcctacatcaatactttcctcgcgtcggtgtgtcaggcggacgcccttgccgccacggcggagattgcgccggtggtggaggagatgatgaagctgctgccgctggtgttctatcttctggtgtttgagccggagggggataaaatcaaggctgccgcaataacagttgcccttgcctttgccacctttgaaaatgtgtgctatctcattcagaacggagcagaccgtttctctttcatcttcttccgcggcttcggcacgggagccatgcacgttctctgcggtctgatcgtgggcggcgggcttgcctatgcgtggcagcggacatggctgaaaattgcaggcacctgggggctgctgggcgcggccatcaccctccacgctgtttacaatctgctcatcgcctacggcggtgcggcgcagtatgtggcctacgccctgccggtgctgctggtagcggcgggaaggctgtctacgttccgtttatcgcggatgaaataaccgaacattcacaccttgagagctgcttttttggcggctctcaaatttttttggaaaattttgcgttttgggtgagagttttttcgattttatgtacctatataagtgaaagggtttttaggtcacagtttcagacaaaacggagaggagggtcaaactgtatgtacgataccgcaagacgggtcgcactcgtccggcagcgagtacggaaaaacacccgccgaaggcagcagcacggcatatacggactgagtgccgcgtgtatgctgctgttcgcggtgctgatgcaggcgataagcacggtcgtcaggccgggacagaccgccgcatggggcgtgttcggcgcgatgctgctgcgcgaggatgcgggcggctatgtgctggtggccgttgtatcctttgccgctgcggcggcaatcaccgcgctgtgcatgcggttcagaatcagagaaaaccggaaaaagggcgggacaggcaagccggacccgcaggaacaggagggaaaaacgacatgaaaaaacgaatcctcagcattctgctcaccttgtgtatggtgctgaccatgatgcccgcgacggtcttcgcgacggatggagaggttgccgcacgcgcatcggaaacgggcggcctgtatgaacaccacgaggcctgcgacgcagacccggcaggggcatccgatactatgatgctaaaaacgaggagcggggcagtccgtcccgctgccacccaatacacctatacgctgcattacgatgccaacggcggcagcggcgcgccgccaagtcagagcgagattagttcggcattatctgtatggatccccatatcagaaaaaattccaacccgtgacggacataccttcaagggttgggcggatagtccgaatgggaaaccaaagtatcttcgcgaagagggatattattggaattacctgatggtacatccatctttgaacgaaaccatctatgccgtatgggagatacacaatcataactggggcgaatggacctccaacggcaacggaacgcacacacgtacctgcaccgcggacagcagccataccgaaacaggcaactgctccggcggcaaggctacgtccacggagaaggctgtttgcgaaacctgccatacggcctacggagagcttttgcagcctgccaaaacggtgatcaccaccccgcccacgctgccccttccggggtatgtaggaaatgagtataccgacagggccctcaggggcggcgaagcgaaggccgagaatacgggcgtccc

SEQ ID NO: 1742 - DNA, 3062 bp, Unknown
  gut microbiota DNA sequence
ggcacgttccgcttcaagcactatgagggcggcagagtacacccgggcgaaaaccgcatggtgatcctctttacccccgacgatacggaggcatacaccacggcggaatgtatcatcaccgtgatggggacaaagcgcacggtcacaagagttccggatgacgtaatcatcacggacaagcccattggcacggcgtttgagaatctggggcttccttccggcgtcaaggtagagaccaacaccggcgcgagctacagtcccgtgcccgtgacatgggacggttccacctatgacccgaacaaatatggcgagcagatcattaccggcgagctgcatgttgaacagagttactacaaggatgatctggagctgacaagcacggtcagggcaaccgcaaggataacactcattgacgaccgtgtctttacgcccacgctggagccgcccacctattccaagcagctctacggcggagacctgtgcttccttgtgtttgccgataaatatctctccggcggaacggccacggtgaacggcgaaaaagtccccggcaaattcacgctggacaaagatcagaaaatatacggacattccttgacggcgagcacgctattgcaggcggggcagctgcaactgaagatcatcttcacgcccgacaacctgaagcggtataacaaggcgaaatgcaccgttgatgtgaacgtcgttccccgcacattcaaggagaccagggccggacacattaccaatgaaaaattcggaacgccatttgaggagctgaatctctcggattcattcagcttttatgcagtgggcgatgaaaaagatcccgagggaacagggatggacttcggtatgaatgtcgtcacctcatgggacagctcgacctacgaccccaattcgtttgaggagcagaccatctacggcgaagtcaaccgtgccgaattggagaagtatttcaccataccggaaaacgccgacctccgagccgtgagaaaggttcagctgcagcctgacccggccgagacggagatcacgcagctgcccgtattccgatggaagaacggcgattttacgttgcccgacaacaccatattcacctggcgaaagcttcaggtgggaacctacaacggtgaagtcggcacgctcgtcggcggcgtggcaaaggtcaagggtgcggataccgtcgcccccggcacgttctccttcaagaataccccgccgttctacctccggactccgggtgaacacgatgtgacggtggtattcacgccggacgacctgcgtctccacaagccgacggagattaccatcaaaatcaacgccatcaaaaacaccatcaaggatatcgatgaaccgaaccccattaccgataagccgttcggcacaccctttgcagaacttggcttgccggaagatgtgtgcatcaatgccgttgacggcgcgtggtgctggatcgacgtgacatgggatgaatcgtcctatgatgcggagtctgtggattggcagaccatcatcggcacgccggtgcttagtgaagatgacggagacatctttcagcagccggagcctgcggtaacagccgcgattcgggtgaagctcatcgataaccgaccccctatgccgccgacaatcgtcgcggaaagcctgcccgacggcatggaaggcgaggcttacagcaaccgcttgaccgccaaggggaccgcgcccatcacatggagcattgtgagcggcgtcctgcccgggggacttagcctaaacgaggacacaggagagataagcggcacgcccgccggggaagggaccgaggtctttaccgtcatggcggtcaacgctttgggtgaagatattaaggagttttccatcacgatagccaaggctcccgagacggaatacgccgtcatcgtcagggacgacggtcacggcacgggcagcgcggatcccgcctcggcgacggccggaacggaaattaccctgactgctacgccaaacgcgggctaccattttaaggagtggcaggttatgagcggcgacgtgacggtaagggacgacaagttcaccatgccgagcgacaacgtggagatcaaggccatcttcgaggaggatgcgccgcctacgcccacggagtacaccgtcaccgtgaaaacggacggaaacggaacggcttccgcctctcacgcaaaagccgtggtcggcacggaaatcaccctgaccgctacgccaaacgcgggctaccattttaaagagtggcaggttatgagcggcgacgtgacggtaagggacgacaagttcactatgcccggcagcgatgtggaggtcaaggccatcttcgaggaggatgcgccgcctacgcccacggagtacaccgtcacctttgacggcaacgacggtacaccctctgtcggcagcatgaccaccaccaagcagaagctgacctctctgcctgatgcttcccgcagcaagcacagcttcaacggctggtataccgaaaagagcggcggcacaaagattacgacggataccgtgttctctgcaaataccaccgtctacgcccactggacgcataccggagacaacaatccgcccgtcaactactacacgctgcgctttgaaacaggcggcggcagtgctattcccgacgtgcgggaaacgtacaatacctacatggatttgaccaagtatgttcccactcggcacggatatacctttgtcggctggtacagcgaacagagccttgtgaacaaggtctcagacatttatctgaccggggatacgactgtgtatgccggctggcgcgcggttacaatcccgcagaccggtgacagcggtcaaatgaatttgtggagcagcgcgctatgtgcatcttttgccggatgcgttgcactgatcgtatggaaaatcaggcggcgggagaaaaaatcactgtaaatcctcaaaaagtaaaaggcttatcttcaggggcgcgggcaaataacccgcgctccatactatttcccaaaagcagtaaggtggctgccctttaaaaggacagccacctttctctgtgctggtggatgatgatt

SEQ ID NO: 1743 - DNA, 506 bp, Unknown
  gut microbiota DNA sequence
cggctgctgaccgaactcataggaatctcacctctgccgggtactccgccagccccatagggaagtatcattgtccctgaatcgtttcatcgccttatccgtagcaagcggatatttcagaatggttcggaatcgctaccaacctcgctttccgtgataaccctttcgggcaggaagttcgtggcgcaccttcattcggctggggctttcgcccccgatcaggaatgtacctgttgaatgtctattcgattttcaaggttcgtgaggtttttgccctcactaaccaactgggaaatttttttcgatttgtacgaagtttttttgagatttttcaaaaaaatttttcgaccacctttcaggaacaaaaaaagcccctatcacatcacaaaaatgtaataggggcagaaatagaaaaagcccgctgattgaaatcagcgggcttaaatcatatgaaattatcgtatgctatcggaacttgtctgcaatcgcaaaattccaaacgcatt

SEQ ID NO: 1744 - DNA, 5647 bp, Unknown
  gut microbiota DNA sequence
cttgacgttcagtttgccgaaaccatcgacaaatttctatccacgccctccgggtggagggcgacagcaaaaacggacaaagttttcatctggttttgcgcaaaagggagaagaatttgcctctttaagacgcggaaagagaaaaatttgccggtggcgttttaaaaaggacaaattttgggttttgatttggtgcgaaggaagcgggaaaagcgtgtgcgctttggcttcgcactgcgggtaatcagatgagcaggacggaatcctgcgcgtaggcgggctgtacgccgacatgctctacattctgcttatattgattgccgaggcggtaaaaccgcaggctgtccgtttcgggctcgatgagcgcggtgagctctgccttcagtgtaacatactgcgcggcggtcagcaagcactcgaaaacggagttttgtacgcgctgcccgtggtctacgcactttttagcgactttgcggagacgctttttcccggcggcggtctccgtgttgacgtcgtaggtaattaagaccagcattttgacctcacttccagaaaaacggcggatacgcttccagatcgccgcgcagggtgcgggcgagcaggagcgcctgcacgtagggcacgagcccccacggaatcttctcttttaaaaacgggtgcgtgatttgctcctgctttttgctttgccatgcgccgagaaatgcgcggcgaccgtcgtccgttaaaagcacggcaccgctttcctgtttttgcaggtgctttgcggtgatgatcttacggttcacgcaggagagcacaaagcggtcggcatacacggcgcgcagctcctccatgaggtcgagtgcgagactgcggcgaccgggtcttgggcggtgcatgaagccgatgtacgggtcgagtccggcgctttcgagcgcggcggtgcagtcgcgtgtgaggagtgtataggcgaatgaaagtagggcgttgatgttatcgagcggtggtcggcggctgcgcgaggtaaaacggaagtcgctttgctgctgcaaaacgaggtggttaaacacaccaaaatacagctttgcggcttcgccttctaagccgagcagctgcgcggggtcttcgcaggaggcgatgagcggcaaagactgtgccatttgtgcggcggctgttttaagcgtttccacgggtacgcgctgggggtggtcacgcgtggcgcgctccaagacccagcgggcgttatagaccttgccgaggatgaacccgcgggcgtagcggcagctttgatagggatcatcagacacgcgattctgcgtttgccgcaggaggacgttgccgtgctcttcgccgacggtgcgtgccaaaaactgcccgcgcggggagaaaaacgcgatgtccacaccgcgctgcacgcaggcacccatcaaggcgggacttgcgccggcgtaggagaaacagagaatgctctcgagcgtgtgcagcgggaagcgcgcgacttccttttgctcgcgactgatgacgacattttctccgtttacggagagatacgcgtcttcgctgagcacgaacagggtgttgagcagttgtctcacggggtatcctcctcgctttcaaaaatgtgggcgcgcaggtacgagacggggtctgcacggctgcacagcaccggcaggcaaatcgattttaacgagcaggcgttgcagtgcttgccgggtttgacttttggtgtgtagccgcgggcgaaatagcggttcatttcggcagcggtgtcttccgttttgcggcggagttcttccgtgaacggaacaacctcgcggcgacgcgtttctatgtagtagagcgcacctgcggggatatcgcacacgagcatttcttcaagtgccatggcttcggcgcagagctgcaagcggtcggcatcggtctctttttcgcggccgtgcttgtactcgatagggtagggcagccaaaatccgggctgcccctctaaagaaatgccgtttttgtctttatgaaactctacgacgtcgcacgcgccggagaggttcaatttacggctgaacacgcgcatgccgcgcacggtgaaaatgttgtcgcgcttttcggacaacgtttcatcgtggcagcggacgtggtcgagctgcccctgtgcggtgcgggcattttcctgccactgctgctcgatgtggatgagcgcccactggcggcggcagaacgcgaagtgctggatgccggacattaaaagtccgtcttcacgcgcatccatttaggaaagacgttcgcaggtgacgccttcgggcaggtcttcggaaacggtgacggtgtaatcggagaatttgcgcgggacggctacgccgtcgacctttttaaccgttacggcatcgaacagcttataggaagcggcgttgccaagctcggacgcgtgcttgaagatgatgagctcgcgcacggccattttgccgcgggcggcgctgtggtcgttttcaaacatattgagaatggcctgccagagcatttgaaggtcttcttcggagaagccggtcacgcggcgggcgaggttggcggaaacgaagccctctgcgcggtaaagaccgtagggcacgacgtatttgcggcccatttcggtggttttgttctgggcgtcggattcggtggtgatggcagtgcgggtaatggtgacctcctgcggcacgatggggtcgatggagcgggcaaagccgagctgcaccgggccgcgcacctgaccgcagtttaaagcgccctttacgaatgttgtcatgactgcgccgaatgtgcggatgtcgaaaaactcgctgcacatgaagtcacggagcttgaggtcgatatccgggtcattgctgcggagctttgtcacaatctttttggcgtccttgcctttttgaatctcggcaagctcttcgccgatgccgagcgcttctccggcttcgaggtcgctgcggttgagcggcacctgatccttaatgtaaatgcgccagccggactcatcttccttgacgtcctgcacgtagttgcggatctttcgctttaggcacacatcggttatgatgccgttgccggtttccgggtctacacgcggcatgtttccggcatcggggtcgccgttggggttgccgttttccacatcgaataagatcacgaaatcgtagcggttttgaatgggttcacgcatggttatgcctcctctttctgttcggtggtgtctgtttttttcttaaaatattcctgacgctgctggtagtagccgagctggaacgcgccctgttctgcgagcataagctgctttgggaaggtttcgccgagcttgtccgaaagttcgccgatggatttatccagcgcgattctctttccggtatcattgagttttgcgaggtgcttctgcgctaaattgatgagcgtggggaacacaaggctcggcgtagcggaagcggagttgaaaaaacggtctttgatggtggtgttgatgttggggtttgcggcttcctgcgtgcgctccaaaacggcgaacaggcggccgagattgtaggggatattggtgctttctttgtttacggacacggtcaaaacctcctttggacaaagcgggtcttcgtttttagaataataagcttttatgacggacgcgcgcgcccaggtgacattgtgctcggcgcggatgcgctgcacggtgccgtttagtaaagtggcagggtagcgcgtattgtttaggatggaagtgagcaggtcgccggaaaggcgcgggaaggatttttgcagctcttcatcggcttttttccagtctttggaaaagcggacggcagagcgcgcgagggtgtagggccaaagcgtgtcgaatttttcgtaggccgggcgggtgatctccaaacgctcgtaatgggcgttcacgtttttggcgagctttgtgaaggtatcctgccagaaaaagcgaacggaaagacgcgcggcgttcggcgcgagccccagaatgtaaaagtgtgtatcggggctgaggtgcatgtcctgtaggtcggctgttctgccggatacgagtttttgaattgcgcctaaaatgtcgttttcactccaatcggactgctcctgcggaccgaaaagcatagctcccgcaaatgcggcgatggcaggatcggcattctccacccaatatacaacggtgacgtcgccgatgcggcggacattatcactgcgcagcaggtagtttagcgcctgcgtgtaggcggtcatggcgtaggtgctgacgggagcgttctcgccctgctcgtgcccgtaggagcagaaggcatcggcgttgaacgaaacgagcgatgcgccggagctttgtgcgccgcgcacgccctgaatgttgccgtgcagacgcgcggcgggggcgagcttgccggtgacactgcaccgggtgggcgtgtcggaatctgaagcagaatcataggcctgctgccacgcggcggcgatgtcagagtcgtttgccgcgggcttattgttataataaaagatcagattgccgcccttataaatttccgaaagatagggctgcaaagcaggatgctcggcggcagaggaggaatcccatgtgtcgaaaaacgcacggacggcctcggcagcctcaccgggggtatctttcaaaatttccagatgcttttcgcggctggcttcaaagcaagctttggtgcgctcgggcttacctttgtcgtccacgccgagcaggtaggaagacgtatcacacagaaaatttgccgcaacaccggaagagcgcttgacctgtgcgggcacggcgagctgctgcggcagcatctttttaccgtttggagagggcctttggaggggagaaacatcgaaaagggaaccgtccgggtttaggtccagacgccagctgacattgactttgctccagcccgggcggtcaatcttaccgcgggcaaggagcgcttcgtaatactgaactaaggcttgcaggatcatctgaacacctcgcagccggccacctgaatgacaccgtgctccattttggcacggaaatacaggggcgtgatattttgtgggtcggaataatcgaaatcgtacagcataaagccgaggtcgcgcgtctcgtcaatcgtcgggatcgggccaccctcccactgcttgaagtgtgcgggaaactcgcggcagccgaagtacggggtggaaaagcactggccttttctcatgcggcgcgtgacgatgtcctgaaacttgccggggttatcgccgggtgcggctttttccggcagcatctcgaactccgcttcgatgacatagtggacgttcgtcagcaccatggaggcgcgctggacaatttgtttcgtcgtgacgaggtacggttcatcttccttgccctgcgcgatgcgcatggcggtgcccccgagaattttgctttttacctcgttgcgccgaatggtggtgaactcgatggggttcaaaacgtagatgcggcggatatgccagcgtattccggggtgataatacagactttcaactataccgcgcgcggcggacggggtggggacatcgtagcttacacgctcgactttcatctctccgcgtgtgaataacgcatacgggccccagacttccaactgaatcaataagatcaactcctttcaagcttcaactaagttttatttatcaaattgattataat

SEQ ID NO: 1745 - DNA, 14386 bp, Unknown
  gut microbiota DNA sequence
attactgtcggctaatctcatctaactacaaaaacaactcattttaaatgaaccagatctattgaggggctgggggttgcggctcccctatgatctgttcttttgatttttcactttaggttttcataaaaaaggggacgtagtatgctttgggtttcacccgctctcacggtttatatttgtgtgcttacggggattctcggcgcgtgcatgggaagctttctcaactgcatggcgtggcgtatcgtccacggcgaatctgttttacacgggcgctcgcactgcgacgtctgcggccacgtgctcggcgcgggagatttaattcccgttttaagctacatcatgcacaaaggccgctgcaaatactgcggcgcaaagctctctgcgggacatgtctttgcggaagtgttaacggcgcttacgtttttgctgctcgtgctaaaatatgatatttcgctccaagcccttgaatacattttgctggcgtgcctgctgctcgccgctgcattcacggatttggaggggtatatgatcccggaccgtttcatcgtgacggggatcgtcgtgcgtgttgttttcctgtttttgcaggggaacgtgctcgaaaacctcatggatgcgctgctcggcggcttcgccgttggcggcggtttactgctcatcgtgctcttatacgaaaaagtgcgccaaaaggaagccatgggcggcggcgatattaaactgctgttcctcaccggcctgttcctcggctggcagcggaacattctgtgcctgctcatcgcgtgcgtgctcggcatcgtcttcgcgtttgtcttcccggaaaaacgtaccacagaagacggggcagaggaagaagccggaaagctttttccgtgggggccgtccatctcggcggcagcgattctcacgctcctttgcggcagcgagatcatcggcgtgtatttgagcttattttaacggaaagaacaaaagctttacagtttgacggattgagataaagaagaaagcgaggtgtctgtacccatgcccggacaaatcacggcattcgacattggtgagtgcatggtaaaagccgcatgctttacaggcggcaaactgaaaaaggttatggcgaaagaattgccggataatatggtttccggcggcgaaatcgtctccatggacgccatggcggattttatcaaggaaatggcgaaagaaaacggcatctcccgcggtgcggcggcggtcattctgcccggccagctggtgttcacccgcaacgtgaccgtgcccgccatgacggacggccaactgttgtataacctgccgtttgaatttaaagattacctgacgcaggaaaagaataagtattatttcgactacgccgtgcaggatacggtgaaagacgaagagggcaatgtgaaggaattgcagcttttcgtttgcgccaccttaaaaagcaccgtggaagaataccgcgccatgctgcgccgtgcgggcttcaatttgaaggtcgccatgccggaggaatgcgcctacgctgcgctgacggaggattacatgcagcgcacaaatgcgcccgcgggcagcgattactgctttgtagacctcggccacaacggcatccgtatgcacattctgcaggacggcaatttcaccacgaagcgttccgttgacttcggcctgcgcgaccttgagcagacgatttccgatgtgcgcggcgtggatattcacatggcacacgcacacattttgtccgattataacgacgtgctttccgaagacgtgagcgccgagcttttcaaccgcatggcgatcgaaatcatgaaggccgtcaacttctataactacaataaccgcgagcgctcgctccggagaatttatctttgcggcggcggtgtggcggtagatcagatccgcgcggccatctgccgtgtgacggatctggacgtacataacgccgaggaactgcttcctcagcacgacgcattggaagcggcgtggctttacatcaaagcgatcggctgcgcgctgcaaaagtaaggaggcgttggaatgaagcttgaactcggcatggggaacggcgccaaaaagcccgtaaaataccccaccaaaagaaccgtcaaccttgcaaagcgcgagtcgcactcccaaagcgtcatgacgctttctatcggcacggcggtcattatcgtgcttgtggtgctcgtcgtgaaattcggcgtacttgaccagcttgcgcgccaaagtgccgcagaaagtgcttacaacaccgtgcatgcccagtataccgaaatgcagagtgccgtggagaaataccccgaggtcgaagaggagtaccgcacctattccagaaaatggatgcagcaggaggattccggcgcgttcgtttctgtggacagacaggaagtgctcgacctcatggagaactacctgcagccctacggcactataaaggccgtcaccatttcggacgacgtgatgattgtttccatgtccggcatgaatctgcaggagatttccgctatgtttgagattttacagcagcagctaattgtaaaggctgccgaccttacaatcgcttccaccgaaaaaacggcaggcgaagacctcgatttctccgtgacgatcacattacagccggctgacacggcggaaggggaggccacagcatgaaaagagcctttacaacgcgcgaaaaagtgatgctgctcgtcctcaccgtgctgctcatcgtcatcgcatattttaagctcatcttggagcccatcaacaattccatcgacgagtatcagtccgaaacggccgcggagcaggacgagattttgcagaacaccgcgcttttgacgcgtatgaaccagatgcagaaggagctcgaggaaatttatgccgcgggcgaccccacgccgattccgaattacgacaattccggcaagctgctcgttgagttgaacagcattctttcggcttccgtcgattattccctggatttcggtcaggtctcggcattgaacgatggctacatcatgtgccgccccatcaacatggcctttacaacgaacacctacgccgaaacgcgcgccatcatcgatgcgctgcataacagcgattttacaaaccaaatatcggacatcagcgtgcagtttgaaaattccggcagctccggcaatgtgcaggtaaacttgtatattacgtattttgaacttcaaaaatagctggtgtaacacaggccggaagctgttttttgcttgccggttttctgtgtttaaaaagacttataccgttttacggtttccatatttttttcaggagcaaaacgcatgaatttttcacgggatatgaagaatttgaaaaataaaagaaaggggaaagccggctttaccatgtccgagcttttgatcgttgtggccatcgtcatcgtgctgtttgccgtggcggttctctcgcttgtgacgatccaaaagaacctgcgccaaaaggaactcgacagtaaagcggaaatcctttacgttgccgtgcagaatcgcatgtccgagctgcgcgccggcggctacgaaagcctttatcagtacgatgaaaacaaacataacggcgttgcaaaggttggtctcattccgctggatgctcccgaagaagatgcggaagacgccatcacaaaagacacgctctgctacgtcgtttccgcagaccgcgtggaagtcggcaaggcggcagcttccgttctgccggaatcttccgtagatgccgagctttggaacaaccactgggttatcgagtacgaccccgaaagcggcagtgtgtacagcgtattttacagcgaagaggagattacaagcggtgatgtctccactacgctgcccacatacttaaaccgtatgcgtgtgcgccagacccgcctgcacaacggtgcgaagatcggctactacggcggtgcgcgtgtgatctccggcacaaccgacactctaaagccggacatctccatcgataaccgcgagaagctgacggcaacgttctactgcaacaacccatatgccgatgagctgacgttcaatatcaaggtttcggacggccagaacgaatatgtaaaggtcgtaaaatacagcgagcttcgccagctgaacagcaaaacttggtactacacgtgggttatggatagcttggaaagcgaaaagacgcgcttctataatcagaccgaccataagcttgcgtgcggcacagacatcaccgtcacgctttccgtagaaagccaaaacgccaatgtggacggcaaaagctacacccgcaaaacgaacagcctgttccgctatgccgagggcaccccggccggcacggcgctcatcgcctacggccgccatttacagaatttggacgaggcctcccatgtttccgagacgattaccggcgccgtgcaggtcagcgacctttcctttgcggatgatactgccgacaacgaagactggtattccttttaccgcgacgacacctttacgcccatcacaaataagaatctcaaaagctatgacggctattccgaggtcgataacgtaaagctgtattcttccatttcaaacctgcatatcacaaaagctgcgcaaaacggagatgcaggtctgttcagtacatttaacggtgagatcaaaaacgtgacgcttaccggcatgaggattgataatggaggccagaacgtcggtgcgctcatcggttctgtttccgataccgtgaaaatcacaaatacccgtgtatacctcagctccaaaaaaggcgacctcgcagatatcgaaacggtcgattccccggaaaaagtgcagccgtggctcgagggtaaagtcgtcggcggacttatcggcatggtgacgaaaacgggcagcgtatccgttacggacagctccgcgtctacggtcattcgtgcagacggcggcgcagcaggcggcctcatcggtgccgtgtatcatgcggcaacgataaccgattcctatgcggactgctatttgacggcagccagaacgggcggccttatcgcaaaggcagagggcgggtctgaagtagccgcgacgggaacctctatcaccttaaaggatttctatgcagcgggttaccaaacggcgaccggcgatgctttcggcttagtaggcggctccaatgtgatcgccacaggcggttattctgcgtgtgtttacaatgttgaagaaaacgccaaggtccattccacggtgaatacaatggacagtgcctcaaacgtatattatctgacagacggcggcctttccgaagacggcacaagcaagtgggaaaacgacagtcaaaccatgccgaaaacctataaaaaactcagtgaatcgggctttgcaaaagaaatctccggggcgttcacgtcctcctccggcgcggctacgtttccgtataacttgatggatcagggccttacgtattacacgtatccgcgccttgaaaagctgaaccactacggcgactggcaggcggagtttgaatccggcgcactggtttattacgagcgctacgaagacgaaacctacggcttctacggcgcaaacctttccacgctcaaaacgagtaagtttgtcgtcggcgacggctatgcgctggcgtatatcgaaaagaaagatgcgaccgataacgttaccgtgacgtatgcaaacgaccaaccggcacgggtattgtttgatagcgcaattgaaacgaccgacgacacgacaaatacgaagtattatctctatccgctctcaaaagaggttgtcaacaccgattatatcgacactgcagagccggatacgttctaccagaagatcacgataaaagacaccacagccggtacggagacggaatattactacaatccgcacttcgccaaaacggtaacggtcaacgaaaataagccgcaggcgccggaaacggtctgcatccgctccgcccgccagctgtatgccttgagcctttactacccgcagtatgcggatgccgtaaaggacagtgtgttccgtcaggaactcaacattgattacagcaggtatgagtggacaaaatatgacgttgttaccgctactgtcagcatacaggcgccgatcggcacaggggataagccgtttacggctgtgtataacggcggctgcaatacgatagaggaaatttcctttaaagcaaattccctttacatcggcatgttcggttatacgtcgtccgctgccgcggtgcgcaatgtgttccttgtcggcaacggcagtaacacggtggcctatgtcaatgcgcagggcggtaattcggcttccggcagtgcgtcgcgcgtcagtatgggcgtgctcgtcggttataaccgcggcacggtttcaaactgctcggtttccggctataccatggagtattacggttacagcgccagcacggcttcgctcggcggctttgtcggcagcaactacggcaccatccgcaacagcgcttcggactgcccgtccattcgctttgcaaatacgaactctaacacctatgcgggcggctttgcgggcgtgaaccacgcctctatttcggattcctacgcgcttggcagcattcaggtgcgcggcgcgcgaaacagcaccgtgtgggtcgcgggctttgcggcgaacaacgccagcggcatgattcgccgcagctacagcgctacggcgctgacagcttccggcgatgcggagtcctacggctttgcgcataccggcggttcggcataccagtgctattatctggacggcggcacgtattcgtacagaggctcgctttatgcttacaacaccttcacgaacgaattcaaagataacgcggcgggtgagcctcttacgggcagcgagctgcaaaacaaaacaatcaacaatttcgaaccggcagattgcacctataatgccaaagaaacgaccggcgatcattatatctacccggcagtcgtgcgcaatgcagcagggcagaccgtgcattacggcgattggcccgtgcagaaggacatcggtacgctcggtgtgttctactgggaatatgaagacagcggcagcaacagcggctaccacttcagctacgtgggcacaagccagggcaatgaaatttccagcgcaaacaacgacatcttaaagggcgattctctctgtgaagagcacgacgacggcggcgttgtaacgcattacggctacggctatttctatgcaaacagcaataatttggagacttcattaagtgctgcatacttcaatggaaacttcatgcgcgttgcaaaaaatgcagaagccggcgaagcgctcggtaagcagatgcccggctatacgtttgtcgcctttgagaccggcgaagacaaaatgtatttgatcgataacaacgcaaacggcacatggcagctggagtacggcagcggaacggatgctaccgtatacgcctacaccgtcaacccgttctttgcaaactctatgagtctcgatagctccgaagtacagaacaaaacgacaaaaacaggtgacgtcaaacccggcgccaacggcaacgcttacgagattcgctccgtctcgcaactgcagtttgtcaactggaactccggaaagcgcaatacaagcacctccattgtgtctcagaacaaatgggattgggatacgtttaaggataaatacacgtatcaggtttacggcgatactcgcacggtatcgggaagcggcaaagagctgtattggaatcaaacacacgatttgaatgcttcctcagaataccgtacacttggtaagaccaataacttcacgcctatcggaagcatgtatgataatgcaggcagtacagcaaatgctgatccgataatgtcatattttgcttctcattatgacggacaggcctatacgattaaaaatgttgaaattcacagcaatgcggaatgtgttggtatttttggcattacggtcggtgcaacggttaaaaatgtggtcgtatactcggatgaaggcaatgtaatcgaagctaaaaaggatggtgagagctggtactgcgttggcggtcttgtcggctttgcggccggcagagacaatcctgcaagtgtatttaccaactgcacggtttccggctataccattcaagataaccatgcaaatgacccgggttggggcggcggcagtgtcggcggtcttgtcggcatgacaaacatggatattacaaactgctccgctgtaacagatattattatcaatatcggctataatggcgcttatcaaaatctgcgtgtcggcggtattgccggtgtttctcgtggcgcagtgcgatattgttatgccggcggttctatgagaagcacagctaaatcttggtatagtaactataatcagggtgcgaatatctggatgggcggccttgttggcggtattgtcatgcgaaacagcggcggcttagcaactttggttggtgatgtgagtcgtgtgctcaaggttgaaaactgctacagttatgttgagatgccaaaacgtggtaaagccaacgagcaaaatattataaagagtacgcaggcaatcgcctccaatggcgaaatgcaggaaaatttctcggatgttaaaaacgactatattgagattcataactgctatgcacttgaatccgccgtattaaatacagatgattaccgcaaatatggcgataaaactccctcaagttggtctaacctgaacctgaacatgacgcatcaggataagtgggggcgtgagatcaagttgttcaatgattccaccccatacgtaacgtatgccgaaatgcagagcagcgaattcttaacgaaactgaacaagaactaccagtccggctcaagctataagagcttctccaccgttaccatcaccgagcaggggcagaacatcgacggcaaatatagcttcccgggcaacgatacggcgctgcaggggcttaactatccgttcccgacggttctgacacagaccgatatcttcggcagcacagtcaatttgcattacggccgctggccgcgcatcggtctcttatgggaagaaaattcccagaagctcgacctgcttgcggatatcaaaacgaaagcggaagacagcactttgaacgacaacgaagacggcaaggcgcttttgcagacacatttgcttatcgccagcagcgacgtagatacgagcgcagagccggaaatcaagctgtacgacgaaggcagaaacgagctcacaaacgataaggccgcagcaacagtcagccgcattacgtataatcgtgagaataactgctacgatgtcacattcatcgggcagaatgtcggcacggtcgtcgcagaggcgaagctcggcaattacatcgcgcgccttacaatcgaagttacggcatcgctcaagctggaggcttcttctacgaacatttcggtttattccggcgacaccgatacgattacgctgaccgtaaaggacgcaaacgacaagcagctgcttgccgagaccgaaaagacgctcagatgggagattgctgtcgataacaacggcgtgcagcaggatgtcatcgagtgcagcaaggacgatatcaagctgaacgaagacggcacgttctccttgccgcttaccggctttgccgcgggcgaagccacggtgagcatcacgtgcacatatccgtatggcgcggcaactgccgcggagcccgcaaaagaggtcacggctacgctgtatatcggcgctacaacaaagccaagtgatgtgcttggcctgggcctgacaaacggcagcgtctataaccagatttctctgccgcacacgccgaaaaaatccacgacttcctacaccggtacgaccgttgaatacccggaaaacggccctgccatgcaggaaagcgcgctgttcctctacgcaacgaatgagtataccgatttgaaagactttacggtcgatcaaatcgagatcaccgcaggggaaaccacctacactgtgcgtgaagacggcatcacgaccgatgaaaatcacacctacaccgatgaaaatcacacctacaaagtgacggtaagcgataagtggacgacagaaacgaacgacacgaagttccgataccgcgccgtaaaggtggaatctgccgtggcaggcgagatcaccctaaagattgtcctcaaaaacggcgacgtgacctacaacctcaccaccccgtacaccatcgcatcgaacacgtatacagtgaagttccttgacacaaagggcaatattcttctcacaaaaacagtcgattatggcaaaaagccggagctgaccgaggaggataaggctaaattgaaagccgatgccgagttgggctacacctgcacatgggcgctttttgaaatctacgcagatacagaaattcccccgacattaacgccgaacacctataccatcaagtttgaagccaacggcggctcgggtacgatgagtgctgtttcgtatgcttatgataagattcaaacgacggacagccttccgccgaatacatttacaaagggaacatctacctttaagggctgggcgttgacggctacggatgcagagcagtatgcagatggggactcaattcagagcatcgtaaactttatggcgatggagaataagaccgaactcactctttacgccgtttgggaagataccgcagcaggcggcgagaccgttgaaccgtaaatcaacaaaaaggcaggtgccgaaaatgcaggcgatccgcagaaaactgaatagccaaaggggcgcttccatgctgatggcgctgctgcttatgctggtcggcatcatggtgagcgcggtcattatctccgccgccaccagcgccgccgtaaataagcgttcggaaaaagaacagcagcaggcctacctcgcggtcagctctgccgccgagctcgtgcgcgacgatttccaaagccttacgggccggtataaagatgttacgaccacggtgacgaatgcggatggaacgaccactacgaagagtaatacgataaaggccacatgtgcggtgggagatatgatcaatgacatcggcgcacggtttataggtgtgaacacgacgtccacttatgcaaagacctacacgttctccgtagacggttatgaagatgtatcggcagaaatccttgtatcagtcggcaccggcagtgacggaagcagcaaggtgtgtaacctcactgcaacattcacaaacggtgtgggttccgaacacccctgccgcatggtgttgactatggagggcaaattgacggaggaaagaacctccggcgatacgggctccacacaggtcgtcacccaaacactcgaatggaataaggcaaagctgcaaaagggggtaacgggttgaaaaagctgcgttcacaaaaagcggaaacactggtggaaacgctcatggccatcttagtcgtggtgctcgttatgctttttctcttcaccgcagtttccacggcctccaaggtaaatgccaaggtgcgcgaaaccgatgtggctttaacatataagaatgccgccaagggcgaaaccaaagcgctgaccattaaggataaaaacagtgccacaaaaatcatccatgttcaagtcgatgaatacacaagcgaaaacggctacacgtattacagggaaagcaaagagcagggggcgggaacttgaagctgaaagataaaaaaggcttaacgctcgtggaaatgctctgcacagtcgccattttggtgcttgtcagcatggtgatggtgttgggtgtgcagctcggcgtgcgctcctacgcaaaatccgtttcgtattcggaagcgcaggtgctgtgctccacgcttacgaccaccatcagcgatgagctgcgctattccggcacactgaaagtagacggcagcggcaacgttacgggctttttcagccagcagttcggcagcggcgattacaccgcgtttaccactacgccggaagggcatgtgcagcttggcggcaaggacattctgcccgcaaaggcgtacccctacggtattaaagctgaggtaggaaacttaacgtatgacgatgttaccgcccttttcacagtgcagctgagcgtaaaagacagcgaaaataaaaacacgctggccgaaaccacctttgaagtggaaaagctcaatgtgatgaccgaagacaccgcagagggccgcgcccgcgccgaagacatccgcaacgcgcgtaaaattcaatctctgctcggcaagtgggtggcagacggaaccattacttgtgcagataactctaacggcaccggcgtatgggttttggtgtgtcgtgatggcacttcgtatccggacggctatggtaataattatagttcatctgtgttttttggtacaaatcccggcgtttatgtcaataatagtacatcgaccagttggaaaagcggaaatacagaactcaaacggctgatagaagcggaaatggaaacaaatttagagttgaaggccagtgcaaccgcagaggttgataacattggcgggtgggattggtatgttgtgcagtatgtgtacgataagagcacgaaagagtggagtacgtatttgttttccggaatgaaaggtaaatcttccaaagccgatcgcaacacagaacaaaactccaacatgtatcaatacatgaaccgcaatacagaaaactgagaaacaccgcgccaaacggaatgctccgcaggcgcggtgtttttgcaataaagaatttgtatacgctttgttttttgaaaagtatgatttcatgcgatttttcttgcacgtaaaaagcaaatatgataaaatagaaaatatagtgtatttaaatagtgttctttattgtgcagaatagatagaattgctgctttttatccactttttgacgaatttgcagagaatatagcgaattctgtctttggcaagtaagtctatctgtcaaaatgaaagtgctttccgataaaaaataaattgtgagacgaagcagaaagcgctgcaaggagaaatctatgagtttaaaggaaaaaatactcatcgcggacgattcggaaatgaaccaaatgctccttgaggaaatactcagcgataagtacgaatatgtcatggcaaaagacggcacagaagccgtcgatatcctcgaaaaaaacgaggatatcgacctcgtgatgcttgacatcaacatgccgaaaatagacggtttcggcgtgctggagattatgaatctgcggcattggatcagcgaggtgccggttatcatcatctcgtccgaaagcgatgtggatttcatccgccgcggctatgacctcggcgcttcggattacatcagcagaccgttcgatctgacggtcgtccgccgccgtgtcgaaaatacgctcatgctgtatgctcgccaaaagcgccttgtgcgccttgtggaggagcaggtctacgagcgtgaaaagacgaacaacacgatgatcaatatcttgagccatgtcatcgaataccgcaacaacgaaagcggccagcatattctgcatgtgcgcatgatgacggacattctcctgcgccgcttgattgagatcacggataaatacccgttgacggaaacggatatctctatgatcgcttcggtttccgcactgcacgacatcggtaagatcagcattccgaaagcgattttaaataaacccggcaagctcgaccccgaagagtgggagattatgaagagtcacgccgccatcggtgactcgatgctgtgcgatatcggtacgcagcaagccgaaacgctgatgaatctggcgcatgagatctgccgctggcaccacgagcgttgggacggccgcggctacccggatggtctcaagggcgatgagattccgatttccgcgcaggtcgtcgccatggcagacgtgtacgacgcgcttacaagcgaacgctgctacaaaaagtcgttcgaccacgcgaccgctattaaaatgattacaaacggcgaatgcggcgccttcaatccgcttttgatacagtgccttttggacgtgcaggatcagcttttcgagaacatgcacacagaccccagacggttcgattaccgtcaggaagcaaagcgcctttccgatgaaatgctcgagcaaaaagagcttatgcctgataaccgtgcgcacagcctgctcattttcgagcagaaaaaggcggaattcttcgcagagcagtgcggcggtatccagtttgaatttgaccactggacaaataccgtgcgtttcaaagattggaatgcgccggtcgatcaacgagaaaaatccatgtacctgacggaatggaacgacgtttcgctgctctctgaaaaggattgtctcgctctgcgtgaaaagctgaaagcaacaacgccggaaagaccggaagtgaaaatggttgtgcagatccccgttaacggggaatatcgctggcagcgccttatagtaaaatcgctttggacaactaagtacaaaaatt

SEQ ID NO: 1746 - DNA, 3773 bp, Unknown
  gut microbiota DNA sequence
agaaaatcggcggtgcggattaggtgagtggaaaagcgacaggtggggggtggggtagaaaatcatttgcgatattcggaaaaatatgtatttaatgtttaatgagaagttttgaggtttgcatagagaaatattgacaaataagaactgttacgtcatactttaaataaactgaaatcggcagaaaaggagagaatacagttggcaaagctttttgatacggcggatgcagagcgattgatacaggaacatcgcatgatgctggaagaactggatgagattgcacagtacgaagacaacgtgcagatagatattgaaaaagcagcaaatctggtcgtgacccgaaacgtattagacgtgcttcgagatattccggtagaagagatcaatcgtgaaaaaggcggatttagagtgaaagcacttcgagaccacggatttcgttcgatcgcagatattgttgcggccaatgtgtattcgattagttcggtgcataatagaggaagaaatcgaacgtatcaaagcagaaaaagacaagtcaaatgagaaatagtaagagccccgtgcaactttgaagctgcacggggtaatggctttttagtggttcatttgtagaatggcgtttaaatccttctccggctcggaggtgggggtgaggttataatttttttggaggacttgtaggacgttttcggagatgaaggcggggatggtgggaccgagatacatattctgtatgccgaggtagaggagcgtcaggaggatgcagacggctttttgctcataccacgagaggacgagggtgaggggaaggtcgttgacggtgcagtcgaacgcttcgctgagcgcgaaggcgattttaatggcgctgtacgcgtcgttgcactggccgcagtccaaaatgcgcgggaggccgtcgatctcgccgaggtcgaggtcgttgatgcggtacttgccgcaggcgagcgttaagatgagggtatccgaaggggtgagctttgcaaaatcggtataatagctgcgcccgggcgcggcgccgtcgcacccgccgatgaggaaaatgcggcggattttcccggctttgatgagctcgatgatcttttcggcatgagaaagcacggcgttgtgtgcgaagcccgtggtgacgaaatgcccgccgttcatgccggtcatgtgcttatcttctttgtagccgccgcactcgagcgctttttcgatgacgggcgtgaagtctttatcttcgccgatgtgctgcagctccgggtaagagacgacggatgtggtgaacacgcggtcggaatagctttgccgcacgggcatgaggcaatttgtggtgaacaaaatcggtgcagggatattgtggaactccgtctgctggttctgccagccggtgccgaaattgccctttaggtgcgggtgttttttgagctccgggtagccgtgggcaggcaacatctcgctgtgcgtatagatgttgacgccgcggtctttcgtttgctcgagcaaaagcttcatatcgtgcaggtcgtggccgctgacgacgatgaacgggcctttttcgatggtgagcggcacctgcgtggggacggggtcgccgaacgctgcggtatttgcttcatctaagagcttcatgcagcgcaggttgacttcgccggtcttgaggacgagcgccagcagggcatctgcgggaagcggctcgccgagagcttttagggcttcgtagaaaaagcggttcacgatgtcatcggtgcgatttaagacgcgggcgtggtacgcatacgccgccatgcctttgatgccgaacagcagaagcgattttagggagcgtgtgtcttcgtcggcgttccagattttgctcatatcataaggcgtaaaggtatgcgaaagggctttgcacgcttgctcaatctcgtttttcaacatgagaatggtatcattgttgaaatttacgttcgtgattgtcgtgaaaagtccttttaaaatgagttcgtctgtgcgttcgctgcgcctatccgtgcaggcgagcgcgatgagcgcaccgatgaggtcgtcctgattgtttgcggtatcggcctttttgccgcacacgcccgctttgcccgtgcagccggtgttgtgcgccgtctgctggcactgaaaacaaaacatctcgttcataatgtcctccaaaatcctttttgaaggtagttttccgtgcgaatttggttttatgcgcggtgcgggaagcgaggaaaatttgcgcgcttttttgtgggatttacagcccgaattgcgtgcggaccttttggagcctttcggcgttttgggggctgcttatttaaataaatcagcatcactatttaacttcaaaaattcagttaacctatcttgatttacattatacgaaatcatattaccttcttcaaaaatataaaatggtctatttccaataatttcaaatttgccattctcataataaatagtatcttcttcagggagagctattattttttccttttttgataattctagcagatagtttttatttaatttagtcttttcttcatcttgatttgtaaaatgacaaagaaaagaaaaatggcttactacatcaaaacccattaaatctttaaggtcaacttcatttttgtctgcatatttacatgtgtcgatacattgccctagaattatagcaccagcacttcctccaaaaacaataccgttattttcaataaaaatttttattttttcaaatgaaccactatctttcaaatcttttagtaatttaaaagtatttccaccaccaataaataatgcggaataattttctaaatttttattaaataaatcagcacccgaaacaaccatatctatatttggaacatcaaccccttttaattcatctttaatccattcataacagcttggatatctttcacttggcatagcaagtggaatatataatataggtttattatgatctataactttatttaatttcttatttgcatcaactgtttgttgtccacaacctccaccgcataaaaatattctcatcctatctcatctccatatacatttctcttgttattaaaagttgttttgctcttactttctttgccaaaaactaactcttttttcgtaattctattgaaaaaatcaaaaaatgctataattaacacagttgatttaatcaatctttggagtgcattttttcgagtataagaaaagttaaggctcgtttgtaagggcaaacatggaagatatctccgttttggtttttcccttattttatcatgaagaaagcagagagggcaagagagcggttttcaatttaagggactttcggcagatttttcccgataaaaccaaaagccccgagcggcattgattccgctcggggcataatctaaatatttgcgtttaagcctgaggatgattgttgtcacagttggggcacttgccggcttcgttcaacggcgaaccgcacttgccgcagaatttggctacgggtgcgctctgcgggacttggggctgcgggttctgaggctgtgctgccttagaccgaagctgctggcgcaggtcgctcatgtcgggggccgtgaaaatgccgttcttctcttcgtttccgttctggctgcggagcttattgttgatggagattacgtttttcagcagcaagactgccatcatcaacagttcatacaccagtcggatcataatgggtccgaggatcatgatcaggatgccgtagacgcccagccggtggcgttgtgggtcactcttatgatatgtgg

SEQ ID NO: 1747 - DNA, 4738 bp, Unknown
  gut microbiota DNA sequence
tcgttcaccgttacccaacgtccggtttccgccgaccgtttcacggcatcgcaaacgcgttccactcgatacccttctgcgaagctggtagacggctgcctgccttctaccaccgctttgataaactcgtaggattcgatggatttcaattcgccgtacccaatgttcattccgggaatgttccaggtcacttccccgtgaaaatgcgcggggccggtgtagattgtcttaaagccccttctgtcgtcggggtcgccagccaaacacacctgcaactcgttgagtcgctcgtagttgaagtagaggctgcccagagtgccgtgaagctctaccgtgatgaagttgttgcgaccccaggcgtttctcgtggcctcgatgctgcctaccgcgccgcttttaaacttcacgaggaagctgtcctcatcatccacgtctacggtcttccgcttcgcgtcggctccgagctttacggtgcccagcaggtctgtgccgccttcctgcaccggccgctcggtgatgtaggtttgcatcatgccggttaccgcctcgatgtcacccgccagatactgggcgatgtcgatcacgtgcgaggcgatgtcgccaagcgtccccgcgccggcgatgtctttctggaaccgccaggagagcggggaggcaggatcggccgaccagctttgcagataggtgcaccgcacgttgagaattttgccgatggatccctcatcgatgaatttcttggcgaggtcgatcgccggaacgcgcctgtactggtaggcgttcatggcaatgattcccttttgcgccgctttctttgcggcctccgccatggctttcgcgtcctccaatgtcgaggcgatcggcttttcgcagagtacgtgcttccctgcgttcagcgcagcgatggcgatttcggcgtggacgttgttcggtgtgcagatgcttaccacgtcgatctcgggatcgttgacgatgtcgcgccagtccgtgcagcatttttcaaagccgaagcgttctttcgcgtccgccgcgatttccgggacgatgtcgcagattgtctttaaaaccggcacggccggggccggccagaaatacttgggcatgtcggaatacccgattgagtgcgcttttcccatgaacccggcaccaaccaggcccacattcagttttttcattgtaaaatcctcccattctaagatgccctcctgcgccgcgcgccgttgaccgatgccgcggacgggaggagttttagatcagcttgccctgcaggaaacggtacgatgtccggcaggcttcctccgggtcgccggcaaagccgtcagcctccaccagataatctcctgcatatcccttttccttcaggaaccacagaaccccttcgacatcgacgtgcccggtgcccagcggggcaaatccgttttcatccaaatccttcaggtggacgaaggagattctgtcgtagtactttttgacgatctccagaggatctccgccgccggcagccagatgcgccagatccgggcagatcttgatgtcgctcaccgaaaagagtcggtcgatctgctccggcttttccgccatggacccgaggtgcgggtggtagcttgcctcgatgccgtgggcggcgaagaccttttctgcctctttcagccctttggccagaagcgcatagtcgcccgtctggacgcctttcccgcgtatggcaccgccgcagaacgccacgtaggaaacacctacctgttccgccagagcagcgactgtctccatgtgaaacatctcgtcctccagcgcgtctgggtagataaaattggcgcccacgcagacgctcatcatgccggcaccgtagcgggccagcatgtctttgagcacctggatgtccgaaccgtatttggtcaggttcccttccaacacctcaatataccgaaagcctgcatttgtgatttttttcagcaccgcttcgtcgtcgcaaagggtcagataccggatgtccttaatgcttgtaacgccgcctccttctcctaccagagggccgaacgcgtttgtcatataaccgagtttcatgtctgctcctttcttatttttataaatttgcgcaaattagttttacttccattataatactctgcgctgcggtgattgtcaatttctacttgcaattttaagaaaattcgtttgtttcgccaaatataagagacaaaattaggcatttccaatcaagctttcttttcgcttgcaatgctttgacacctgcgttaggctgtccgggccgtttgctcgttggaaaatgccttcacttctcgttctttcgtgtatatttgcgcaaattttctttactgcgccaaaaaaacgcggccgaaaagccgcgaggggataggggcaatgaaaaattccgggaacccggcttgcgcgggcgctatgtaaaaagcggataagccctgattccagatgcttatccgcttgatattctgtcggtcggtttgaacgcggcgaaccgccgttaaagtgcgccggcgctgcggttgatcgcgttgcgcaacgccgccggcggatcctccttgaaaatcgccttccagtttttcagcaggttctcccggtcgatgctgatgggctccaccccgatgaaggaggggaccgcttttcccagcaggccgttggccgccaccattgcgatggcttccccctgctcataggggcactgcgcgctaatcattttgaccatgccgccctgtgccatctgcatggcgatggcatagtccagatctcccgtgacgatcgcgatgtccgtgcgctccagctccgtcagggcctttatcacctccagcgcgggaccgtcccaagaaacatacagagcctgaatctccgggtacatttcgatgagcttcagtgttttctggtagacgtccacctctgtcaggaaattgacttttccgcacacccggatttccgggtattcctccgtcagaacctgttccgccgcgccgtcccgttgctttgtggcaaagaagttctgctcgccgtggcaaatcagccccgcatatttcagaccgtgccgtaccatgtactcgcccaacccgcggcccatactgtccccgtgggctcgctcatttacggagatacaggagatgtaatccttcggggtgagtccctccgggacattggtgatcagcaccaaccgggtgtcgctgtccgcaatcgagcggaaggcttccgcggtgcccctagtatcaacggggatcgagattaggagatccggcttcagaaatttgatgctttccaactgtttgcattgcagtgccgcgttgaaatgagcgtctgtgacggcgatgatggaaatcccaagctcgtcgaagacttttttgatacccttttcttgcaggcgcatccacgccttgcccgtatagtggaatgagatcgccgccgtatactgcttttgccgaatcttttccttttccgcttcggataaggcaaggccgcccgcacccgctgcccgttccccgaagggaccccggccgattccgcaggtggagttgcgcacattgaggattgaggggagagttttcgtgcagtacgcatgcgcgggcgaagagaggtttgcaatttcgccgcggtcaattcgccggaacagcaggtccgcggcggaaagcgcaaactgctgtggctgcttatccacgcaagtgagctccggcgtcgtcagcgaggcccattccggatcgttcaggctgacgacagagaggtcgccgggcacggcgatgttgtggccgattccataccggatggcgggaatcagaggcagcgagtcggcaatcacgaccgcggtgggcgcaggctctgccgcgacgatctgcgccatagcttcggcggccaacgcctcggttttcaagcccgcgcggaccagcactttttccaacgcaatgccggaatcctccagagccttcctgtagccttcaaacctttgggtgccgcacacttccgactcgcacaggtaagcgattcgctcatgcccgtttttaatcaggtgccgcaccgcgcggtagctgccctcaaaggtgtcgggcagcagggtgtctgcggcaaaccgatccacggggttcccgatcagaaccaccggaaaccggagccctttgaaaaaggctccggaaagcacaccttcccggtccgggaaagcgaccattcccgcaagatccagcgttcctgccagtgcgcggatggccgccagtcggtcttcatcgaggtcatacgccagcgaaatggcgatataacccttctgctctacgatttcttccagcttttccttgacttgattctgaaacaggctgcgtttttgcgacagcaagatcagcacatagcggctttcggacagtttgctcttcaatgcgctccgtttcgcgatgaaattcgggagctcgtccagctggcgaatagcgtcctcgaccttccggactttctcaggactaacgtatcgggttccgttgaccacgtgagagacggtcgacacggacacgcccgctatcctagcaacatccttgatcgtcgccatgcatttcgtcctcctgctcagaatacttttgctttcattatacagattccgttctcaatagtcaacaaaatttgcgcaaacgccggtttcaggacgccggaacaggaagcagggacaggaagcagggacaggtaagagctgtgtgactctgcctgtccctgcttttgtttttccatacgcggcatttcgagatacgcctgttct

SEQ ID NO: 1748 - DNA, 1446 bp, Unknown
  gut microbiota DNA sequence
aagagcaaatgcaccgatatgaaaaccgatcacacgcctgtttgttaagacgcttcggatattttcagacatatcctctaagtaccactcattgacaagcccgttaatctgacgggattttttgtttcccttgtttgcggtgtctgcattatcaacgatactgataaagcgaataccccaaatagggaacaacccgtgtatgtatttttcaactaattccagttcacgggtaaatcgggattgtgttttgcagagaattatatcaaatttatgtgcttctgcgtctttcaacaaacggttaaattccgggcgtcgtctgtcagacccggtatagtcatcgtcactgtatatgttgtaaagttcccacccctgttccatagcgtattgcaatagcatagctttctggttctgtatgctgttgctgtcgtcagtttcaaactgcttgtttctatcttcttcggataagcggcaataaatagctactttcatgttcatatctcctcagagataaaacaagctccctctaatggaattataccataatagaggaagcttgtcattatcgctgcgccgcggttattcctttatttttttctaacttattgataagctcaatccatttttgcgtgaattggcttttagtagtcgtattttcgccgcttttgaaaacactactacaaatgttcttagatttttcgttatttgccataattagccccctttcaagaatggctaatacactatatgaaaagtggcaagtccactattacaacaaagaggctttcatcggacggctgttagcacaacctcgcgggagttccacccctgcccgttaaggcagctctacccaatgcctgcgacgcttttaacgctcggactatggctataaaggcttgtctacccttagtgcgtgtcgtcgccacaagccgctacacttgttccccggcgtggtggtggtcgctcgactttctccaatagaggaaaagtgtcatggcgcacccgccgtatggctcgacgcaaaaaggacgtatccgatttgccctatactgcgtcgccgttatcttgcgtcgctttctttttcaaggagcaagcaaggtcaagtcaacaggcagcggaaagggggacgctgcttgtggttatctcaaaccttgaatgaaaggactgcccgcataagacgcgaacgcaaacggtcgcgtatatcctcgtctatgccccaataggtattcccgcgctcgtcgcgcagctttcgcatagatagggacgctatgtaactttcgtaatgctgtacgacaatgttcatagcttccgggtcgcccttagttgcggctatgattaccgggtaaggcaacaagccgcgttcgtcctgttctgatttaatctgtgtaatcataggcgcgttcctccaaatagcgttttaacagctcaaaagagctttcccggcgatag

SEQ ID NO: 1749 - DNA, 3554 bp, Unknown
  gut microbiota DNA sequence
caagaccactacgcccgaaacaagcgacacgcggcactgatttttgctcatacctaaactccgctcgatcgccgtgcgcttcttttgctttacgatgaagaaatagagcagcagcaccaaaattgccagtgccgaaagcagtcctgccgcgaacagaatgatcgccacgtaccgcatattgagtaaaccgccgatgatctggctgtacccgttgtcgtcaaacgtgatctccaaattttcccgaacctccgccggaacatttcggttatacgctgccatgtagtcgtcgaccgtgccgtttgggatttggaaggaggtgttcgccgccgtcatcacaccgtaaccggcaatgttatttttggcagatgctccaacggatgccgccggaataatcgccatatcgtagcccatctcagccgtttttgaggtaagttcataggcgtttatcgtgcggtaaagtcctacgatttcataatcctgctgccaaaacggggtatacggctcgccgtttacatcgatcaggctggaaatatctcgcgcctcacccgcaaatgaaaacaccgatgcgggcgagctttgatagctcgcatagagcaatgcaagcggtaaagtatcgccaacatgcagaccgttcaaattcgcaaaatctgccgagataagacacacagccgcaccgctttcaaactcttccgcggtgatctccctgcctgcttctacaaaagaatctttctcgtgaaaggtcggcagcaatttaaggctgtccgtcggcaaaaccgggataaggtcgtccatttgcaaaagtgaagaagcaaaactctcccaatattttccgcgcccgtttgcgctgtaaaaatccgccgtcacttcttcccacgttttcttcacgccgtttacattctcttctgcaaataccgctttgatcggttcacccatctccgtatactgcgaagcgtaaaccagattgagcgcggtcatttccagcgcgctgccggaagcgccgctcggatcattgagatattccgcgtgcatgttcggcgtcgggtgcatgatggaaatatatgtttttcccgcttccattttttccggcgattccgtatagtggtcacaaaaccagaatgtatcgctatcatgtaagtttccaaacaaaatacgcttaactttcacctgtaccggctgcgtcggcacacagtcttccagcggttcaaattccgccacgatccactcgtcttcaaagccgagtttcgtcacggaatgctggcaattcggcaaaaccgaagtataatacggtctgcgttccggccccgcaaagtattccgcacccgaaaaatcaagcacactttcatcgatcaaagaatcatataccggcgaagaatagttcgtatagcttttcgttgcggcattccaaagcggagaaacctgcgttgcgttttccttttgcgtcaccgttccaatcgtcgtgaaagtcgattctgccgcgtcgattttatgctgtgtgttcagccacaatcccgcccccagtaccaaaagcgccgtggcagcggtcatcaggaggaagaacagcacagcttttaccggcgtgcgaaggagttgtttgaggctctttaacattctactgccagccttccgtcctgcattttgtagacgacatccgcctgcgccgcgatgcccgggtcgtgcgtgacgacgatcacgcagtaattttcatcctgcacgagttttttgagcaagtcaatgacgaccttgccgttctccgtatcgaggttgcccgtcggttcatccgcgaggataactttcgcgtcggatgccagcgcccgtgcgatggcgacgcgctgctgctgaccgcccgagagcatcgccggcagctttcttgggtcaacgtctccaaggccgaccgaacttaggagttcctttgcccgtactttcgcctctttcgtcggtttcttcataatctgcatcgggtacatgacgttctctaaaatgttcaaagtggggaacaggttgaaagactggtagatcaccgtcacgttctcgcgtcggtgccgttcgcttccgatctctttcagcgtttttccgttcgcaatgatctcgccctcgctcggcgtgccgaggcccgcgagcatggaaagcagcgtcgttttgccgctgccggactgcccgatgatcgcgtagaattttcccgcctcaaacgtgcaggaaacgtttttcaacgcctgcaccttctggtatttgctctggtaggtatagctcacattttccgccgctaaaacagccatattcacgccgcctttcgttaatcgattttcgtcaggagctccagtgcgtcaaaacgcaggagcaaaatgagcgccagcaaaacgccaacacacgaggacgcaaggtacagcccgcagatcgtcagaatctgcccgagcgcaagccccgccgtgcaaagcaatatgggcaccgccaccgcgcagccgcacacatttgcgatgagcataccgaaaaagcacgcgcatccgcttaaaatcttcggccgcccaagcgaaagcgagatcgccatgtcccgccgcgtgctgcgcagcaaaagaaacgtcaccagcgtgacaagcacaatgacgagcgcgaaaaacggcgctaaaaaccaccgcagcaccttcaaattctgctccaacttctctgccgtctcaatgaaaagctggtcgtccaccacaagcgtgtcgccgtggcgctcatcaagcgcgttcgggtcgggctttgcaaagcctgcgccgcgcatggcatctttaaaatcgttcagtttcatcgggtcgcgcagcgcacagcggaacgagctgtaataaaaccgcaggttattatccttaacgaccgtttgcagccacggcacagagacgatcatgctgcacggcaccgagctgcccgaggcgctgtccgcgtacacgccgatgatcttcacgccctgcatgccgaggtgctcgtaccgcagcgaaaagccgtcgtcgttgtagcgcgtcacgtaaaacggcatcgagagcgtgtcgcccgaattcaactcgtactgcgccgcgtagctttggctcaccacgcacagcggctccgcgcgctccaaaaacgagaggtcgtacccgttttcaaacgcgatgttctcctccgtcacgccgacgagcgccgaaagcccgctcaccgccgtcacggacgtgtccgcgccctgcacgtcctccgcgcggtactgctcctgaaaattcgcgcacgccgaggccgtgtacaccgcgtctttgatgtccaccttcatgaggttcgcaaagtgattttcgtcgatctcgaaccccacggtgcgcgcaccgctgcggctgaccacctgcgccgtcaccgggatgaccttcgccagatttttctccgcgctctccgccgtctggatgctgccgaggtaaaacgacatgcagcacacaagcagcgccgcaatacaaacagaaagcgctgtccgcccgcggctgcgcaaaacaatgtagttcatttctttcaaaatcaccatatatacttctccatatcataaactaaaggaaaagttgaaaacc

SEQ ID NO: 1750 - DNA, 1486 bp, Unknown
  gut microbiota DNA sequence
cctgctggaccactatgccgctatgtgggggaaaatcgcggaggccctggatggctgcggaaacatcatcggctttgagcccatgaacgagccttttatgggcagcctcgcccgggaatccttcggcgcggccaccatgaaaatgatggagaagtacccggcctttgacatgaaccacccggaaaccatcccgcccgagcaggccggggagtttatggcgctggtgtcggagcgctttctggaatttgaccgcaccgtgctgatggatttctaccgccgcatggagaaggccatccgtccccacagcgggaaggccatcgtcaccggggggaacatctattgcagtaccgacgtgcccaccggcatcgggcgcctgacaaacggcccgcagatctacgccccccacggctatgactcggtggtggattccgaccgctacgaggcattcagtaaggaaaacgtggagcggctctacgccggcaagcgccagacccaggagcggcttggcctgccgaccatcgcggcggaatggggcgcgttcccatccagagagttcaccaacgacctcatcgaccatatgaacagtattattgagcgcaacctgtggggcagcgcctactgcgagtaccaccccggcatggaggaggaccccaacttctctgccctgtgccgggcctatcccatggagaccgccggaacgctccggaagtaccattacgacagacgggccagggaatacgccatggacttcgacagcgatggcggcgagagcagactctacctgccctttgagcccagggaatttgtctgcccgcaggagctgtccaccagcctggaaccgctgggcgacggcaggtatatttgccggatccaggcacccgccggtccggttagcctggccatccgctgaggtatagggtatgaaagccatcagactgaaaaccgaatttctctttgagccggtgggcattgacatcgaccgtcccaggctcttttggaactgtcagggcggtgctcgccaaaccgcctatgaaatagcggccacagcggaggatagccgcaccctgtgggagagcggccgtgtggaaagcccatccatgcgggcgcactggggaggcaagccggtccctccccgcacccgggttacgtggagcgtgcgcctatgggatgaaaacaacgtcccgggcgagtggagcagcgccacctttgagacaggcctgccgaagggggagccctggcaggcccggtggatcgcgggggactatgatgtggataagcgccgccgttacccggtggactgcttttgcaagcgttttcccatttccggcgcgggaagggcgaggctctatatcaccgcctgtgggctgtacgaggcacggctgaacggcagccgggtgggagatttcgtgctggcccccggccacaccgattaccgcaaaagaatgcagtaccagacctacgacgtgaccgccctgctgaaggaggg

SEQ ID NO: 1751 - DNA, 23441 bp, Unknown
  gut microbiota DNA sequence
tcctctcgcatcggggcagagctttttggagcacctcgtcacgacgaacaagaatacaagcttcaaaacgcgctttaagctgcactacgctggccttttgtacccgtggtttgctcgcgcgcaaaaagcacagcttacggattaaaagtattttaatcttataaaagtcgatggcggagcgaaaaagctcctgccgtcgactttcgtcattttgcggaaattttgacgaattgattgtgaaaatagatggttttgcaaaaaaagtagacaaatttttgatgatgtagtatactggcgttaaacgggagagcaagtcgatcttttgcacaaaaacgaataaacggctgaattttcatgttgtcacatgatgagttcggacaacaaaaaggagattttgaaatgaagaaagagcaaaaccggcattcccttcacctcatccgtcaaaacgttccgcagtttattttgctcgttattttttccgtgctgctgggcgtttccgtcatcgcggtgtctgttttaatgaaaatgttcctcgacatcgctacaaatgcaagcactatgccgctcaccacatgtctcatcatcgcggtcggcgttttgctcgtgctcggcatctcgcaggtcgttacgtccgttttgcagggcaagctttcctgccgcatggagctttctctgcgcagcgccatggtggagcacctctaccgcacagaccttaggacgttcgacagcggcgcggcagataactacttcacgcgcatgacaaaagacgcggaaaccctctcgaatttctactccaaaacgctcatcccgagcatctttttcgagagcttcacgttcgtcgtcagctttatcctgatgttcctcctcgagtggaaactcgcggtcgtcatgatcgtcgtcgtgccgattttgattttcaccatgatccgcatctccccgaagcttgagatgaacagcattcagatcatgcagaacgaagacaaaaaccgcaatattttgcaggaatttttaagccagtacatgctgtttaagtcctacggcgtgctcggctgggtgcagaagcgcgtgggggatacatacgcgcaaaagcagaagtacgtcggcaaactcagcgttttgcagggcgccatcggtttcctcaataacttcctcggcgtcggcatgttcatcatcgcgctcggcatgggctcatttctcgtcgtgcgcggcgaaaccaccgtcggcacgctcatcgccgttgtgaacctcgtcagcttcttctacggcccgttcctgcacatttcgggctggatggccgaggtcaacgaagtgaaggtctccacaaaccgcatcggggaaatcctctccatgccgaccgaagacaccacgcaaacggcaaagccctctgttcagaatgcaggtgatgcagcgctcaccgcaaaagacctctcctttgcgtatgacgaagaaaaagttatcctgtcccatgccgaaacgcaggtgcacacgggcgagatcgttgcgctcaccggcgaaaacggcagcggcaaaagcacgctcacaaagctgcttatcggcttctatacacccacgggcggcgaggtcgagctcaaaatcggcaataaaaccgtccacggcgcggagattcggaattatttaagctacgattccggcttcgtctccgtttttgcgggcacgctcaaagagaatatctgcatggatcagccgtttgacgagaaaaagttccgcaaggctgtcgaactcgccaacctcacggagtttgtaaacgaaaaaacagcggagtacgagatcgagccggagggcaaaaatctctccagcggtcagcgccgcaaggtcgctttggcgcgcattttctacgatgaccgcccggtcttcgtgctcgatgagcccaccgcaaacctcgataaagcctccgcagagggcatgtttgaggctctgaagcaggtctgcaaagacaagatttgcatcattgtcacgcacgatgcgttcatctccgaaaagtgcgaccgcgtgctgcatttgaataacaaaaaggtcacaggatgaccgcaatacgatttgcataataaggcgatatgaactctgccactcgcaacgagcgtgggtgtggcttagctccgggcaattccgcccttgcggcaaggctcgtcgtagagaacgtctgcgccgagtggcttataaatcttgagcattgctgatgggtcatttttaacaaaatgtatcttttttacaaaaaaccaaaatttcttcaaaaacctaattgacaaccgaaaaaatgtgtgctacaatgcactaaaccgttgaggaagagtgagtacgctttaggcaacttttctcacagagagtcgtggatggtgggatcacggcggaaagataaagcggaatggacttctgagggcaaacagaaaaggatttcccgagtatgtgagacggagtgtggctctccgtaaacaaaggtctgcgtatgatggtacgcgtaagagggtgtgtgtttcacataccaagccgggtggcaccgcaggaattttgatcctgtcccagcaagtgattgcagggacgggattttttgtttttcagggaggttatttcatgtttgtttacacaaaacgatggcgcagccgcgctgcatccgaaattttgaacccgcatttgaacgcattaaaacaaacctgaaaggatcgataaatttatgaaactcagaaacgtatttgccatgatcaccgctgccgctatgaccctcagcctcgccgcttgcagcggtcagagcacagcttcttccacgtcctccgcgtcaagcgactcttcttcgtccgccgcttccgaaagcagtgtgtcgagtgaaaagagcaccgcaagcgaagaatcttccggcgcatcgtacaccatcggcatctgcaactacgtcgatgacgcttccttaaaccagattgttgagaacatcaatgcacgtctcgccgagattgaaagcgagcagggcatcacaatcaacgtgaagtacgacaactgtaacgccgacgcgaacgtcatgaatcagatcatcgcaaactttgcagccgataacgtagacctcatggtcggtgtcgcgaccccggtcgccatggcgatgcagtccgcaaccgaagacagcaaaacgcctgtcgtgttcgccgccgtgtccgacccggtcggcacgggtcttgtcgcttcccttgaagagccgggcagcaacgtgacgggctcctccgataacctcgataccaactccgttatgaaccttatcttcgcccagaaccccgatgccaagaagatcggccttttgtacgacgtaggacaggattcctccaccgccgccatcgagcacgcaaaggcgtacctcgacgacaaaggtgttgaatatgtagagcgcaccgcaacgaccgccgaagaagtcgcgctcgctgcacaggctctcgtttccgacggtgtagacgccgtgttcaccccgaccgataataccatcatgaaggcagagctcgctatttacgagacctttgctgacgcaggcatcccgcactacaccggcgccgattccttcgccctcaacggtgcgttcctcggctacggcgtcgattacgcaaacctcggccgtgagaccgcagatatgatcgcttctatcctcaccgaaggcaaagacccggcgaccacaccggtcatcacgttcgacaacggcaccgcaacggtcaacaccgaaatctgcgaaaagctcggcctcaacttcgataccgtctccgaagcttttgccccgtactgcacgagagtggaggagatcacgaccgcagaaagcttcagcgatctcgagtcttaatttaaatctctcaaaagcttatcctaccccataagctttcaaacacttcatactaccgtacttactcatatgaatgcaatcaccgctgccatgcacccggttttcgggcgcgtggcttcggcatatcaccacaaatctgcaaaacgaggagtttttgtatgtctttcgattcaatcctgacccttgggcagacagcgctggagctcggtctcatcagctcgctgactgttttggcactgtttttgagctattccatgctgaacgtatgcgacctttccacagacggttgcttcacgctcggcgcggtcgtcggcgcgtccgtcgcgctttccgggcatccgtttctggcaatccccgccgctatggcgatcggcatggtctccggcttcgtcacggcgcttttgcagacgaaaatgggcattgatagtctgcttgccggcatcatcgtcaataccgcgctttattccgtcaacatcggcatcatgaacggcgcgtcgcttctgaacctcaataattccgatacggtcttcaccaaaatgcgttcggtgctcgaaaacacaccgcttgcggggcaatataagcttatcgtcatcaccatcacggttgtactcgtggcggtcgttttgggacttttcctccgcacacgcctcggcctcgccattcgtgcgacgggcaataacccggacatggttcgctcctcgtccatcaacccggttaaaacgaccatcattggcctgtgcatttccaatgcgtttacggcgctttcaggctgcttgctcgcgcagtcgcaaaagtctgttagcatcgatatcggcaccggcatggttacggttgcgctggcatcgctcctcatcggcggcgcgttcttcggcaagggcaaaattccgctgcgtatcttcggcatggtcgtcggtgcgttcgtgttccgccttgtgtataccatcgcgctgcgattcaacctgcccgcgttcatgctcaagttcgtctcgtccgctattgtcattctggcaatctccgggccgtacctcaaaaaacagcttccgtatctgaagcgccgtttcggaaaggagcgcacccatgcttaaactcacgcatatctcgaagaccttcaaccccggcacggtcaacgccaaaaaggcgatcgaagacatcagcttccacgccgcaaagggcgatttcatcaccgtcatcggcgcaaacggcgcgggcaaatccacgctcttcaacgctatttccggcagctttttcacggacagcggcaagatcgagcttgacggcaaggacatcaccttcatgccggagtataagcgtgcccgcagcatcggccgcctgtttcaggaccccatgcgcggcagcgcaccgggcatgaccatcgaagaaaacctcgcgctcgcagcggggcacggcggttggctcagctccatctcccgcaaggacagacaggcgtttcgcgaacgcctctccctgctcggtatggggctcgaagaccgcatgacccagcccgtgggtttgctttccggtggccaacgtcaggcgctcacgcttatgatggccacatataacccgccgaagctccttctgctcgacgagcataccgccgcgcttgaccccgccaccgccgaaaaggtgctcgagatcacaaaaaacactgtggaggaaaaccacctcacgtgcatgatgattacgcacaatatgcagtccgcactggagctcggcaaccgcaccatcatgatgaacgccggcaagatcattctggacgtcaccggcgaagagcgtgcccacatgactgttgccgacctcctcgaccgcttcaagcaagccgccggcaaagccctcgataatgaccgtatgcttttgagcgaagcagagtaaaatttgaaatcgaaagacagcaaaaagcagatgccccgaatccacatcgggtgcatctgctttttctgttccaaaacggcggggatatccgccgtcgttcctttactgttggtgatgcttttttaatacgatttcccaaatctttatgtgtaaagcgttatttttcctcgttttccggcgcaatctccgcttcaatcttatccaagcggcggttgatcttcttttggttttccagaacaaggtcgagctttttgtgcagatcatcgatgatgagctcgctttttaagttgatcttatagtcattctctgcacgctgacggtcttttgcttcttggcggttctggctcatcatgatgagcggcgcttgcacggcagcaatgcacgaaagtacgaggtttaacagaataaacgggtattcgtcaaatgctctcgaacccaaaacgaggtttatgaccatccaaatgaccatgacggcgataaaactgaaaataaacgcccaactgcccgcaaagcgcgccactgcgtccgcggcacgctgcccaaacgtcatgtgctcgtccttgtctgcgttttttgtgacttccgttgcaatcagctgatggatcagttcctcatccgtgaattcctcgtccgtcacatgtaaaagctcgctgataatttggttgcgtttcgcaccttttttcatagtaaacttacctcttatcccaagattcttcgccgcatttcggcgttatctccagtctattacaaaaccgcgtgcgttgtcaaccgcaaggtgtaaaaatagtgaaaaaacgcacattcgcggttttgccttgcgaatatgcgttttgaaattcaataagctttagtgcgtcagcgcttgccgcacggctttctgccaaccattgtagcgtgcttcgcgctcggtatgatcaatctccggtgtgaagcagctgcggtgcgtgttcgcaaagatcgtctccgggtcatagagatcgggcttcacgccgatatatttgcacgcttcattctgtatgactcgtgctttcgtcgttttcagcgaaaaaatgggactaaaacgtccgatagggatattgcaaaaccaaacaagcggacttttgcagcttatgttgtataagcgtcacggcaaggtggtaggggataccctgtttttcgagcggcttacgcaaggtgtcaccgaagaagcctatgcgctcggctacgacctttccgtgcgctatttttacggcagtcagcctactgatgagcagattcgcgccatacaaagcgagccgttcgaagcacttctacggttcggataccgcatcccgcaggacgtttccgttatcgggttcgatgattccagcatcagcaccacgctcacaccgccgctcacgaccatgcaggtgcaaaagcagcacctcggagccctggcggtagaccgtttgcacactcgcctgcaaaaaaatgtgcccgagacccaaacgctgaaacaaaaggagtacgtggaaccgaaacggtaatgagcagcctttatgggtgcttcccgtgctgcacgctttgttgtctgtcctcgtgtaccgtacagagtgggaaatagagaatacctgtggcgcgtctaattgttcctataagcgcaatgtaaaccgctgtattccaatgctgcggaaagagaaagttgcatcgaaagcctaaatggagcaatttcgtctttttggttcgaaaattgccaaaatgtttcttttgagctgtatatacatcgtatgcgcgtttgtgctgaaaccgaaaaaaccggcatgaaacctgtgattgtttaaactaaccgattctgttttaacaaattgtccaaaatggtactgttaacttgcaggttattttttacaaataatagaaaattgtgttttttgtgtgaaaactgttgaagttaggtaaaaatcgtgctattcttttgccagaacaaacaaggtggtgaatgaatatgaaaatgcataagcattttgcaaggcttaccgttttgttctttgttctgactctcatcagcggacacatgaaaaaataattttatgagccgcatggttaaaatgcggcccgcaatacaggaggtatttttatgaattgggcaaaaatcggtcttttcgcagcaggtgttctgtttggtaccgccggcatcaaggtgctcggcagcaaggacgctaagaaggtctacaccgagaccactgcagctgctctgcgtgccaaggagtgtgttatgacaacggtcacgaccatcaaggagaacgcaaacgacatcctgaccgacgctaaggagatcaacgagcagcgcgctgccgatgctgccgcagaggtcatcgaagatgcagcttgcgcatgcacggaagaagctgcttccgcggaagaatccaccgaagcttgatcgcgggtctatcccgggtctgaattaccggagagccgccgaaagcggctctcttttttcgttcatccgctctgtttttcggagcttccaatatattgatattgttgcatagaaggataaagttatgaagtgtaaaattctgcatgaagcgcgcgggcacatgcgtgtacatctcgtctgcggccgcatgacgctgaaagaagccgacgttttagagtattacctgcgcgccgtggacggcgtaaaggaagttaaggtctacgaccgcacacaggacgccgtcatcgtctatcaaaacgaccgcacatcccttattcgtgcgctcgcgacattctcgttcgcaaaagccgaaagcatggagcttgtgccggatcacaccgcccgcgcattgaaccgcgagtttgaagacaagctcgtcttcacggtgctgcgccgcgccatggccaaaatgttcttcccggcgcccattcgcatgatgcttgccatcattcgctccgcaaagtacatcaaagagggcgttaaggcgctgctgcacggtcatctctccgttgctgtgcttgatgccactgctgtcaccgtttctcttgtgcgcggcgatttcgatacggcaggctccgttatgttcatgctgcgcctcggcgagattctcgaggagtggacgcacaaaaagtctgttgccgatctcgcgggcgccatgtccctcaatgtcgataaggtctggctcaagacgaacggcaccgaggtgctcatgccaatcggcgacattcaggcgggcgaccgcatcgttgtgcgcacgggcaatatgattccgctcgacggtaaggtcgtcgagggtgaagccctggtcaatcaagcctctatgaccggcgaatctctgccggtgcagaagtccgtcggcagctacgtgtatgccggcaccgtcgccgaagagggcgagtgcgtcatctgcgtcgaaaaagccatgggcggcggtcgttacgaccgtatcgtccgcatgatcgaagaatccgaaaaattgaaatccaccgcagaagataaggcttcccgccttgccgataagcttgtgccgtacacgcttggcggcacggcgctgacctatctgctcacgcgcaacgtcacaaagatgctcgccgtgctgatggtcgatttctcctgcgcgttaaagctctccatgccgatcgcggtgctgtctgcgatgcgcgagagcagcgcacaccatatttccgtcaagggcggccgcttcatggaggccgttgcaaacgccgataccattgtgttcgataaaaccggcacgctgacgtacgcaacaccgcgtgtcgccatgatcgaaacgtttggcgaccgtgaggaaagcgaaatgctgcgccttgccgcctgccttgaggagcattacccgcactccatggcaaacgctgtcgtggccgaagccaaggaccgcggcctctcccacgaagagtaccattctcgcgtggaatacgtcgtcgcgcacggcatttccagcactgtggagggcaaaaaggtcatcatcggcagcgcgcacttcgtttttgaagacgagggctgcgtgatcccggagggcgaagaagcgaagttcaacgcacttccggccgagtattcgcacctttatctgtgcatttccggtgtgctcgcagccgtcatctgtatctccgacccgctgcgtaaggaagcaaaggacgccatccgcgctctgcacgcttgcggcatcaagaaggttgtcatgatgaccggcgataaccgcaagaccgccgaagccgttgcagcagaggtcggcgtggacgagttctacgccgaagtgctgccggaggataaggcgaacttcatccgccgcgaaaaagaaatgggtcgcaccgttatcatggtcggcgacggcgtgaacgattctccggcgctgtccgaagcaagcgtcggcgttgccatcaataccggcgccgccattgccagagagatcgcggacatcaccgttgcggcaggcgatctctatgagctcgtcaccctgcgtcagctcagcactgcgcttatggcgcgcatccaccgcaactaccgtttcatcgtcggcttcaacctcatgcttatcctgctcggcgtaggcggaatcatccagccgactacctccgcactcctgcacaatatgtccacactcggcatcagcctcaaaagcatgacagatcttctgccggaaaaagcagaggaagagtaagaaaagaagcttcctgtaacggtggtctaaagttttcgccagcctttttcaaaagactgcgggtacttagggcagcgccctaagttgctttcatcagaaagcgaaacctctttgcctacataaaattaggaaggttgttttgaatgtccgggggacattcaaaacgtagggaacccagttgcatgggttcctgcaagggcggtcaatgaccgcccttttttacatccaaacccgcgctttgccgcgccgctccgcggcgccctttcacgctttattgcacaatgggtaaaagggtacaaaaagaaatttaaaataaagcgcatttactactcgacaagatgccaacttcggtgtatactggtagggtgcttgcggcaggaaccgcaaaaacgaacacaatatcttgtggttacgcataaatattcaatataaggaaaattatggaaactgattatgaaaaccaaaggggctggaaacatgcagctcccgcgggcggtatgaaggagcggtaaggaacatgaagatcattaagagaaacggctcggaagcagcgttcgatatcactaagattatcgtcgctgtctccaaggcaaataaagagatcgacgagcggcagagacttacgaacgagcaaattcgcacaattgctgcaaatgtcgaaggagcgtgcgtcgccatggggcgtgcagcgtccgtggaagaaatacaggacctcgtagaaaagcagatcatggggcagggtgcgttcgatgtcgctaaggagtatatctgttaccggtatacgcgttcgcttgcgcgccgcgccaataccaccgataaccagattctcagccttatcgagtgcaataacgaggaagttaagcaggaaaacgcgaataaaaatccaaccgtaaacagcgtccagcgcgattacatggccggcgaggtctccaaagacatcacgcgccgcattttgcttccgcgcgaaatcgtcgaagcacatgagcagggcatcatccatttccatgatatggactatttcgcgcagcacatgcacaactgcgacctcgtaaacctcgaagacatgctgcaaaacggcacggtcatcaccggtacgctcattgaaaagccgcacagcttctccaccgcctgcaacatcgccacgcaaatcgtcgcgcaggttgcaagtaaccagtacggcggccagagcatcagcctcgcacacctcgcgccgttcgtgcagatttcccgcgagaaaatccgccgtgaggtcgaagtcgagatcggcgagcttggcgtttccccggatgaggcccaaatctccaaaatggtggagcgccgtctgcgtgaggagatcaagcgcggcgtgcagaccatccagtatcaggtcgtgactttgatgacgacgaacggtcaggcgccgttcatcaccgtgtttatgtatctgaacgaagcgaaaaacgagcgcgaaaagcgcgacctcgccatgattatcgaggaagtgctgctccagcgctatgagggcgtcaaaaacgaaaagggcgtgtgggttaccccggcattcccgaagctcatttatgttttgcaggaggataacattacccccggcagcgaatactattacctcaccgagcttgccgcaaagtgcaccgcaaagcgcatggtgccggactacatctccgaaaagaagatgaaagagctcaaagaaggcaactgcttcccggtcatgggttgccgcagcgcgttaagcccgtggaaagatgaaaacggcaactataagttctacggccgcttcaatcagggcgtcgtcacactgaatcttgtcgatgtcgcgctcagctccggcggcgatatggaaaaattctggaaggtcttcgatgaacgcctcgacctgtgctaccgcgcactcatgtgccgccacaaccgcttgaagggcacattgtccgacgccgcgccaatcctctggcagtacggcgcaatctcccgcctcaaaaaaggcgagcccatcgatgcgcttctctatggcggctattccaccatttcgctcggctatgccggtctgtgcgagtgcgtgcgctacatgacgggcaaatcccacacggaccccagcgcaacgccgtttgcgcttgctgtcatgaagtacatgaacgctgcgtgcgaaaaatggaaggcggaaaccactatcggcttcggtctgtacggcacgccgctcgagagcactacgtacaagttcgcaaagtgcctccagcgtcgcttcggcatcattccgggcgtcacggataagccgtatatcacaaacagctaccacgtccacgttaccgagcatattgacgcgtttgaaaagcttcgcttcgagtcgcagttccaggcgctttccaccggcggtgcgatcagctatgtcgaggtcccgaacatgcagaataacctcgaagccgtcctgcagatcatccgctatatctacgataacatcatgtacgccgagcttaacactaagagcgattattgccagaagtgcggctacgacggtgagattcagatcgtcgaggatgacggcaagctcgtctgggagtgcccgaactgcggcaaccgcgaccaggataccatgaacgttgcccgccgcacctgcggttacatcggcacccagttctggaaccagggccgtaccgccgaaatcaaagagcgcgtgctgcacttgtaattaagtcaaaatcaagaataaacagtaccgcacagggcaggcgctttgtgcggtatttcatgaatagaggaaaccatcatgaattacggtgagatcaaaaaaaccgacatcgcaaacggcatcggcgtgcgcgtcacgctgttcgtctccggctgcacgcgacactgcaaaaactgcttcaacgccgaaacgtgggatttcaactacggcaagccgtttacaaaagaaacggaagacgaggtgctcgcagcccttgcacccggtttcatcaacggtttaactttgctcggcggcgagcccatggagccgcagaatcaacgcgctttggtgccgtttctgcaccgcgttcgcaagctataccccgaaaaggacatctggtgctattccggttccaccctggagaccgatatgctgaaagacggcggccgcaaccgctgcgaggtcacggacgaattcctgtccctgctcgacgtgctcgtcgacggcgcatttgtcgatgaactcaaagacatttccctgcgctttcgcggctcgtcgaaccagcgcatcatcgatatgaataagacccgcgaaaccgggaaagttaccctctggaacgcgaaaccgtaaaaagtaaacgaaaacgccgctcgactgctgtgtttagaacagtgccgggcggcattttttatttttccacacgcgcagcaacgcaggaattcaaaataagttagaaatcgctaactttttctcttgacattttatattgccgaggtatataatcaatatacccccaaagggtatatgagagtcttctctcacaagaactattttcacaaaaggaagcggtttaaatgcgtacatgtattttgaatgcgaccggcacggacatcagccctgctacgatcatcatctgtggggtgattgcggctatttgtatttttgcagtcatcagctatcgtaaaaaattgaagaacggctgctgcggcggtggcggcgatgaagtgaagcacgtcaagccgcaggatacaaacgtgaacgactacgaccacgtttaccgcatggacatcgagggcatgcactgcaaaaactgcgccatgcgtattgaaaacgcgttcaacgagcagccgggctgcatggcaaaggtcgaccttgtcggcaaattcgctcgtatctacacaaagaagtccgtcgaagaagtcgttttgaagcagaccgtctggcacgccggctacgagccgaaaaccgtcaccgtcgaaaaataagacggaattgaaattcaaagaaaagcgtggtatactctaagaaattcccgaaattatagaagaaagtgatgatagagtatgaaaaagattgccagcttttccgtcaatcatgataagctcaaaaaaggcatgtatgtttcccgcatcgacggcgatgttgtaacctacgacttgcgcatgaaggtgccgaacgccggagattacctctcaaacggcgcgctccacacgttcgagcatcttttcgccacatatgcgcgcaactccgcgttgtccgattccgtcatctacgtcggccccatgggctgccgcacgggcttctatttccttctgcgcgacaacgtgagccgcctagatgccctgcatctcgtgcaggaatccttcgcgttcatccgcgattttgagggagagatccccggcagccgccgcgaagagtgcggcaactacaaagagcacgacctcaagggcgccaaagagactgccgttgatatgctcgaagtcctcaaggactggacgccggagaaaatggaatacgaagcgtaagtcaagctaagattaacacccaaagcaccgttttgagccaaaagccaagcggtgctttttactttaaatgcaggtcaaaaatccgggcagaatatttttgaaaaaaagctaaaataagagttgacaatataccctgtgtgggtatataatcaagataccccaagagggtatataaagcgaaatcggaaaggagaattccgttggaacatacagaagaaaaagagctgcacgcttgctgcaaaagcaatgcaaccgatacggaagcgtgcacagactgcaccgaagaaaaaaccgaagagaagtgctgcggctgtcataaaacaaagcaccgctccgatgaggagtacaaaaagctcatccacagattaaaccgcatcgaagggcagatccgcggcattcgcggcatggtggagaaaagcgcctactgcccggacattctcgtacaggtcgcggcagccaacgcggcgctcaacgcatttacgaaagagctgcttgcaaaccacatcaagacttgtgtagcggacgacatccgcgcaggaaacgatgaagtcatcgatgagcttgtcaccacactgcaaaagctgatgcgataattttcggcgtatttttatgaaaggaagggaagaaaatggaacagtataacgtcacgggtatgagctgcgcggcgtgcagcacccgtgtggaaaaagcggtcagcaaggtgccgggcgttacgtcctgctcggtcagcctgctcacgaactccatgggcattgagggcacggcttcgccggaaagcatcatcaaggccgtggaagatgccggctacggcgcgtccaaaaaaggtgcggcacagaatagcacaagccccaacgttgctgcagaagatgccctgaaagaccgcgaaactccaaagctcaaaaagcgcctcattgcgtccgtcggttttttggctgtcctcatgtacatctccatggggcacatgatgtggggctggccgctgccgaattttctcaaagacaaccacgtcgcgatgggcctcatccagttgctcctcaccgtcatcatcatggtcatcaaccagaagttcttcatcagcggatttaaagggctcatccaccgcgcaccgaatatggatacccttgtggcgctcggctcgggcgcgtcgttcctgtacagcacctatgcgctgttcgccatgacagatgcccagatgcgcggcgatatgaccgccgtcatgggctacatgcacgagttctacttcgagtctgccgccatgattttaacgctcatcacggtcggtaaaatgctggaagcgcgctccaaaggccgcacgaccgatgccttaaagggtctcatgaacctcgcgccgaaaaccgccgtgctcgtgcgggacggtcaagaggtcaccgtgcccgtttccgaggtccgccgcggcgatgtgtttgtcgtgcgccccggtgagaatatccccgtagacggcatcgtcttggaaggcgccagcgccgtcaatgaatccgccctcaccggcgagagcattccggtcgataaggccgtgggcgatgctgtttccgccgcgaccgcgaaccggtccggcttcctgcgctgcgaagcaacgcgcgtcggcgaagataccacgctttcccagattatccgcatggtcagcgatgccgccgccacgaaagcgccgatcgcgaagattgccgataaggtttccggcgtgttcgtcccgaccgtcatctgcatcgctgttgttacgttcatcgtctggatgctcgttgggcagacgttcggctacgcgctcgcgcgcggcatctccgtgcttgtcatcagctgcccgtgcgcacttggcctcgcgacgccggtcgccatcatggtcggcagcggcatgggcgcgaaaaacggcatcctgttcaaaaccgccgtttcgctcgaaaaaaccggcaaggtgcagatcgtcgcgctcgataaaaccggtaccatcacaagcggcgagccccgcgtcacggatattttacccgccccgggcatcaccgaaaaaaaccttctggaagccgcaagtgcgctcgagaaaaagagcgagcacccgctcgccaaagccatcatggcgcgcgttgaggagatcggcgtgcaggcaaaagaagtcacagacttcatggcaaagcccggcaatggcctcaccgctgccctgaacggcgaagttctcgcaggcggcaacctgaagtttatctccacgcaggcagatgtccccgcagattttaaagaaaaggccgaagccctcgcgcagtccggcaaaaccccgctgtatttcagcaggggcggtaagcttatcggcgttatcgccgtagcggatgtcatcaaggaagacagcccgcaggccatccgcgaattgcagaacatgggcattcacgtcgtcatgctcaccggtgataatgcccgcaccgcagaggccatcggccgacaggcaggtgttaatgaagtcatcgcaggcgtcctgccggacggcaaggaaaacgtcatccgcaagctcagagagcagggcgaagtcatgatggttggcgacggcatcaacgatgcgcccgcccttaccagagccgacatcggtgtcgccatcggcgccggtacggatatcgccatcgacgccgcggatgtcgtgctcatgaaaagccgcctgtccgatgttcctgcgggcatccgtttaagccgcgccacactgcgcaatatccacgaaaacctgttctgggcgttcatttataacatcatcggcatcccgctcgcggcaggcgtgttcattaacctgctcggctggcagctgaaccccatgttcggcgcggcagccatgagcctttcaagcttttgtgtcgtcacaaacgcgcttcgtctgaatttattgaacatccgcagcacgaagcacgataaaaaaataaaatcggcaaaacccgccgaaatgaaaaccatcgaggtaaaggagacaaaaaccatggaaaaaacaattaagattaacggcatgatgtgcccgcattgcgaagccactgttaaaaagtgtctggaggcattcccgcaggtcacatctgcagaagtcagccacgaaaagggcacggcggtcattcagctcaatgctgaaatttccgatgccgagctcaagaaagccatcgaagataagggctacgaggtcgtagactgagttcgataaagcttgacacaaattaaaactgtgttacaataaaagcactgcctgtgttgagggcagtgcttttgcattttacaatttgttcacagcaaattggctttttagaaagaataacgacgtaaaattaacataaagctaacgtaaagcaaacggataaagtttcgcccgcctttttcaaaggcggcggattccaaaggcagcgcctttggtcgtcgttcgcaaacgacgaaacctttttgcctccccaaaaaccaggaaggtaggctcaacagtccggtggactgttgagccgtagggaacccagttgcatgggttccctgaaaggcggcacaaagccgccttttcaaaaaccacacagccaaagaatactaaagaagagatgaggaaatcacatggcacgagagcggtatctgctggacgatacggaagacaccattcataaaaacgaaatcaagccgcagaccgcggcggataaacgcaaaaactggtgggattatcacaaggtgcacgtcctgctcgtcgcgctcgccatagccgtcgtcggctatttcatatattcggtcacatccaaaacggaacccgattataccatcaccgtcatgacgcagtataccgtgccgagcgacctgcaaaccgatattcaggagcttttcgagaaatatgcagacgaccgcaacggtgacggcaaaacatacgtcgccatgaatttctgccgctttaatacaagcggcacctcggagtttgaaacatcagagctgcaggcctcgttcgtcaagttcgcgaccgatgcctccgccggtgacagcatgattttcgcttacgacgacgcaagctataaatacctcgatcaggacgatttagaaggcttctttggccccgtagacggcaccgataacgactattacctctggaaggatattccggcgctgaacaacttagagctcaaccactataacgaggagggcgcaacgaaagaaagcgtgctttccgtcctcggtgagctcaaggtcgccgtccgtacagaagacggcgccgcgttcaaaaagcaggaaaagatcgattaccgcagcgactgcgtcaagctgtacgagcgtcttttgaacgacgcacccgcaaataccgaaaattaaatgagagagctgcacatttttacgcgcagctctcttttttctttgacagaaccacgcagacggactataataagcacatagtataccatgtcggtatacatcatccgaatttacgaaaaaggatgggataaaaatgaaactgaaacaacttttaaccgccatcaagtatcgcgcggagcaggtgccggacgtcgacatcaccgaccttgtgtacgattcccgcaaggctgtgccgggctgcgcgttcgtttgcctgcgcggtgcgaatgcagatggccataagtacgcgaaaatggcagcggaaaaaggtgccgccgtcatcatcgcagaggagatcgtggaagcgcccgtgccggtcattttaacggataacacccgccttgccctcgcatatttgagcgccgagttcttcggccaccccgcagagcagatgcacgtcatcggcatcacgggtaccaagggcaaaacgaccaccgcattcatgatgcgctccattctggaggccgcaggccataaaaccggcgtcatcggcaccatcggcgtactgtacggcgataccctcgttcaaaccgataacaccacacccgaaaactacgaggtgcagaagttcatgcgccaaatggtcgatgccggctgcgaatactgcgttatggaggtctcgtccatcggtcttaaagatcaccgcgttgcaggcttcacgtttgagctcggcctcttcacgaatttctccgaggatcacatcggcggcgcagagcataaagatatggcagagtacatggcgtgcaaaagcatgctgttccgcatgtgccgcaccggcatcatcaatatcgatgacccgaattataccggcatcatcaaaaaccatacgtgcaatattgttacctacggctacgataaatcggccgattttgttgcgcatggggaagaactcgttaccacaccggggtttctcggcgtgcgcttctccgtcacaggcaagctgaattttaccgcggatgtcgccatccccggcaagttcaacgtctataacgccctgtgcgccatcacggcgtgcagcgttttgaatatccccgtcactgccatgcagcaggggcttaaaaccgtcaaggtcaagggccgcgtggagcccgtgccgatgcccggcgatttcactctgctcatcgattatgcgcacaacgccgtcagcatgcagagcattttgacaacgctgcgcgcctataacccgaagcgcctcatctgcatgttcggcgcaggcggcaatcgccccaaggtgcgccgtttcgagatgggcgaggtcagcggcaatttagccgatctctccgtcatcacggcagataactcccgttacgaaaatgtgctcgatattttagcggacatcaaggtcggccttgcaaagaccgacggcaaatacattgaaattccagaccgccgcgaagccatccgctggtgcattgaaaacgcacaacccggcgacattattgttctcgcaggcaagggtcacgaagattatcaggagatcgagggtaagaaatacccgtttgatgagcgtgtcgtcattcgggaaatccttgattccatgaaataaagctcataaattactttcgggaaaggacttgtgcagaaatgaataaggaaatcacactggaacagctcgcttcttatgagaccgcgttcgacggtgaccgcgcgaaccgtatcgccatggatgctgccacgaagaatggggtcaacaacgccgccatgcgctttgagaacgcccgtgaaatgcgccatacgttcaacatttctttggagcagggcgacatcacgaatcagaagcagagcggccgctgctggatgttcgcggcgctcaacaccatgcgcttccgcatcatcaaaaagctcggcgtcaaaacgttcgagctctcccagaactacgcgctgttcttcgataagcttgaaaagagcaactatttcctcgagagcatcttagagacgctcaacgagcccaccgcaggacgccttgttacatatttgctttccggtccgctcggcgacggcggtcagtgggatatgtttgcaaacctcgtggagaagtacggcgtcgtgccgaaggaagtcatgccggaaaccgccgcatcctcctccacgcgtgagatcatcggctacctcaccgaaaagctgcgtgagtttgcctgtacgctgcgcaccgcgtatcagaacggcgcttccatggaagagctccgtgcaaagaaggacgacatgatgcagaccatctataacatgctgtgcatcagcctcggcaagccgcctgtgaagttcgatttcgaggtcaagaccccgaacggcttcgtgcgcgacctcggcatcactccgcagtcgttcttcaaaaagtatgtcgatatggatctttcccagtacatcagcctcatcaatgcgccgacgtccgataagccctacggcaagacctataccgtcgcgttcctcggtaacgtcgcagagggccgacccgtcaagtacctcaacctgcccattgaagacctgaaagcggcggccatcgcccagatgaaggacggcctgccggtttggttcggctgcgatgtcggcaagcgcagtgttcgcgacggcggcgttatggatttgaacgctcttgacctcgaaacgctttttaataccgagttcaccatggataaagctcagcgcctcgattatggccagagcctcatgacgcacgctatggtcttccagggcgtcaacctcgacgataacggtaagccgaaccgctggagagtcgaaaacagctggggcaaggatgccggtgtagacggctactacatcatgagcgacgcttggttcgacgagtatatgtatcaggttgtcgtcgataaaaagtacctcacagaagaacagcgcaaagcgcttgagcaagagccgatcacgctccagccgtgggatccgatgggctccctcgcttcggtgcgctaaacgaaaggaaactactgcatttatgaatttaaaggtatctgagatcgccgaaatgtgcggcggcaggctcgtcggcagcggcgaaaataccgtcacgtcgttttataccgacagccgcgagacgacgcccggcaaaatgttcgtgcccatccgcggcgaaaacaccgatgcacaccgttttatcccgcaggtcttcgcatcgggcgcggcagcgactttttccgaagagccgctcgatgcccccgcaggcgatgttgtctacgttgaaaacacccgcgcggcactgcaaaaggtcgcggaaagctatcgcgcgcgcttcaatatcccggtcatcggcattacgggcagcgtaggcaagaccaccacaaaggaaatggttgctttagctgtttccgccggtctcaaaacgatgaaaaccgccggcaacgcgaacagccagatcggcctgcccatgaccgttctgcgcatcacgccggaggacgaagccgccattgtcgaaatgggcgtcagcatgcccggtgagatggcgcgcatcgcaaaagtcgcaaagccgaacatcgccgtcatgacgaacatcggcgtgtcgcacatcgagttcatgaaaacgcgcgagaacatcatgaaagaaaagttcggcattacggattacctgccaaacggcggcaaggtgttcgtaaacggcgatgacgacctgctttccacattaaaaagcaccccggaaaagcagatcgtgcgcttcggtctcggtgaaaattgcgactggcgcgccgtagagcttgaggccgatacggagggaacaaagtttatctgtgtgcacgacggtaaacgcgtagaaatgtacgtccccgctgccggcgagcacaatgtgcgcaacgcccttgccgccgtcgcggccgctgtggaagtcggcgttccggaggaaaaagccgtcgcggccatccgcacctatgtaccgcccgccatgcgccagcagattaaagaagcgcacggcgtcacgctgatcgacgatacctataacgccagccccgattccatgcgtgccgctttgaaaattctcggcggcctgaaagcgaccggcaaaaagtacgccgtacttgccgatatgctggagctcggcgattacgcagagcgcggccactatgaaaccggcgcgtttgcggcggaaaacggcaccgatgtccttatcggcgtcggcccgctcgcaaagcatatcgtcgagggctttaaaaatcatgagaacagcgtgtggttcgcctcgaatgcggaagctatcgcgtatctgaaagaccgtctgcatcccggtgatgccgtgctgtgcaaaggttcccgcggcatgcacatggatgaaatcatccatgccctttcggaataagcccgtatactataatatatttaatatatatcacaat

SEQ ID NO: 1752 - DNA, 8001 bp, Unknown
  gut microbiota DNA sequence
aaaagccggcaagttccttttcacttgccggttttttgcaaaacggaggaaggttgtatgaaaacaagattactgcgcccgaaagaaaactggaaatcaaatctcaccatggctgtcgcctttgagggagattacgacctcgaaaaagccaaagaaagcgccgctcgtgagcgcaccgaagaagaaaagagggaagacgcccgcaaccgctgcttcggcacatttttagacgacgatgagaccatctgcggtgttgtgaacagccgcgagtatctctgccgcttcgacggcggcacgtataagctcggcggtgtaggcggtgtttctacattgccgcagtaccgccgcggcggcgttatccgcgcttgcatgacggcctctctcaaagacatgtacgcaaacgatttcacgttcgcttttttgtatccgttcagcatgcagtattaccgcaagttcggctttgaagccggtgcgccggaataccgctggtcggtgccgttcacagcgatgaagccgcaggatgtcggcgggcacgtcgagcagatcttccccggcggcgattttaccccgcttctcaccgtctataatgcgttctatgcagaccacaacctctccgccgtccgcgaaacgtatgataaaggtctcgaaaaagcgaatctctggaacgataagcgctacgtattcgtctggtacaataacgaaaatcagccgcgcggcctgatgattacccataaaatcgaagaagacggcgtcacatatcttgactgcacccacacgttccaaagccccggcggtttcctcgcgtgcgatgccgaagcgttcaacggcttgctgttcttcacaaaatccgctttctcgtcggattacgagaagcttcgctttaccgtcccgtccgatatgcacttagagcagctcatcggcgaaaacacgcgcacgttctgctccgtgttcccaaacggcatgctgcgcgttgtcaacgtcgagcgtgttttagaaaactgtgcttgtcgcggcacaggggagatcaccttccgtatcgaagacgatatcatcacggaaaataacggcacatggcacctgcactttgcccccggcgagcaaaataaagtcgaaaaaaccgacgccgtaccggacctcatcctcaacatccgcgccttttctgccctcatcaccggcgcccgcgccgccgccgatatcccctggatgcctgacgtccgcctcctccgccaagctcccgccgtccccaacgtcttctaccccaaaaagtgctccatgatggatctgttctaagcatatttattgtataattattagtaacaattacgaaaaaaagaagagattatagggggaaattggtgcgttgcacagaatttaaaaacgaattgacaataagcgtgtcgaatggtatcattaaaaatgtataacaatatttattaagaatataaggtgcgtgaatataaatgaataacagaaagtttgcgctttctatgatcatgaagttctccatttttgcattgcaattcggcttttttgccatggttttgttccaatattacggcccaagacttttccgtagagcagacagcatcggatatgcagtcacattgattctctatgccatcgtatatgtagcactcggcaatcttttccgtgcgtttaaaattacagattattccatagcagaaactattttttcgcagttcctgtcctttggcatggcagatttgctgctctatggcgaattctgcatgattcgccataattatgtaaacttaattcccggcattctcacggtgctttgccagcttttggcggcagcatgctgggctcttgtcggcaagcgttttaccatcgcgttcggcaagccggaaaagaccctcgtcatctccggcgcggataatgtgaatgagtttctacaaaaatttgataagattggtcatatcttcaccatcgaaaaggtcgtttctgcggatattctgaaggccgactggaaaaaagaagtcgctccctatcaggctatcattttctacgaagtctcgtccagaaagcgcgcggaggtcatttggtactgcatgcagagccgcaagagcctctatatcacaccgcagctcagtgagatcaccatggaaggcttcggagcgcgtcatctgatcgatacgcccatgatgaaatatgagtaccgaagcgagcgtttctggtacaaccttgtcaagcgtgtggtcgatattctgctttcccttacggcacttattctgctttccccgctgcttcttcttacagccttggccatcaagcttgaggatcgcggccctgtgttctataagcaaaagcgctgcactaaaaacggcgaggtttttgaaattctcaagttccgtagcatgatcgtagatgcggaaaaaggcggcaaatccattccgtgtcgctccggcgatccccgcatcacacgtgtcggccgcgtcatccgtaaactgcgcatcgatgaattcccgcagattattaacgtcttaaaaggcgatatgtctattgtcggcccacgcccggagcgcatcgaacacgtggaagaatacacaaaagaaatccccgagttttcctaccgcctgcgcgtcaaaggtggcctgaccggctatgcccaaatttatggaaaatacaacacgagtccctacgataagttgcggctcgatcttcagtatatcgaaaaacagtcaattctgcttgatttaaagctgattctgttgacaatcaagatcatgttcgtgccggaatccacagaaggcttcacagaagagaagtctgctcagatgacggagaaaaccaagagtataaatgaaattgaagaataaattcttgatttaataattggaaggagaattagtatgtgtaaaaagtatgattatctcattgtaggcagcggccttttcggttccgtgtttgcacacgaagctacactgcgcggtaaaaaatgccttgtgctggagcgccgcgatcacgttggcggcaatatttattgcgaagagatcgaaggagtcaccgtacatcgttacggtgcacacatttttcatacggcaaatcgccgcgtatggaaatatgtaaatgatttagcagagtttaatcgtttcacgaattcaccaatcgcaaattataaaggcgaaatctacaacatgccgttcaatatgaatacgttctcgaagctttggggtgtcgtaacaccggacgaagcacgtgaaaagattgaagcacagcgcggcgtcgtaacaggcgaacccaaaaacctcgaagagcaggcgattcgccttgtcggcacggatatttacgctaagctcatcaagggctatacggaaaagcaatggggcagaccttgcacggagctgccggcattcatcatcaagcgtctccctgtgcgctatacgtatgacaataactattttaacgatccgtatcagggcatcccggtaaacggctataatgagattattgataagctgctcgatggcattgaagtgcgcactgatgtggattatcttacgaatcgtgcagcgtatgatgcgcttgcggaaaaagtcgtttatacaggtacgattgattcttattttgattataaatgcggtgagcttgagtacagaagcctgcgcttcgagactgaagttttggatacaccgaattatcagggcgttgcggtcgtcaactatacggactgtgaaacgccgtatacgcgcatcatcgagcacaagcattttgcgttcggtcagcaggaaaaaacggtcatcacgcgcgaatatcctgcggtttggcggcaggggatggaagcatattaccctgtcaataatgaaaaaaacagcgcgctttatcaacagtataaggcactggccgatgccgaaccgaacgtgatcttcggcggcagattggcagagtataaatattatgatatggataaggttattgaggcagcgctttcggctgtggaaaaagaatttgcggagtaagacattatgatggaaaatgaaaaaatcagcgtgatcatgcctgtgtatggtgtagaagcttacgttggcaaagcaatagagagcatacaaaaacagacttataaaaactgggagtttttctgtgtagatgacggtacaaaagatcgcagcggtgagatttgtgacgaatatgcagcaaaagatccacgcatcaaagtcattcacaaggaaaacggcggtgcgccaagtgcaagaaatgtcgcaatcgatcaagctaccggcaagtatttgtattttatggattccgatgattgggcggagtcgaccatgctggaagatatggtgacggcagcagagaagaacagttcccagtttgttgtaacgggcttttatattgatacgtattacacggattcggaaaaatttgtgcaggagcaggcgtataaggattgtgtgtatcccacacaacaggcgttccgtgaggacgcccatcatctgtttgatctgaatttgttgtattctccgtggaataagctttttttgacagagtatgtaaagggcaacggtatttattttccgcagaccttctgggatgatttcccgtttattttaagcgttatccgtgatgtggagcgcgttacggtgctttccggcaagtattatcactttatccgcaagcgtcaggaaagtgagactgcgcgttacagaagcgatatgtacgataagcgcgaggaagaacacggctggatgattgacctttataagcactggaatattcatacgccggaaacagaagaattcctcgcacgccgttattccgagcgccttatcggctgtatcgaaaatgtaacaaaccgcaactgtacgctcaccacaaaagagaaaaaagcgaaaatccgtgaaatgatttctaccccgacagctatgcagtctgtaaagctcaccaaagcgcgctcagcctatatgaagctcatgcttgtgccgcttaaaatgcacagcactgggctgacgtatcttgaaggtcgcattatttccaaggtaaagtccggtaatacagagctttttgctaagctgaaggccggtagataacggaggctgtaaatggataagacaactccgtttttcagcatcgtgatgcccgtatacggcgttgcagattatttggaacaaacgctacaaagtgtggctgcacagacttttgaagattttgaagtcattttggttgatgactgttcgccggatgattctccgaaaatttgcgatgtgtgggtcaaaaaagacgagcgtatgaccgtactgcatctgcccgaaaacggcggcctcagcaacgcacgcaacgccggtttcccgcatgtgcgcggagagtatgtgttctttatggattccgacgacgtgatcgatgcgaatctgctggagcaagtaaaagcctctttggaagtaaacagggcagacgttgttgttttcggacttttagagcagtattatgaccgcgcaggtgttttaaagcagactttcccggtcgcagcggaaaaaacgctgtatctgtatacgccggaagacgtgcgccgtgaggttattcatttggaggaaaaaacgctgtacggctatgcgtggaacaaagtctaccgtgttcagtccctgcgtgaaagcggtgtggtatttgaaaagatcacgctgattgaggacatcaaattcaacgtttcttattttgattcggtgtgctccatgaacgtgctgaacacaacaccgtatcattacttgaagcgtatagacggcagcctgacgaataaatttttgccggattacttcacactcaacgcggagcgggttttcttggtgctggagcagtataaaaactggggcatgtgcacagaagaggtgcgcagaattttagccaatatctatgtgcgctacctgttttccgccttgcagcgcaactgtgataaacgctctgccatgaaccacgcgcagcgcaaagaatggctcaagcagcagtataaaacgccgttgtgcaaaggactgctgtcggcggttcaggcaagcggcacgcttttcaagtgcatggcaaaggtgttttgtgcaggcaatatcccgttgtgcctgatgattgctcgcagtatttttgcagtaaaaagcgcgtttcccacggtcttttcgacacttaaacaacagcactgaccgaatttgcttgtttttaggagaaagtatggaagttctgatcggatatatgatagacggcagaaacagcggtattgataaatatcttttgcgtgttctgcgtgtcttttatgatgcaggtatacacgcggacattctcacaggaaaggataatgtagatttacgtgcctgcttagcgccgtttaaagcagaaatccacgagattcccggattgatgcacccgcaaaagcagtataaagcgatgcggaaaatcttatctcaaaaagcttatgatgcagcatatttcaatatttcagagccgatgcactgtattggtgccaaagccgcacacgatgccggtgtatcgcgcgtgattttgcatagtcacagcacgtcccagggagaaagcagcatagtaaaagcatttttgaagtctttcatgaatggcagaagccgcaacaagctgccaaagtacgccaatgattattacgcctgttccaaagccgcagcaaaatggttgttcccatcggaattggttgaacaaaacaaggtgaaaattctatacaatccgatcgaagtagagcgctatgcgtttgattctgctgtacgcgcaaaaatgcgcagtgcactcggattttcggagaaagacgttgtgctcgggcatatcggtaactatgtcacggctaaaaatagcgcttaccttttaaaaatcctgcaaaaaacacgtgaaaagctgccgaatgccaagctgcttttgattggtgatgggcctgatcgtctggcggtggaagcacaggcaaaagaaatgcagctatttgaacatatgcagtttttgggaattcgtgacgatgtaccgtcgcttttgcaggcgatggacgcatttttattgccgtcacttttcgaggggttacctgtttctgcaatcgaagcacaagttgcaggcttaaaaacatttttaagcgaccgtatcacggatgaagtaaagctcacagatgattgtgtttttcttgatatcgaaaacaacggagtaacgtgggcaaatgcgatcgtaaatgcacagccgtgtgttcataaggatgtccactcgttccgcgaacaaattcgtccgtttgacttagatgcacaaaaagaggagatattatccatattgggttaggggggaagaagttgttatgaaaaaactcgccgatcgcacattttggtggattgaactatttgccggcttagggtttatgaccgtcggcttctttcaggattgctcgctgacattcggtacggcaatcatttctttagcattatggccaacactgtttttatctgccgcagtttgcgtatatcgacttttacactttaagacgtacagtaaaagccgtggcttttggctgatcgcagcactttgcgtaacctatctgctttcaacctttttgaatcgccagtatggttggtatgagaatatccgaacactcatcatgcagggaatcttattcttaatggtgtattgctataaggagagccgttccgcggaagatataagaaagcggcgcgtttggattggattttatttaagtgtatgtgctgtgctgaccgttatgagctttgcttatatgcttctcggaaaaaatgagatcttttatcccgaaacaccggaaatgccgctttactatacaggcttttactggggacgcctctacggtgtctattgggatccgaatatcggcgctttaatgtgctgcgtctcacttttgcttgcaattggtatttttagtaaaaatcacaacatcattttgcgtattgcaatgggctgtttagtggcattagatgtgttgtatatcacgttttcagattcccgtgcgtgccatattgcgtttgttgtcggtgttattgt

SEQ ID NO: 1753 - DNA, 5621 bp, Unknown
  gut microbiota DNA sequence
ggtctttctttgcttaaacttcaatatcaggcgtgatccccgaatagatcagctccttaaaaactaatgataatatagttattgtttctctttcttaaccgatttatttcttaccaatctttctatcaaaataaatataacgcctaaaaatataccgaacccaacaattacaagagtcaccgcttgcattctccccgcatattgaagtagctctgttgattccctactcgattttgccagtatgttcaatgcggaaaaaatctccccaaactcccgcatataataggcggcgtccgtaatgcggtattgcggcaggagagaggatggcagagcgatgtgcagcaggataagcggcacggcgagcagggcgagaacacctaaaacgccgtggaaaatgagctttgcacggttctctttcgctctgcgcgagagaacgaaagaataaacccacagaatcaagacgaaaagcgagagcgaaagcaatgcggccaaaagcggcagctgcgaaagaaagcttttaacgtctgaaaggctgtaaaagctgccggcgttttcatttgcgagttccgtcacgggtaaaattgtgcttttcgcgcggtctgccataaacggctgcggggtgtccgtcacgttaaacagcaatgcgttttcggcttctgcggtcggtgtgaggacgcctgaaagctgcgggatgccctccgggaatatggcaagccatgtgtcgtcccggttctccaaatcggatttgattgaaatttcgtcgccgctgcgcaggggctttgaagcgtaacggacatagctgccgaaaaacttcaaatcaagctgattttcgcccacggaataattattgatttcttcttcataaatgcgcgtgccggtctcccagccggtgccttctctcgggcggtagaggtgtatgcccgtatcgtcgaagaaaagggagtcgagcgcgatgtgcggggagggttcgctttcgtccgcttgcgtgagcaccacttccgggatcatgagctgttcaatgcgcacggaaagcatcgtgcagaaagcgaggccccataagatcaaaacaaaaatgcagagaacgcggcgtttcatatcacttcacctccgctaaaacgatgccttccacaagctcgcggttgaagaaggtgaagaggaacagcgcgggcagcacgaccagaatgcagcagacgagctgcacggaggtctcgctcggcggtgtataggcgagcgccaccgagatggggtactgctcggcttctttcaaaaatgcgatgggctgctccaccatgttccatgcatcgaggaaggagagcagcaaaacgcacacaaggccgcttttgttcatcggcgagacgacgtaaagcaacatgcgcagcacgccgcagccgtccagcatggcggcatccagaacggtgtccggcaccgatttaaagctttgcgttaaaataaacgtgccgagcggcacgataatagacggtaaaatcagcgctgcgtaggtattcaacaggttcatgtagcccagcatgatgaaatcgggcacgagcgtgacctgcacaggcagcgtcatgaggatcattaaaaggaagaaaaggaagttgcggcccgggaacttatactttgcaaacccgaacccggcaaaaacggagatgaaaagctgccccgcggcgatgcacacggccatgccgatgcttttccaaaaacggaaaagatattttggggaagccagaaaaacgtcgtaataatactggaacgtaacgccgccaggcgacagaaaactgcgcacgaacacgtacaaaaacggcgcagcggataacaccacgaccaaagcggcaaacagcccggagaaaaaccgtttcactcgcggaacgcctcctttcggctgacaaacgcatagaataagccaaagaatacgataatgacgatcaacaataagaccgaagccacggagagcttctggtaattgaggttgctgaagcagttgttgatgaaatgctggagcatgtaaagctcatccacggggtgctcgccgccgataagaaagatctcgcggaagcacttaaatgcgttgatgacggagaagatcagggcgaaaaacacggaataccacatttgcggcgtggtgatgtagcggaacttctgaaacgccgaagcgccgtcgagatcggcggattcgtactgctccgcggggacggtgacgagccctgcgagcagcagaataacgctgtaccccgtgtttttccagaggtacatgaggatcatgacccagaacgcgtatttgccgttcagccactcgacgatgggcaggtttaacgcggcaaacaagccgtttacggcgcctttttcgccgaaaagcagatcgatgagcagaacggttccggcgacgggcatgatgtacggaaacaaaaagacagattttaatagcttatgcttgcccgcctgcttttgcatgaggagtgccaaaagataggagagcagcatgatgagcggcagccctatggctaaaaacttcatcgtgttgaaaaacgccagacggaaaaggtcgttttggaacatcttcgtataatgctccatgccgacgaacatgccggcggcgccgtagccctgcgtaaacgaatagcgcagcacaatgccgaacgggatgagcgtgaacacaaggcagccgatcatcaccggggcgatcaggatatatccgtgaaaagcttttctcataaggcaccgccttttattttattcctgcacccactgctccatggttttgtaccattcggcaatgatgggcgcgaggtcggcattggggtcttggtagcgggcatcgctgcacgcatagtagcaatttacaagcgcttcctccaaaccgccctgaaagcgaacgcgggtgatctggctgcgtgcggcgctgaagttttcgtagttttcggcactcatgtgccaatcggtcatgccgtgccacgttacggggctggtatcctgcatggcatcggcataaacggggatgcctacggaatcattgtatacgagccactcggaatagagcgcggaggacagctgggtctctttgcgcagcaaaaggtcggcgaggaagaacgcttcgtccgcgtgctttgtgctgcggttgatagcgacatacgacgtgaccgctgcggtcataccgccgtcgtccgaatagagcggcaccatggtgatggggccctggtcgcgcaccttgacatgcggatcggcaaagtcgctgcccgtaaggcctccgcatgcaaaccagtggtaataaggcgggacattttcaaattcgccgttcttattgcgcacatccaactctataacgtcggtgatgcgctgcaaaagctcgtcttccgtaaagagcagcttttcactgctgtaatcggcaaggccgcccagtatgtaggggagcagcgggccgccgcattggttttcaaaattttcctgctcttccatcgtgggtatccagttcgcggcagcagtgagcacgttcgttttgtcgttcagcatgtcctgccatgtggtttccgctgtggtggtgagcgttacgtccgattcgcggaacatggtcagcgggaaggtgtaggtcatcggcagcagcatttgaccctgttcggtgcggccgaccgccatgacggtctcgttcagcttattccactccatgaactgcgcgttttggatgtagtcatcgagcggcagaaaaagcccggcttccatcgctttttcgggcacacggaacagcgcttcgacgtctgctgccatgtaatcgatgccgccgttgcaggcgatgatgaacatatccgggccgccgccggacatgatctcggtgcggacgcggtcgagcgccgtttcgcgctctgtgccttcgcgggggaggtattcaaacgatacgttttccggcccgccgaggctttttacggtgttcatcaggttataaaacgcgttttccggggtcttgccctctgtgtagccggcgcggtactctaagtccacgcagacgcgcagggcgtctttatccactgtgccggacgaggacgagccggaggttttgccgctcgactcggcgctttccgaaatgccggcgggcgggggcggcgcaccgcaggatgcgaggaagagcgtgcagagcagcgctgccaaaagtacagatagcttacgtttcatatcggacacctctttcacgttatggggatataagatgcggagaatgaagattttttcctcatgttttgccgtttgattgtaattgtatttactatacttttctaatcttataaacgagttttgcataaattttgtaaaacgcattattcagagagtctggtttgcagcgcttccatcacgctgtgcgcagcggcagcgcaatccgggttttcttcccacgtcagggtcgtggcggtatcgtaaatggtgtagtccatcacggagtagaaccgcacagcgttgacgcggctttgcacgctttcaagcagctcgggctgcagataggcgtttttgtgcgtcaagaaactgtttaggttgccgagcatcaaaagcgtaccgcgcgcatcgttcacggtttccgtgtcgatttgcgcttcgtcgctgaacagcagctcgaagaagcggaacacctcatcggcctttgagctgttgcgattgatggctgcgtaggaggtaataaacgcggtcacgccgccttcggtgttcgggatggcaagggcgttcacggtgtcttgattctgtgcgtaatacgccatgccttcatcggtctgcgcataggatccgctttggatcagtgcggtctcctcgtcaaagctttccgacgcaggcatggcaagaagatcttcaaactgcgcggtgaggttttcctcggtgagaattgttttttcggtggcgtaatctgcaatacggggaattccggcgccgcaccaagtgtagagattgttgcgcacaactttcagaacggccgtgtcctcacagtttacaagcgcgtcccatgttttgggggtgaaatcggggtcggcaagctgtgctttatcgaggagaaaaacgcttgcgtagtacgtgataggcagcacgacctgtccttcgtcggtttttccggtatcgaaaacaggggcaaagtggtcttcggagcggaggtattcgctttcttttatataatcgtcaagcggcagaaaagcgccggcctgcatggtacgctgcacatccggaaacaacgtggccgggtgaccttcaccattgaaagtcatgtttgaggtcggggaagaaagcagatagccgtccggcccgccacctgccatgatctccacgcgcagggaggagatctgcgtttcgcgctcctgcgtatcctcggagaggacgaaaaactcaacattcaaatcgccgtagatttcttttgcgagcctcgttatgccgttttcgtgcgtaaattcctgctcatccgtcacgatcaccgctttttcgctcgatttgcttgcgatgctgcccgttgaagccgaagcggaagacgtagccgaaggcgccgcgccgccgcagccgcagaccgcctgcatgagcagcatggcagacaaaagaatggcaaatttgcgtttcataggttttcctcctttaaattcgtgacgtataattatatgctatat

SEQ ID NO: 1754 - DNA, 5869 bp, Unknown
  gut microbiota DNA sequence
cttgccggcttcaccggccctggctgcctctagggagccatccgtcagggccacgtacagcccggcggggtaggcttcgttcttgtccactgtgtgcttgatgtatgcctccatctccgggatgtccatatctccgtattcgatggtatcccgctgtgtttccagtattgtaagggtcctgttcatccacgcgctggtctcttggatagtcttacctgtagtggcttgaagcagctcttcactttttgtcaagaatgcgtcagacactctggaatagactactacaagcagcgccgacactgccaggacaacactaataacaattgccgaaacaagcttagccgttatccccttggccttgctgacctttttcgcaactcgcttttcttgtatacccttattctctcctatctttcccgcagactgctgggacaaaaatcaccttgccatattcaattttgtgtatacactttttgtggaaaaaaatcaactgctttttcgggcaccgtgataaagaaagcgtgagcagcaagctatagcataaaaccgcagcagtggagaagttatcaaaaaagcaggcagcgcttttcacgctgcctgctcgaagcaagatcacttttgcgtttccccgacgaacaccctgtcccggaagcacacgttccggtcgctggtggcgccaaagagctgaaacatccctttcaccccgtcggtgacccacaggaagagcttctccccatcgaattggaatttccaagtctgataatggcccgtttcccgccagcagactgtgagcagcagggtatcctggtccacccaggtatggtgggcagagtaggaccaggcccgggagcgctgctccggcccccgcagggggctgttgctggggatctcaatggcaaaggtcgtctccccgtgccgatccgttacgcaggagctctccagagactggatgccgtccacggcaatggccagccggctgtttgccagctgcagccggagctggtgctgctcctggctgtccactgattttaagaggtatgtcttgtcctgcagcaaggcctgcaaataggaggagcttggctcatacacagcaggggcttcccattggcagagtaccttttgcaaatgctcataggcccaagcatcccgccccttttggggatctgtcaagttcgcaagcaggtattgttccaccagagggaagactcgggtgccgtcgatttcttccgctgtggtgacgatgaccatgtccttttgtggaaacaccataatatactgaccaaaagcgccgtccgcccggtagctgccggggctgttttcccagatctgatagccgtaccgctggccccagccggcgcagccctgtcccaaggtggggacgtggggagcggtggcctcatcaatccactcctccgaaaggagccgctggccattccataggcccttgttcaggtagagcacgcccaccttgcacagatccctgggggcgataaacaatccccaagcaccggtgtttactttgtcgttgacgtcccagctcacgtcggtgattcccaggggttcaaagagcttctcctgcaaccactgaaacaggctcttacccgttgtccggctgatgacctccgagagcatataggtgccgccggagttgtacacaaaatgttcccccggcgcgtaagtcattttccgggtgaagaagatttccggccaaggggtgccctcgctgttgcacatatcccctacggtgtcccgttcatggccggtactcatggtcagcacgtcccgcagggtgatctcccttgctcgggggtccatgtctaggtctttgcattccgggaaatagtccagcagctggtcgttcacattcacaagaccctcctgcacggcgaatccaatggctgtggaggtgaaggtcttgctcaccgagtacaccagccgcttatcgctggcccggaagggatagcgggcggcctccaccacggctttcccgtggcggatgatgtggagcgtgcgcagcttgtagtgggccttgtcgcactcctgcaggaagttcgcgacgtcgatagaggaaatgcccacgtcctccggtaagtagaaacggtcgaataagtctgccaagttattccaccccttcctttctcatgttggccacctctttgtcggcatccatccggctgctgaacagcaccagcaaaatactgcacaccagggggattacggcgtagcccacagtctccatcacacgggtgaaggaggactgggccaggcctgcgttggccgcttcgccgctgtagccgccaatggccagcacagccgccacgcccacgctgcccaggagcattccaaatcgcatgccgaattgggcgatgctggtggaaaggccggagaggtcggttttgttttttaagttgatgtagtcagccacatcggcggtagcggtgcccagcagcacaccaaagaaagcgctgccaatgccgtacaccgcattgccaatcaagacgaagaccaagttggggacgatcatcaaggcgtagcccaccacctggaacatggaacccagcacaagcacctttcgcttgcccagcttggcattggcaataggtacaatgccaaacaggcagcagaggataccaggcaccagctttgcatagctgatctgggtcatgtagccggcatcgcccagtacgtctcgcaggaagtagatggccatagagccgaaaatcatcccggcaaagttgtaagtgaggaacataccaaacagcgggagggcgtatttgcagccaaagacatacttcagctgggttttgacgggcagagaggggcgctttcgggccgcgctgagctgctgagcggcttcggcccacacctccggagtctcccggcagataacgccggtgaggaagggcaggataaagccaatggagcagaaaatcaggctcagaccgaagtagcctttttcatagccgccaaaatacataagcaccggcacaccgtaggcactaacgatcaagttggagatctgtcccaaaaggccgcccacgttagtgacctttgctcgttccacagagttggaagttatcttgatgagcagggtggcggtggcgacactgataacggcgccgaacacagctacatggagcaggtagtttacaaacacccagatcatccgcccggtggggctgaagctggtaggggtgttaaagatcaggaacacgggcagggccacaaaaaaagcggtgcccaggatccaggggcgggccttacctatcttggtgtgagtcatgtcaatgaggaagccgctcaggccttctgtaacggcgttgatgatccgggcagcggtcatcatggcggtgatgaagcccatggaaagcagcaggttgtccgtcaaatagatggtgaggaagccgcccataatgccggcaatgcagctggatccgcagccgttgagggcaaagccgatcaattgcgacacagggagcttatcttgtttcttttctgtcattttttcaatcctccaagtcgaagaaatgcggcaggcggtgcgcgcactccgcttgcggctatactattagaataccacggggagagttgagaaaatatggtggaattgactgctctttagggtgaaattgactaatcttgccgaaaaaatggattttgggtgatttcttttcgataatttcgaggggtacagccatagtattttcggaaacattggataaagctgccttcatcggcaaagcccgtttccagggcgatttccgagatttttttggatgtctgagcgagcagctgctctgcctgaagaacccggtatttggctaggtattgggagaaagtggctcccgtatactttttgaaaaagcggcagaaatactctttcgagaagaaaaactgctgcgccatctgggcggtgttcaggggctcgctgtaatggtcatgaatgtaagtcaggatcccctccagctttcgaaagggctcctgagaggtgctgtctttggcccggtcccgttcctggcagcactgggtgagcaggacatagacaatctcgcagatctgccggaggacaagcactgacaggaagggagtaccctcctgctcataccactcgttaagcgcaaagatcagggattgaattttcgtattagcctcctctgtgaggacgaaatagcatgtatcgaaattggggatcaggctttttaagaaggagtagctgatttgcagtgtgatgccggtgatggcaaagccgtctgtggcaaaataggggatggaggagtggacctcccggctattgaccagcacaatgtgctgaggtgtcacatcttccacccggccgttgataaaaaaacgcgaggagccttcaaaagctgtattgatctccaattccggatgccaatggcttttgacaatttggcttcccggcctggtgtgccggatgatgaagcccgggacagctccgtgtatctccacgttttcaaaaatgccgtggtcgggcatgggaatcagctccttcctgtgtttgttaattataccggaatccgtcgaatgatgcaaaatgctgcagagagtttttgacaagctattattaaacattatagcacaaattccgtcgatttacaaggttttgctgtcacttttccgcgacatctctgtgcttttccgtattcaaatcccgtcgggtgctgttttgccaacttctttgctgcgcaaagaaacgcgaaaagtaacacgccaatttcactgcctaaaagcaaaaaacaggggctggcgcggcctcaatgaccgttccaacccctgtttcagcggtattttcctatattgagggctattttgccccaaaaagcatgaaaaaacctctcttgtcttggtagacaaaagaggtttctttcgtggtgcgcgagacgggacttgaacccgtacgtcataaacacacgcccctcaaacgtgcctgtctgccaattccagcactcgcgctcaacaatatatattatagcataagccgcgctgtttgtcaactgttatttctcaaaacgcaaaaacatgtctgttttttgcattttaccgcaaaatgctggtgaaaaaggttaaaacgtgctatactgcatgtaacagaaacacgggaggaaaacacgatgacgtacacaaaacgctatatgtcgccggttggcgagatcttgcttgcagcagatgacgcagggcttacggggctgtggtttgagggcagcaaatattttgcggcggagttgccgaaggcgcacatagaacaggacacacccgttttgctcgaaaccacacagtggctcgatgtatatttttccggaaaagaaccggatttcacgccgccgctacacctcatcggctcggattttcggcaggcagtttggaacatcctgctctctatcccctacggccggacgataacctacggccagattgcaaagcagcttgcaaaaaacaccgggatagacaaaatgtccgcacaggcggttggcggtgcggtcgggcacaatccgatctcgatcatcgtcccctgtcaccgcgttgtgggcacgaacggcagcttgaccggctacgccggcggccttgataagaaaatcgcgctgttgaagcttgaaaaagccgacaccgcaagatttttccgcccgaaaaagggtacggcgctgtaacacgcccttgcactagaataaacgaaaaggtcttccgttaggattgcgggagacctttttgctataaaaaccaagctaaacgtaaaataaaagacccatcggaaattccaatgggtcttttggcgtggtgcgcgagacgggacttgaacccgtacgtcataaacacacgcccctcaaacgtgcctgtctgccaattccagcac

SEQ ID NO: 1755 - DNA, 2150 bp, Unknown
  gut microbiota DNA sequence
agatctcatacagctgcttcgcgtattcgttattcagctcgtccaatccgaagctccaacgccggtcggttttataattgccgagcgataatgtctcgccgttgtcgcgtacctctgcccacacgtcgttttcgtagaggtgatattcgtccatgcgcacagcccgcacctcgtcgatcatcatgttatactcgaacacatggtcataatccgccagcgcaagctttcggtcgatccagaaaaagccgagatagtggatatccgggatttccatgcaggtgttcgggatttggttcaacgaatcagaagctctataatcatattttttaaggccgggtaaattgatcagcgaagcagaaagcagcagtttacggtcttctctttcgggataagtttccgaaaccacggaacaacgccaagtagctgtagaaccctttgttacacccgtttgataccccgaatttaccgttgtggtcatgacagtcgagctcggtgcgacgtaatagattcgaccgttgtatatcgccgcgatctcggattcccatacaagatcatttttgccgcagctgagctgctgcacttcgcctttgcgtttcagatagatgccctcgtccacaacggcaaccggcgcgctcacctgccgctcccagtctttgaattcgtcgtacagcttcatgttgtttttgcccgtttcaccgatgaacccgattttcgattttaataatcccgctgtgactgttgcaccgcagccggaaagcaaaagcaccactgttaaaacaccggaaagaagccgtttgtaagctttcactctctccccctccaaagcaatccaatttacataacattttataatcatattcttttatattcgtacatggaacaccgctgtttcgtatcttatgacccaatcataccatgccgctcgcgaaatgtccactttttttaattttgagcagatttttctatgcgaaaattatataaaactgattataccgcttaaaaccgcccatactcctgtttgcaagcgccgcaaaaattgcaaattgtggaggtgcttttatgtatgcgtatgcgcagagcaaagtggagatttgcggagtgaacacggcaaagctgcaaaccttgaaaaatgacgagatgcgcgagcttttagaccgcagccatcacggcgataaagatgcgcgcgataagctgatctgcggcaatttacgtttggtgctcagcgtcatccagcgctttacaagccgcggcgaaaacccggatgacctctttcaggtgggctgcatcgggctcatcaaggccatcgataatttcgacccaagccacgaggtaatgttctccacctacggcgtgccgatgatctccggcgaagtgaaacgctttctgcgcgacaacaacgccgtgcgcgtcagccgttccatgcgcgacacggcgtaccgcgccatgcagatcaaagagcagctgacgaacgaaaacggtaaagagccgaacatcacggaaatcgcaaaacgcatggagctgccgcccgaagacatcgtcatcgcgctcgaatccatcgtggagccggtgtctctttacgagccggtgttttccgacggcggcgacaccatttatattatggatcaggtgaaaggcggcacgacggacggcgactggctggaggaaattgccatgcgcgaggcgattcgcgatctgaccgaccgcgagcgaaaaattctttccatgcggttcatcgacggcaaaacacagaccgaagttgccggggagattggcatctcgcaggcacaggtctcacgcttggaaaaaggcgcgatgagccgcattaaagcagagctgtgagccagaacggcaagggcattcccctgccgcgtacataaaaacgcaggcttatgaaaagtctgcgttttatctgttttaattcaagttttgtagcggttcggataaaatctcgcgaagtttttgctctgtctcagctgttttggggcaggagccttgcgatgtcacggggctgccaccgccttttgcgccgagcaaagcgttgattttctgtgcggcggcacggcagtcgagcgcgccgtttttgccgcgcgcgcaaatatagcgcaaacggtcactttcattgcagaacagcacagcagagaaattatcgt

SEQ ID NO: 1756 - DNA, 1600 bp, Unknown
  gut microbiota DNA sequence
gggcgctctatgtccgccgccgtttttcccactgccagccgcgggtcggtctcccgtaaaagcgcaagaagctgctctgcccgccggtcaacgcccagcgcggcaaagtcagcttctttcgttgtattttgaatgagatcaacgatctggttggtcagcccgatttgggcagaaatatccccgccgttgtccagcacgttatccaagcccttttgaaccacatctgccagatactgcgccagaaccttggacgcctcggccttgtcaatgggtgcaacagacttgcgggcttccggaatctccgcaagctcgcccgtcaaggcgttgttgatgacttgttcatatagaccggggtgcagcatagtaaaatcctcaatttctttaatcgttagaaaatctcacatttagttttcatcaaatgctcggtcgattagagactttgccttctcgaaatccgcactgctttgcaaatagagctcaaccgcaccgcagccccagtgaccgatgtttgtaacatctcttgaaaagccttcttcaaatgacacagtagacacatcaagcggcaaattcagaatcagctttttcttttgggcgactaccgtgaccacatttctgattttcttaaatgccgcatatagcttcagatgactttcgctaatatcatcgccaaggctaagaatatagttggaaaggttttcgtacaacactctaatgttctcgtcagcatttctgatctgctcatcgaacgttttatcagtagcttttgctttgctgacgggttcattatcaggaatagcggagacaacattctcattgacttgctcgaacataagcaggtcctctccgaatttcttatatcggatcaagctaatattgcggttcatctgtttgattgcagactcatcatattttgtgaagtcacccgcgacacatacaactcgcggcatactccaatcaatgttattagccgcttttaaacccaacttttcaatcacaagcactttgaaactgtctttatgatccaaaagccagttcaaataaaatagaccttggttaatcacattctccttcacagaccgcttgtattcaaagatgacagggcaatggttttcgtcaatgccaatgctgtccatgcgtccaccatccgttgtgcgatactcagaggcaagaaatgttaccccgaagaagatattcatattattttcaatcactgtctgaagttctttctcaagtgtgacagtaccgctttgatattcttttactgtgccctttatgttaaaaagctttgtgtcagccattgtatcccccatccctttcatcattcgtaaactccatcacatctccgatattgacatctaacgcaacgcagattctattgagcacggacagcgtgacttcttcatcccgccgcagccgggtcatggtattaggtgcaatgcccgctgctttgcgcagatcagctttgctcatctttttatcgacaagcaatttccagagcttgttatatgaaatagccattatcgttcgacctccggctgcaaatattgattttattatacaactttttcaacccagaagcaagagagtttcgcactgagat

SEQ ID NO: 1757 - DNA, 749 bp, Unknown
  gut microbiota DNA sequence
agaagtggcaattatagataaaacaatttcttttgagtgaccatagcgttcaggcagttatatatgcccagcctgttcattatttggaaaacggagaatggaaagatatcgacaattcgctgcaatatgaaggtaaagcctttgaagatgcggcgggatatacaaatgcggcaaatgattttcaggttcgttttgcggaacaaacgcttcaggatgaatttgtttcggttcagcaaggcgaatataaattggattggaaatatgtaggggcaactgatgaagttacgccaactcctacttctgttcctactcctgagcctacggaagaacctgaatccgaaatgccgacggaaaatgatacggagaatagcgcgtctgatcagccgtccgacgaggaggaaccggctgatacagacgaagaaactactgcggatcctttacttgaggatcaacagacgataaatgctgcggatgatgaagcaactgctgtaacagaaacagacaccgacaaaattgaatcatccgagacggaattcacagacgagtctgcgtcatcagaaatgccgacggtagaaccgagttttacaccggagccaacggaaactccaaacccggtggcctctccggagccgatggagacactacgcccggaaagctcgccgaaaccaagtggacctccgctgcttttaagccgtattacaatattggatgagcctgcgttaatgatggttatttttctctaaaagtat

SEQ ID NO: 1758 - DNA, 1571 bp, Unknown
  gut microbiota DNA sequence
cattttgctcatacgctgtcctatattcgtcgatcgtgccgttcgggatttgaaacgaagtggtataccggttcattgcaccgaacgcgcctatattctccgcatcggacgctgtcaccgaggccgtcggcacaataaacatgttccgcgcgatctcccccgtgccgtttttgctacccgcaaggcgaaacgtatcatatagcccgacgatctcatacgcctgctcgaagaagaccgaatacggctcgcccgccgcgtttaacagcccggggcttcggccgccgcgccactgcacctgaaagccgaattcccactgcgggctctctgccttgttcgcaaggtacagcgagagcggcacgcggtcgccgactgcaagccctgcgtttcgcgcaaactccgcgctgaccatgcacacagccgcgccgtctgcgaactccgcgtctgtaatctctcgccctgccgataaaaacaccgtgttttcgtgaaacgacggcagcagatcgaggctttccgctgcgagcacggggtagctttgccaccgcgtgtacagcgcctgcgcccagttttggatgatctcccacgtctcggaatcataaaactccgatgtgacctccataatcgtcggcagcgttacgccgtcgttcagccggttcccctcggcatccacctgcggcgtaccggtgatgctctgcggcacgaaaaacatgtcgcccgcgcgaaacgattgcaagttttccgcacttaacgtgacatacgcgagataacgttttcccgctttcaaattcactgtgttttcggaaagcatgtcgcaaagcttcatctcgtcgccgctgtatgtgccgtacagcacgcggtccacctgcacggtttggcggcaatcggccctcccgctttcaagcggtgtgaactcgatgacgcacctactgccgttaaacggcggtgtgtcctgccgctccggcgcggtgtattcttccggcagaagcgccgcgtaatacgcgcgcttttcgggcccatgcacgtatgcggcacccggaaaatcgagcacgctttcatcatacaccgtgccgtataccgactctgtttcctccgcgccaagccacaggctgtctaacgttttggttttcaccggcgcttcatagtccggcagctgctccaccgtgacgagcgtcacgaacagcccctccgccgcgtcgatcttcgcctgcgtctgtgcccacaaatttgcccccagcaccaaaagcgccgtggcaacggccatcaaaaggaagaacagcgcggtcttcatcggcgtgcgcagaagttgttttaagctgtttttcatgttattccacccgtgcgctcaaaagctctatcggctcctgctttaggtttcggttcaccaaaatcacggataatcccgccgtcaatactgtcatcgctgcaggaatgacgacttccaaaacgcctgtgttctctgcgtcttctgtctccgccgcattttcgtcgcgcgcccaaaggctatattctgtgctgaatgtatgctccgtttgtccggttaaatcaagtgtctgcactttgtcgaaaagcaccgt

SEQ ID NO: 1759 - DNA, 525 bp, Unknown
  gut microbiota DNA sequence
tcgtcagcaaaatcatcgctgcaggaatgacgacttccaaaacgcctgtgttctctgcgtcttctgtctccaccgcattttcgtcgcgcgcccaaaggctgtattccatgctgaatgtgtgctcgttctgcccggttaaatcgagcgtctgcactctgtcaaacagcactgaactgcaaactgtgcccaaaatcaccgccacggcgctcaagaccaccacgcccgaggcaagcgacatcctgcactgatttttgctcatacctaaactccgctcgatcgccgtgcgcttcttctgttttacgatgaagaaatagagcagcaacaccaaaatcgccagtgccgaaagcagtcccgccgcgaacagaatgatcgccacgtaccgcatattgagtaaaccgccgatgatctggctgtacccattgtcgtcaaacgtgatctccaaattttcccgaacctccgccggaacatttcggttatacgctgccatgtagtcgtcgatcgtgccgtttgggatttgaaaggagg

SEQ ID NO: 1760 - DNA, 2341 bp, Unknown
  gut microbiota DNA sequence
ccaacagaccatcttgcgacagctttttaagccgtatactttgtgcgtgggacggggcgcagtcgttcagcgccatcgcgtccagcaccgcccgctgctgatacgagtctaagtaggaaagctctaccgccgggttgaaggcgatcttaccgtcgtccaccatcgaaagcagctcgggaatcaggtaggtcaggcggatatatcttcgcacttggtctttactctcacctgcatcgtctgccactttttctacgctaagcaacttctctgcaacttgcacagaagcgatgccttgatgcttgatggcatccagcttcatcttgtaggcaaacgccttttcgctgggcaggatggtctcccgctgcaaattggcgtccaccattgcgatcaccgcttcatcatcagacagttcccggacgatgacgggcatcgtctcgacacccagcacctgacacgccgccagccgccggtggccggagatcagctcatagccgccgtccggcagcggccttgccagcgccggggtgatggctcccaccttgcggatgctctcaatcatccgctgcatctcctcgttgttctgtaccttgaaggggtggcccttgaacgggtgcagctcggccagtggaatattccgcacccgctccagcttggcatcgtcccgctccgcctgcgtggagaacagatcgtccagcgtgggtaaagtaaaatccgattttctcattgtgttgtcctcactttcatagttttttctttcggggttttagggcacgccctaacaagtgtttttacgctccggccctgccgggagtaaaaacgcactgctcgctaagatgacgcaggcatcgcaagcggatacactgtttggctccgacaggagtaaaaacagtctgctcgcttagactgcgcaagcgtgatacctgcttactttaattcattcaaaattgcttccagcctgctcagaatttccactttctgaagctgtggaagctccgctttcaggccgttcagcatccgaaacaggcggtaatcccgctccgtgatggccgctctgacctctttcccaagccccagccgccgcagatattccgacagcgacagagagcagaaccgggcattttccagcagtttctgcttctcctgctcggtcacacggacattgattccgtagtttttgctgcgcatttgttcaccccctttcttcggtttgtgacggcagtgacggttgtgacggggatttccttatatagcgatcccggcgtcatttgcgtcatcgccgtcacggcgcagaaatttgatgagccggctttttcccgttcgcttggtgcggtactcgatgcccagcggctccagcacctcataggcgaactggccgagatactttgtgaccatattgggcgtgacctcctgctccttcatttcggtcagcagctccgtggccgtgcctacccattcggtgcggcactccataaagtccaccacccgaaacagaaatttcggcagctctgccttgtgaatatcctcgctgttcttgcgctccaccagttcccagacaaggtcgttaaactgcaaggtcagttcctgatattccacatcccgcccactgaccagcagcgtagcagcgtttccgctgcgcttacggcgcagaataaagttggtgtccgcagcgccgatgatgccggtggaaccgctgacatcgttaaagggatcgtcgctgtcttgcagctttcgcaggtgatgcaccagcaaaatggcgatgttgaagccgtcggcaatgcacttgatggaggaaatgtcgtcgtagtcgttgccgtacattcccgcttttccggcgctgcccttggagtcccgcaccttttgcagcgtgtcgatgatgaccagcttggtggcgggatgctcggtcagaaagtccgtaatctgctcctccagaccgccaccgatcagcccggaggtcacggcgaaatacaggttgtccggggcgctgtcggtgaggttgtagagtcggtctttgatgcggcgctgggtgtcctcaaggctcagatagagcacatcgcattgcagcgtgggcaaaccccaaacggaatttccctgcgccacttgcagccccagccacagcatcagccagcttttgccgatcttgctggcgccactgatgacattgacgccctgcgaaatgaggccgtccacgatgaacattgtcttgctcatcggcgtggacagcaaggtctctgcgtccacggttttcagtttgttacccatagaaatttctcctttgtagaatgttagaaatggattttgacaggtgcagatggaaacggccacccgcacccgcttcgccctc

SEQ ID NO: 1761 - DNA, 1933 bp, Unknown
  gut microbiota DNA sequence
acacctttgccgggaaagtgaccgcagaaaactatgcccagtattacgacgccgtgcaggatgcacaggtgaagtatctggagctgtccgacgcacagcgtgcggagttttcgtacatttactctgcggaaaacgccgcagtcatgacggcctacaaggctgcgtaccgcaccgtcaacgagcagtccattctggacggcagctccatcggcaagcccacggaatattacgacgactttatgatgtcggccaaccactataatctggacctgggccacgaggacacctattatcccgccgtgttccgggagatttggacgaatcgcccaacctctttgtatccggcttactcaagcgaaaagggtctgccctatacgctgcccggtattctgaagttcgacatcaaggacgacagcatcttcgagatcaaggaagtggagggtgtctatgaggacggtggcctgagcagctttggcactactccggctatgaagtactatctggtgcccaagaaggcgggcaccaccacctttaccgttacctttacggataaggcgggcaatttctatgggcagattccggagattcccgtccatgtcaatagccccgaggagacggctattgaggatctgaacaagaatctgacgaacttcacttctctgagcaacaccagcaaatacgacaactggacctacgactacggcacggagggtgcgcctttcacctttaaggtaagcggcaccaacgccaaggtcagcgtctataattacctccagtacaacaaagacggcacccccgtcaagaccgactacacccccgacgccaagggcaatgtgaccatcctcctcaaggacggctacaatggcatcgaggtcaccgccgactaccagggccacactgtcacccaggtctactccctcaagggcaaggtcacccgctatgtgcaggagaacatctcccgccccggcgaggccctgcgcaccggcgatacggcgggtatctggatcatcgggcggcctaccaatatccacaagatcctccgtatttataaccctgcgaccacgacggtgttctatacggatatgcctctgcagagcgtagtaaatacagacaaccagcacgatatttaccgtactgatgaaaatggtgcgaaaaaacaggtatcttatcagccccgcgttgcggcctatctgacggaatccggcacgatcaccctcaccaagggcagctccgatagccgcggctacggttccaagcccggcagcgagggcgatcagggcaacaccggcggcatcgccgattccacccgctatggcttcggcatgctggcagatattacgctgcaggtgaaggagaaccccaacttcaagctggagcccaagtatgagaccgtggccgagaacggcggccaggtcaaggccggggacaagcttaccatctccatccccacgctgcccatcgagcagctggcccaggactataagctgcagtactgcctgctgaactactccaccaatattcccggtgcggagtacattttctccaagtggtccaagggcggcgactcctgggagggcgagggcactacccccgtcggccccgaggtggccctcaagagcatcactttcaccgtgcccaagaccaccccggcaggcacctacagaatttacggcggctatctggatgttacccacagaagcggcggatacgaatggctagataagtatgcgaagttctatcggatggagatcagcgacctgaccatcaccgttttgaagggcgacatcgagaccgtggaggaccttattgacgccatcggcgccgatgtcaccctggacagcgaggccgccatcaccgccgccaagtccgcctacgatgccctttccgacgaggacaaggccctggtggacgccgataaggtggacgctctcac

SEQ ID NO: 1762 - DNA, 1487 bp, Unknown
  gut microbiota DNA sequence
aacggatttttccagcaaagatagccgccgaacaaaactgcttccgccagcgaagctgcaaacatcggtcgatgttctgtcatcagctccgtcaccgcgttgaaatcgtctttcatattttccagatttttcccaagcccggaatgatatagcttttcaaaggaatcggaaaaaatcatccgatactgtttcattttgcacgcctgaaccgcctgctccttttcttttcggaacgcgatttccagtctgccgtaaaaataagtataacaaaacacgattgccagaatgcctgctgccgtcgtcagaacgctcttcgtcctccccgcaagcgcgttcgttacctccgttgaaatcaaaatcggaatgagaattccatacggaagatgaagcagctttaaaaacagcgactttcgtgccgtctgttgtaattccctcttgtacatgactttctccttcaaaaacatagtacttacataaacatattgccgggctgcaatatgacatgcagcccggctttctgacgttttacgctgcccggcagttcagcgctgatgcaccggattacctgccggaacgacaaacttctgagtttgatcagggactgagtttgatcggtctgaccccgtttcacgcatatccccgcctctgcttctcccacattttccagtagcgtcccttttgcgccaaaagctcctgatggctgccgcactccgtaatccgtccatgctccatgacgtaaattcgatccgtcagtgccgtcacggaaagccggtgcgaaatcacgatcacgccctgatcgggatgtccctgcagcagcgttttgttaaacgcatcctctgcaaacggatcaagcgaagccgccgcttcatccgcaatcagaaactccgtgttataatagcaggcacgcgccagcgcaatcttctgtttctgtccctctgaaaacaggaaaccgtcctcgcaaaattcccgcaacacctgtttttcaaccggaacaaaagtcccttttcgatacaaaccgctctcgcacaacgcatccgccgcccggctcttatctgcgttttcggaaagcgccacattctccgccaaagacgccgcatacagcagatttccggcaaacagcaccgtgaaatgctttcgacattcctcccattctgcctttgttgaaacggctgctccatccgccaaaaccgctccgctgtccgtttttccaagtccaagcaaaaccttgatgaacgtcgtttttccagcgccgctgtctccgaccagtgcgatcttttcgccctttttcactcgaaaacagatatcctgcagaacctttttctccccgtatccgaaatcgacatgctccatcgaaatctcagaaaccgtttcgccgtctgttgtcccggattcctgctctttctcctctgctttcttttcattttgctcacaaaaactaaaaaatgcatcgatgtatccggcgtactccccggctcttcctgccatct

SEQ ID NO: 1763 - DNA, 2240 bp, Unknown
  gut microbiota DNA sequence
agatacgcgatcatcaaacagtcgataaacagaaaatcgctcccgatctcccgcccgaacgcaattggaaaaatacgtcgattccactgtttcgtctgctccgccttttgcgaaaagctgtcctgatcccgttttacgaaaaatggcaagcagcccagaatccgcccctctgctgcatattcctttcgcagaaaaatccgtaaatagttctggtgcaatgcatcttttttgttctgttcatcccgcttttcgttcgttttttccaccagacttttgacacagaaacggcttgccacaaacgccagcaaaacgaaaacaacgatcatctgatccatgcggatataaatgacgaccgctaccacacctgccagaaaactgccgaacagctgccggtaaaattccagcgtttcctccatcttcgtctgcgtaaactgcaacgccctgcggtatccatgaaaatacgcttcgtcgttatatttcctacagtcggcgtccagcataatccggtacaacctacggtttaatttgtattccagccgttccttccactgcggataaacccgttcaaaataccagtgccacaaaaagctcactgacagctggtacaccagaaatcctcccagcacccacgctgcccgtgtcagatcacgccccatcagcgcgccgatcatccatttcaaaacaaggacattcgccagcacatccgccaggtcatatgcgcccgtcagcacaatttccagtaaaaacagccccggtgcatccagaaagcggagcttctgcagccgcagatgacttttcaacctgttaaaccgcatcgttttccccctcctgtgcaaaatactgccgtcgctgcgtcgtaaacatcctgcagtagtcgccgcccttttccatcagctcttcgtgcgttccatgctctgcaatcattccgtttttcagatataaaatctgatctgcctgccgtgcaaaggataaccgatgcgtcacgaaaatcaacagcttttcctttgtcgcttccagcacctcctgcaaaatatccgcttctgtcagcgggtctaaaaatgctgtcggttcatccagaattaccgcatcgaaatcgcctgcaaacaccctgcacagagcaagccgctgtccttccccggcggaaaacatggctttttccccttcttcaaacagctccactgcagtatgagtgccctgcggcaggcttttgattttttcttccagaccgacctttcgcagcgcctcccagacaagcggctcgtcctcttttctgcattcccgcagcaaaacattctccgccaccgtcgccggatacagccggtaatcctgcagcaacgcaaacacatttttcccgattccggttcggctgactgccccatttctgtacagcttcccggtaaaatccggataaagccccagcaacactttcagaaatgtggactttcccgcgccattctccccgaccagcacaacgcgttccccttttttcgctaaaaagctgatatcatgcagtccagccgtcccgttcggataagtaaacgaaagctgtttcgcctcaacagactgcagaatttcttcctgcgtttcgtccttttgtgccggtttttcttcggcaaaaaggttcagaaaatcctctacataaagcagattctccgtaaaacgtgcatactctgttccaagacgaaccagtttcgcattcaggtttgcaatcgataataccagcacggaatattccgaaaccggaagtccctcctgcgtccagaatttccacagcgcataaatatttcctgcggtaaatgcgaacgtcgcgccaagattatccgccagaaaaccgagcaatgccagcgttccgcccttttcccgagcaagcgtacaatttcccgtttcctcctcccggtttaaatgatccaaaatgctgtaggcatccgaagtccgcagctcctccatattttcgtggaagaaaaatttgcgccatgcatacgcctttttccggtcatggacacttttttccacttcgtaatcatgccgcactgctccctgtctgcgcagcaccagcgtcagcagaaacggtgcaatcgccacgacaaacagaaccggatcaagcgtcgccagataggtcaaaaccgccacaagcgccgatgccagccgaaccgtatttccgatatttcccataattttttcataagtcgcagatgcatgattggcaagatattccaaccggttcaaaaacgccgttttct

SEQ ID NO: 1764 - DNA, 1017 bp, Unknown
  gut microbiota DNA sequence
ctgcgaaataaggccgtctacgatgaacatcgtcttgctcatcggcgtggacagcaaggtctctgcgtccacggttttcagtttgttgtccatagaattctcctttgtagaatgttagaaatggattttggcgggggacggatggaaacggccacccgcccccgctttgttatcccaaaagccttggaaatcaaggctttctcggtgcttaatgttcgacgctgcgccgccgcctggccgagtccgccttctgcttgcgccggatggagcggccgcattccgggcagtacttctgtcggttgctgccgggagcaaagggcttcccgcatcggtcgcagagccgtatgcgctgccggtaaatgtcggcatagagtgccttgtcggcgggcagaaccgcccgccggaagtacttgcacagcagcgaataggaaatcgtctgtacgcacacgcagccctcgccatcgtccaacggcagacagttgccaccgtcgtagttggcgcacagccgccggatcagccggttacagcgtgcccgctgtgcaggtgtcaggcggttgatctcatccaactttcttcacctccttctccatcacatagttgatgacgctgattttcgggatcttcagcgtcgtgccgatcttcacggcgtggatgtacccatagtcgatcagcttgtacgccagcttgcggctgatgcccagcatctcccgaagctctttgacggtcacaatgtccgggtattccggaaacatcatctgataaagctctctgagctctcctttcttcataggtttgaacctcctttgcttgttctgaagccgcatttctgcggcggtttttgtttgctgccgctcatctgtatcgttcctaccccggagtctcaccacggcgtatcgcttctttggcgcgctcgttcctttttcgggaagtcgtggcgtcacttgccggaagcatatcctttggaggcggcgattcaattttcaaggtacacagggagacagtcccctcaataggtag

SEQ ID NO: 1765 - DNA, 648 bp, Unknown
  gut microbiota DNA sequence
catctttttgtctccacattatggtggagcagggatgctcaaggatgaacacccctccgaagctccggtttcgccttcaaatgccgtttctatatcatccagcgggatattgtcaatgctcaacggctttttgctggcgttgatgatgagggtaaagtggtcgtcatacagatagatggaatgaacaaagatattgatgatagctcggcgcttgttcacatcgtcggcgggcatctcgcagacatagtccagaaacgccagaatctgtgcctccgtcagcgtgatcttcttgttttcctcgatggcgagctgcgcctccagctccgccttttccgccatgcgcttgttgagtcgatccgtcagcatctccacggcctgcccctgctcaatggctttccagagattctcaatggccgtatccgcctctcggatcgcctttttcagcgccttggcggtcaggttatccgggcttttggtgcactcctcagccactttcttggcaatgaagcggattttctcctcggtcagcattttcaaacactcgttgaccacacggtcctcgatataggacttgctgacgatcttcttgccgcactttttcctgcgggcgtttttgcacatatagtagtgatattgcctgccggtctt

SEQ ID NO: 1766 - DNA, 370 bp, Unknown
  gut microbiota DNA sequence
tgcaagctctttatgatcgcagtgacggattttatcgcagacagcttgtgctgaccaccaaggaaaagcctgtggatagagctgatgatcctgaccttgcggagaagatgaaagccgaagccgagggcatcttcctgtgggcatttgaaggcttacagcggcttgttgccaacaacttcaaattcacagagagtgaccgtatccgggaaaaccgggaagcggtcaagcgtgacaataataatatctttgatttcatggaatcggagggatacatccggtgcaaagcggatgcgtccatcagctccaaggatttctatgaaatctaccggatgtggtgcgaagaaaattcccttgcaccgctgaaagcccg

SEQ ID NO: 1767 - DNA, 2797 bp, Unknown
  gut microbiota DNA sequence
attgtatgcaaattgagagtttaaatcatagtatggcggaatatttagatattgtagatgagaacgggatccccacaggcgaaacggtagagcgcgaaacggcgcatgcaaagggcattcggcaccgcacggtacatttgtggctcgtgcgtaagaaagacggcaaattgcaggttttgctgcaaagacgcgccaagcacaaggagtcttttcccgatcggtacgatacgtcaagcgcgggtcatattccggcaggcagtgattacagagagtcggcaattcgcgagcttttcgaggagcttggcgtgcacgcgaaagcggaagaccttgtgtactgcggcacacgccgcgtggtgtatgacggcgagttttgcggcaagctgtttcacgaccgtcaggtctcgaaggtgttctacctttggttcgatgcagatgaaagcgcttttaacatcgactccgccgaggtagactgtgttttatggatgaatttagatgcgtacatcgacggtgtgcggcataacacgtttccgcactgcatcgaaatggacgagctcgaaattttatgcagcggcttaaaggtcgattttacataagttttttaccgcgtaatgacctgcaccgtggtatcggcatagtcggaaagcagggaaaaatcctctttcagtccgtccgtaatgtagaccgtgccgtccactgcaatgaaaatcgcttcaaagtcgctgctttctgcccagagagcagcggctttttctaagcccatcacaaaaagcgaggtggaaagcccgtcgcacatcgcgccgtcctcgccgatgaccgtcacggcaagcaggccgctgtctgccggacgtccggtcttcggatccataatgtgccaataggtcttgccgtcctgttcaaaataacgttcgtatccgccggatgtgacaacagctttgtcgcgcacggagaccaccatcatgggctctttattgtgagggtttttcacggcaatttgccatgcgccgccgtccggcttgctgccgatggtctgcacgttgcctccgagattcaaaagtgcggatgtgacgcccttttcgcgcagaagttccgctgcctgttgaccggcatagccctttgcaatgctgccgaggtcgatttccatgcctgctggcaagatcacttcgccggtgacttcatcgtactgcacattcgtgtaatcgaccagcggcaaaagggaggtgagctcctcctcgctcggcaccttgtagctgccggtcgtaaagccccatgcgcgcacaatggggtaaatggaaatatccagtgtgccgtttgtgcggctgcacatcgcaagtgcctttcccatcaggtcggcggtgctgcccgtaacggtaccagagccgttttggttgatctgcgcgatctcgcttgtgtctttcgtcacagaaagctcgtcttcaagactgtttatcagcgcctccgcgtcgtcaacgagcgaagcgctgccgtatacggtaaattccatggtggtgttcatggcgtagaatgtctttttttcggcttgtggcgtgcgggaacaccccgtgcacagtgcaaaaatcagcacaaaacagccaaaaacggataaaactttctgcatagtggtctccttttgagaaaaatcatagaatattaaaaatagatgacagatatttaaaaaatgaataccgtttccggttgacaacaaaggaaatttttggtagcatactgtgtggaggttagtgctatctaactttatatacaccgtaagagcagagaacgtaatccttcgcgtgagggattgaaagccttttgcggcgcataaagcttggggtgctaacactgtttttttcagtgtaagttagatgtatctaacccacgcgcagcattataccacggaaaagcgcgtctttcaaccattttaagagattttgttgaaagctgtccgtggaaatatccgaagcggcggagaaaccgcaaaaaatgaaggaggcagcatgagaaacatttacaaaaaagcagcgtctttgcttttggtgacaatgatcctcttatccatggtcgtgaccggcgcagtggcagaggcagcagcaccgacagaagtgaaaagctgcgaaaaaagcgggttttatacaaccgttttgaattttgaattcagcgataccacatggctggatgcagtgaacggcgttaccgtaaacggtacagcgttcacaggccagacgatcaacagcttttcaaacgataccggcatttggtgtgtcggtaatgcaacgggtgcatacggcagctataaagccttacagcttgccattgaaaacgacgcttcgttcccgctgaccgttgaagttacggctgcaggctacaacaagctgacgatggaagtcgcaaaggcaacggtcagctataacgatgtctacaccgcgaccgtaaagatctcggagaccgagccgaccactcccccaacggagccgtcgaaggataaagagccgccgaccaattacacggtatcggcatacttcggctacgacttcaacatgacgtttaccgacgcggaagattggctcaacgcgatcaccgatgtgcaggttagcggcacgtcttgggagaaggtctcctattcgaaccttgtcagcaacaacgccaagtattatgtgagtggcagtgacggcagactgtatatcggtgaaggcttcgacggcgataccgcggtctgtgtaattacggcggaaggctataagccgctgacgctcaccttgaacaaaacaaaccacagcgccgtgattggcgccgtaacaccgac

SEQ ID NO: 1768 - DNA, 449 bp, Unknown
  gut microbiota DNA sequence
aggtacagcacgagcttgagccagcccgtgaccggcacaaagtgcagcccgatgagcagcacggccgctgctgctatgagcagcagcgaccttttctgttcgcgcgacatgagattcagtcctcgaagcggaagtccggctcgaccttgcgcgcggtcttgaggatctccgccttggcctcggcttcgtccacgccgggggcatattccaccagcatcttctgcgccatgtagctcacggtcacttcccggacgcacttgagctttgccacgttgcgctcgatgatcgccgcacagttggcgcagtctacttcgattttataagtcttttccatgatgatgtacgctccttcatctgtcattgaatgttatttgaaaagatggccgggccatcatttttccagcacatgctccatgccgagggccagcacggaccggacgtggtcgtcg

SEQ ID NO: 1769 - DNA, 1230 bp, Unknown
  gut microbiota DNA sequence
tttccttttgtgcagtttgaaattggtgctgaccgacttacgcaaaacagtatgaccaagatattcctgtctgctcaaaatcgctcttatggttgacattccccaagtatatgggtctgaaaacttcgttccattatactgttcggggtgatattcctttgcgtgtgctgccggaattaaaaccttttcttcggtaagcaattcagcgattgctctcggacttttgccctcgttggcaagcagaaagatacgctttaccacctcagaagccacagggtcaacgacaagcgtttgtttgtcggttgctaatcggttatatccatagggaatagaaccgctacatcgctttccgtctttcatacgggcatcaaacacagccttgattttattgcttgtgtctttggcataccactcgttcattatattcaaaaacggggcaaagtcattatccgaagcattgttgctgtcaatactgttgtttattgcaagaaaacggacatctttctgtgggaacagaacttccgtataaaagccgacttgcagatagtttcgtcctaatcggctcatatccttaacaataatcgttgcgacatttcctgcttctacttccttaatcagttcttgaaaactcggacgattgaaattcacacccgaaaaaccatcgtcagtaaaatggcgaatattcgtgaacccatttctgcgagcataatcttccaagtatttcttttggttggtgattgaatttgactcaccattgaggtcatcatctcttgataaacgctcatagagtgctgtaatctttgaagtccttgacattctcttatcctcctttctttatgtaatctgttttggtattaaaagtattactccctctaccaataggagaaaatagggatacaaagcggaactgtttttcaaagaatcaaaaaaatattttttgaaattctgcaaccgactttgataacctattttcaatttaggaacgcattatttatcgtcctactaaagtatagccctccggtgcaagctcaatcgcagttgttgtttctccgaaggtcgatgcccaggaatcaaaatgggtcaggttcttttgctggagcgtactgtactggagatagcgcatgaccgtataaagctcggtcatcgagttacttactggagtaccggttgcaaagatcacaccacgcccgccggtcagctcatccatatagcggcacttcataaacatat

SEQ ID NO: 1770 - DNA, 278 bp, Unknown
  gut microbiota DNA sequence
tgtttcctataatgggagaaaacaggggtaaatgctgcgtacatacgtacagagcatgactggcaaaatcaatcccgccagtcctccggtacgtacgtacacggcgaaacatcgtaaaatccatttatatgaggtcttgccacagcttccacgcccataaagccccacacccgccgtccggcagagttggtgatgttgttgcaatgctccagattgaatctcccggcattggcaatcatggcatcgctgaagctacgggctttcagcggtgcaaggga

SEQ ID NO: 1771 - DNA, 624 bp, Unknown
  gut microbiota DNA sequence
atttcggaatcgtcttctgccaaatcttccgtttctctgaatacccgtgtgccgtccgcaccaaactccgcctcatatcggtcagtctctcgcgctgcttcccggtctgcctctaaagacagaatatcctcgtgaatcttcaggaggttttccggcgtgaactcgacatagccgcagtccatctcatagtcattttcagcttccatgaagaacggagtattgatgtccgcaaggaactgatccgacatttcttcaaggtcatttcggaagtcggcggcgttttccggatggttggcaatgtcatactgctcgacaagctcttcaaaaacagagaaatcaaggtcaccggaaacatactgtccacctgcatctgcatcgggattgaagtaaatccagtgaaccttgttactgccggtgtcaagggatgttctcgccttcgtattgtctgcgacagggggttcttccacggcttgcagcagcttgtcattcagcggattttctttgagccggttatcgaactcttcacgagtcagctccttgttaaacagcgggaactgcgtatcaaagaggacgaccttcttctcgtcaaaagacagcagctcgtattcctgtgtgccgatatag

SEQ ID NO: 1772 - DNA, 2244 bp, Unknown
  gut microbiota DNA sequence
caatcaaaattcgccgatgtgatcggctctacacagtccagcattaaccgctatgagaatggccaggcaacgccgactgttgagcttctacgcaagtatgcggactattttgacgtttcaatggactatatttttgcccgctgcgatgatccgcatggcaagctgtatgaagcgaaacctccggttgacgcgaacaatcctgaactgaggaagtttgttgagatgtgtttcgatccggaatcaccgatgaacgaaaagctgaaagaagcaatgctgaaaatgcttggggaggcgaagatatgagcaatgaattaacccataatccgggacagttcgatgaagtcatccatatcatcgacaacgcccgcagccgcgccatgaaagcagtcaatgcagagcttattcagatgtattggagcgtcggtgcgtatttgtctgagctttgttctgcatcaagctttggcgataagatcattgacgaagttgccgcatacattgcgcaagagaaccccaacatcaaaggtttcaatcgtcgcggtctctatcgtatgaagcaattctacgagacctacaaggacgatgaatttgtgacaccactggtgacacaaatcagctggacaaaccatctgcttattatgtctggctccaagacggcagatgaacggcatttttacatggcgctctgtgcgaaggaacattattccaaacgcgagttggagcgtcagatcggcacatcgtactatgagcgttcaatgatttctgccaagaagccgatgcctgaatccgtttcgcatgatgtgcgtgaaagcatcctcgatacctatgtgcttgagtttctggacttgccggagcaattttctgaaaagaatctccgtaaagcaatcatcgaaaatctgaagcagtttatacttgaatttggccgggactttacctttatcggtgaggagtaccgtgttcaggtcggcaatacagatttcttcatcgacttgctgttttataaccgtgcgctttcctgccttgtcccgattgaactgaaaatcggaaaattcaagccggaacacatcgggcagatcaatttttatctcgaagcacttgaccgcgatgtgaagaagccaaatgaaaatccaagtgtaggcgttattctttgcgccagcaaggatgacgcggttgtcgaatatgctttaagccgcagtatgtcgcccacacttgttgcagattatcggctttgtcttcccgacaagacgcttctacaaaacaagctacgtgaactgacagagcttgcgctggaaagtggcgaagacaacgagagtgatgaagaatgaacgctgttatctacgcccgctattcctcagacagccagcgcgaggaatccattgaaggtcagctccgcgagtgccgggaatatgctgaacgcaacaacatgaccatcgttggaacgtatattgaccgggcattatctgcaaaaacggcagatcgaccggagttccagcacatgatcaaggacagcgcaaaagagctgtttgagattgttcttgtatggaagctcgaccgcttttcccgtgaccgttacgacagcgcacactacaagcacattctgaaaaagaatggtgtaaaggttatttctgcgaaagagcatatctccgaaggcccggagggaattattctggaagcgatgctggaaggctatgccgagttctattctgctgagttatcagagaaaatccatcgcggacagaaagagaatgctctgaaagggaaaaacaacggcggtggcgttccgttcggctatctgttggacaagaaagcacagaagcttgtgatcgatcctacgactgcgccattagtggttgaggtatttgagaagtatgctgacggcaaatcgattcgttctattgttgaggatttcaatgcccgcggacttaaaacgaaaaggggacagcccttcaatatcaatagtttcagctctctgctgaaaaaccgcaaatacattggcgagtaccgatatcaggatgttgtgattgagggcggcgttcccgccatcattccggaagacctgttcaaccgtgtgcaggagcgcatggagaagaaccgccatgctcccgcaatggcaaaagcaaaagaggattatctgctgacaacaaagcttttctgcggtaagtgtgaacgcatgatggttggtgaaagcggtacgagtcataccggcgctatgcactattattacaagtgcggcggcgcaaagcgccg

SEQ ID NO: 1773 - DNA, 6300 bp, Unknown
  gut microbiota DNA sequence
atcagccgaacaccaaagtttttgtcgacgctaccggcgataacaatctctatgcggtttggcaggtgaagacgtacacggtaacgtgggtaaactgggacggtacagttcttgaaaccgataccgatgtcgagtataactccgacccgagttacgatggaaaaaacccgacgagagcagcagatgcccagtacacgtacacgttcaagggctggacgccggaagtcgaaacggttaccggcgatgcaacgtatcaggcaacatatacgaaagaagcgaattcctacactttgacgtatgacctcgacggcggcgagtgggagaacgatacgacctacacgtacccgaagaagtataacgaagaagttgaggtaaaagcagacccgacgaaggaaggctacaccttcgcaggttggatgagcgcagaagtagaagtagtaaacggcaagttcacgatgcctgcaaagaatgtaactctgaaggcaaagtgggaagcaaacacctacaaagtaacatacgagctcaacggcggcgagtggactgaagcgaccaacgagttcccgtacgagtacaaagcaacagtagaagttataaagacggtcccgaccagagagggctataagttctcgggttggagaagcgaagaggttacgatcgagaacgatgcgttcacgatgccggctaaggacgttgtgctgaaggctgtttgggaagcaaatcccacgccgaccccgattccgtcggaagagccgacccccactccggctccgacagaagagccgacccccactccggctccgacagaagagcctacacccacaccggctccgacagaagagcctacacctacaccggctccgacagaagagcctacacccactccggctccgacagaagagcctacacccactccggctccgacagaagagcctacacctacaccggctccaaatccgaacccgaacccggcaacacctactccggcgccggtagctccggtcattccggctacggttgcaacacccaccccgacaccgactgccacaccttccgcaacgccgagcgataacggcggaaaaggcgatggcaataatgacggcgaaataggcgaaacgattaacgataacgatacaccgcttgcaaacggtgaagacatcgcagacaacgcaacgccgctcgcaggtctcggcacgggcgcttgggcactcatcaacctgatcctcaccatcgtgacgaccctcctttccatcctccttctcatcggctatatcggcaagaaaaagaaggcgttggaagacgaagacggcaacgtggttctcgatgagaacggcaaagaggttatggagtacgaaaagaacaagaagggcctttggagactcatcagcatcatcccggctctgattgccatcatcgtcttcatcttcaccgaagacatgaccctgccgatgatcttcgtcgacaagtggacaatcctccatgttgtaatcgcgctggtacaggtcgttgttatggtcctctgcaaaaagaagaaggacgaaaacgacgaagacgagaacgcagcaaacgcgtgatggaacaaaagcataaggcgtaagccaaagtaagacgggatgtcccccaaaaagggacatcccgtttcttaggcgcgttgtgttttccacagagtttttttgtattgtggaagaatcagctgcacgtgcatagaccgcacggcaagctttgcgcaaaagaataccgcacaaggtgagtttaccctgtgcggtatctctttttatagcggtttagttttcaaatttcgcatctgcaaggtacagataaccgacggcacgcagcgaggcgaacgcgccctccacttcaatgcgaacggtggaagcgccggaaatactcaggctcagcgcgcttgcggggctgttcaccgtgagcgaggaaacttcatattgcaaatggtcgtccacataaatgcgaaccgtgccgatgaaatcgtcggaggtatcgccctccacgacccatgttcccgtcaggcgcttatattgtccgttcggggcgtattcggtgtagacggtttttgcgatgacagggtacagcgagaagttaaggccgttgctgtacgcattgccgtttacgtcataggctgtccagttctggctgcaatcttcgccgccgcttggggaaagatctgtcagcgaaacggggtaaagcgccctgtattcttcaatcttagccgcaatatcgctgtcgccggagaggatgtcgtcggcgttttgcagcgtttccaccgcgtcagaatagcggctttcaccggcctgctttgcggcagcatcgagaattttttgcttatactggtttttgtaggtggcaatctgcgcgtcgatgcgcttgtcgctgcgtgtggcgccctgcagcacgttaacagcgccgggcaagtcgccgtcgtccgcgagcgttttggcggtgctgagcagcgtttccacgtagttattgagctctgcgtccttaatctcttccagcttagcctggatgtctttatcatcgccgaggatatcgacgctgttcatcaaaatggcttcggcaccgaggaaatctttctcgtccgcgcggctctgcgcatcgcttaacactttttctttgtatgcggtgcggatgttttgaatttgcgtctgcgcgtcgtcgtggttcacatcggcgtgaatgaccttctgatattccgtaatggcgcggccgtcttcgccctgtgcctgcaggcttttgccgtttttgtaggcctctttggagtctttcagcgattgaatgccgttgagctgatcgtcgagaccgatgttcgggaacagcttttgcaggcggtcgagcagttcataggagctgtcgtagttcgcttcgcttttattgtagcggtcgatgaccgtctgggcatattcctgcatttggtcggagaccgaagcgagttcgtcctttgaaagcgtgggaagtacctgcgccgcagcggaataatcgtaagcgtcaagcgcgcgggtgagcttttgcatgggtgcattgtaccaccagaaaatgccgccgattgtagcgccgatggcgatgagaatgggaagcacgatgaaaagccatttaaaagaacgctttttcttcggcttttcgtcgtattcctcgtaggcgtagccgtcgttatacgtatattctatgggttgcacgcgcggctccggccctgaaatttcctccggggttggggagacggtgaatgtaccctcgtgctccatgccttcgggtttgtcgccgagcgcatcgccggaggaaatatcctccgtgaagtccgtcggggaatggctgtaaatatcttcgtcgtccggactgtttgaaggggtatcttcagcttcgggtgtcggttccgcttcggagaggctctctgtcgaatttgaggagatgtcttccacggcaggctccgtgggcgtttccggcgcgggggcagattccggctccggttcttttgcgggcggtgcagtcgcttccggcgggcgcacaacggggttgccgcagagcgtgcattttttcgcgccctccggcaaggtggcgccgcagtatatacaaaacataagtgacctcctaatgtttgtggtcccgcagggaaaatctgcggtgttttccatagcatacaatattccgggaaatctgtcaaatgtttagaaaaaatgtgggagataaagcaaagagagggaacgaagcgttccctctcttatccccaaaagtgccgctaatcggctattttagtctcccaaacatgtttctgttccggcgaaacggtcttcagcgcggcgagcgaatacggtatccccagcgcgtcccatttcgttttgccgatgtcatggtatgccatgatctcggccttttcaatacaggtatattgatgcttgagcgcacaaatcgcctcaaagtgcgcgtccgtgtcgttcacgcccggaatgaccgggcagcgcaaccacacatgcgcatgcgcgtcctcaagggctgccagggactcgaggatcggcgcaagcggcgcgcctgcccattttttgagggcatcggggtcgctgtgcttaaaatcgaacagaaaaagatcggtgagcggtatcagttcttttaagtgtgcggcagagatcaaaccgtttgtctccagcgcggtgtggtaccctttttcgcggcaggctgtaagcagctttttcaggagttcaaagtgcaaagaagcctcaccacccgaaaaggtgacgccgccttttgacgagcggtaatattttgcgtccttgtcaatctgcttcatcacggcttccaccgtcatttcgcgcccggaaagctccaggacatcgttcggacatacttcggcacatttgccgcacgccgcgcattttgcacggtcaaaaacatgtgtgccgtctgcttttatttcatgcgctccgttcggacataccgcagtgcatgccccgcaggacgtgcatttttcgcggcgaaacaagagctcggcatcggttgaaaagctttccgggttgtggcaccacgcacagtgcatgttgcaccctttgaaaaatacggtggtgcgaatgcccggcccatcatacacgcaaaaacgttgaatatcaaaaataagatcccgcatatcggcctccgcttacgcgccgtaggtcgtgcgctcaataatctcgcgctgcacaacaggattcagcgtgacgaatctcgcggagaagccgccgatacgcacgaggaggttctggtagttttccgggtgcaccatggcgttttcaaggtcatccttgccgatgacgcacaggttcgtctgcacgccgtcgttgtcgtaaaacgccttcaagacggcttctactttattcatagagcccttgaagagctcctttgtgaagcgcacattgttgataacacccacgtgctttgtattgtcaaacttcgacatggagttgagcagcgccgtaatgccgcacttatccgcgccgatggaagcgccgttggcgtttgccatggggctgccggcctttctgccgcaggcagatgccgcacagaagttgccccattctgcgctcatggagttgttgacgctgacaatattgtaatggtcaagccccgcagctttgcctgccgccacggtaaggtcggcaatatcggtgaaaaggcgcgttgcgatgtcgtcagccgtgtcgtcgtcgttgccgtattttggtgcggaaaggcacatgcggcgaatatcgtcgtgcccctcaaaatcgtgatccagcacatcgatgagctccggcaaagtgagcttcttctcgtcgtaaacgagcgttttaatggccgtcaggctgtctgcacagctgatgatgccgaacatttcgctggaagcattcaggtaacgcacgccgccttcaaacgtagccttgccgcgcgcaatgcagtcgttcaaaagcaggctgaggtgcagatacggtgcgttttcgcccgcaattttatagttgaggtatttgtgtacagcaaagcggtcaatggtcggcttgagctgtgcaagcacggcgtcatacagcttttcaaaggtatcaaactgcgccgggtcgccggtcttttcgccgcagggaacgttctggtagaaatcaaggccgttgtgcagtgcaatttccagcgctttcagcacgttgatgccgttgttcggtgtgcctacgctgtaaccgaccatgacgtattcgccgcagccgaacggcacatattgctcggcttcctcatgcgaaacgccaaagaccttttccacagccggtacattcgtctcatcggagtaaataatcgggaacgtagtgccctccgcattcacttccatcgccttgcggaaaacgatctcgtccatgtcgctgtaatagcgcagggtaagctgcggcacagtctcgcggaagcggcgagaagcttccatgatgacgatggcgaggcggtcggcttccttctggtgctttctgcccacgccgccgatgattacgcggcagtcatggatcttgttaatctctttaaagtgcttatagagatacagcatggtctgcacggcttcttcttccgtgatgcgccccacgtcgatatccgcagcgtagagtggcccaaggtaatcgtccatgcggctgtaattcataatgtcgctgctgacagcgtagatccacatcagctgcacgccctcaaggaacgtcttcggtgtgctgtgctgaatgtttaaaagtgcttcggcaagctttgtaaagcgcgttctggcttcttcggtctctgctttttcggcaagcaccaatgcctgttcgcggtaacgctcgcatgcgc

SEQ ID NO: 1774 - DNA, 794 bp, Unknown
  gut microbiota DNA sequence
caatccacagctttaaagccgtgtaaaacgaagacgcgccgttcacttccgccgcgcggtcgatctcctgatcgagcccgtcaaagccgagacggatgagcttttcaaaatcgaggtttgtacctgccacgcggcagtcgcagttgcccacgcccgcaccgggaaaagctttcggcggcacatagccgtagcgcttcgaaaattccaattcaaccttgcgcgcggtgttttcctcgtgccaataggcctgcacagcctgcaaggcgtagtcctccgcagcggtgatctcaccgttttgcttacaagccatgtacgcgttcaaaaattcatgctcgttaaagtaatacgtgtaaatgccgccgacctgcgaggaaaagcccacaaagtcgtgctcatagcggcccgcgatgccgtcgttttcatctatcggcactaagatatgacgaagctgaaaatccatgcaggcggcttcacgcaggtaaatgtcgtttgcggtttctttgtaaatgcgcgtgaattccagcgcattgcgcagtttttgaacatcggtcttgaacataccgttatcctccccagtttatatttaaaatttcttgattccgtttttttgacgcgttataatagcagaagaaagggggcgccgaaatgagcgacgttgagcttctgcatttttccgaagaaaatctgcacaccggtgagggtgcgcgcgttctgcaccagtgcggtgtgccggcaacgtataaaattcacacgcatgatttttacgagctgtttctcgtctcgcacggcggggc

SEQ ID NO: 1775 - DNA, 1303 bp, Unknown
  gut microbiota DNA sequence
cccatccagattgcgctacgcaacatcctgattaacaaccagatgatgggtatgacgcaaatcggcgcggctgccgtagaggcgcgacaactggcagagctgattaagtacgcctccattgtggtctcttctctccccatcatgttgctgtatccgttcgtacagaagtatttcaataacggcattatgctgggctctgtgaagggataataaggaaaaatgctgaaccggactgccgtattgttctgcagcagtccggtttcggtattttcttctttagactttatcgattttggaggtggttaagatatataagaaaaagaggctgcgcgtactgctgcgctttttctctgttctgttcctggggctatttctgattttctccgtcatccacctgtatctgggccagacgctgcgtgctgtggaggatcaatatattgaggaaaccgccatcctgtacgtaaagaacatcaaccggaaaatccagtccatcaatcaggagtttctcatgctggccaataatctgcggaatatccttcccggcatccctcaaaatatcagtccccgggacggtggatactacgacgttctgtttatggccagcgacctcgttggcagcctgaagacacgctatccggagcttaagcagtcctttctctactggccggcatccgatctgcttgcattctctacgggcctctcttttgcatcgacggacgatttcggcattaccggtcaggtgaagcagcggctgcgtcagcagaaagacagcctgtccacccaagtatgctgggaaatactgacaagcggagaggaagcctacatactggggtggtacagacagaaggagatcatgctcgcctgcctgatcgacctgaatcagctttttgcggaaatcaacgatatgccgaaaagctactcggtcatttcctttctgcggtggaacgacggccgcgtgattgcgccgcaagcttaccgaaaacaggccgagcaagccatcgccgacggcgccgaggtatacacatacccgcttgcaaacctcggcaccgcgtacattcaaaaggttgaggacggagagatccttcaaaacgtccacttccagctcggcctgttcaacatggaaatggtcctgctttggttggaggtcattctggtcgtgcggctctgctacaggtggctgttccaccctttcacgaaattcgtgaccggtctggagaacgtcgggacggaggagatattcgatcggctggacgaaaatgacattttggagctggaaaccatcaaccggcagttcaaaacgctc

SEQ ID NO: 1776 - DNA, 525 bp, Unknown
  gut microbiota DNA sequence
ctggaaaatctgcgcacggcggcgatcattctgttcgcggcgggattgctttcggcactggcgattttggtgttgctgctctatttcttcatcgtaaaacagaagaagcgcacggcaattgagcggagtttaggcatgagcaaaaatcagtgccgcgtgtcgcttgtttcgggcgtagtggtcttgagcgctgtggcggtgattttgggcacagtttgcagttcagtgctgtttgacaaagtgcagacgctcgatttaaccgggcagagcgagcacacattcagcatggaatacagcctttgggcgcgcgatgaaagcgcggtggagacggaggacgcagagaacatgggcgttttggaagtcgtcattcctgcagcgatggttttgctgacgacggggttatctgtgattttggtgaaccgaagtctgaaatatgaattaattgaaatgctgaacaaatagattaacatatttatttgttctgtaaattaatatggcaacgtaaagtaaaaatgaaagagcgag

SEQ ID NO: 1777 - DNA, 4967 bp, Unknown
  gut microbiota DNA sequence
ggaaaatgtcaagcgacgagaggaaaatctcgttttttgcgggtgggtaaactgagaccggcgacttgcgcgggtgtaagcccgttcaaagcggaacgaggacgaacaaagttaaagaagaacacaaacatggagatcaggttattagcgctctcaaaggaagaaaagccctgcttggttttgtaccaagccttgaactgtttgttaaagcattcgatcagattgttggaaacatcgtccttaaagctttgaatgcgtatgtgcctgacgccgtgaaaaacagacttgaccggaatattgtaggccgaataacggtcggaaacgaccgcagcgggcgatttccactcgaaaaaggaatgattgcacttcttatcgccgcagcggtagttggaatagtgttcgtgatcgtgatgcagaaaggcctttccgcacacgggacaaggcggatacttccgacgatgctcttcccgtgctcttgggcgttcgggtgcaaattgatgttggcaggttcggcagagatacttctgatacccatcgggatctttgccgtaacgataaaatgaatgattgttgttgcattttggacactaaatgtggtatgatttcatcatgagaatcctcttttttgggggatatgtgttttgtggtgaaaccattataccaaaagggacgagaggttctcaactttcatttaaatttacaatacgatcggtgcggacgggaggtataatcatgtttcgtttagcactttgcggaaaaaactgcgaactattggaaaaaataaaatctcatattcaaagctttgtagaaacatataaaaatgaaactaagtgtatttcgattgaacagtataagcaattagcatcgcttcgtgatgatatggtagatggaattcacttcgatattcttatggtcgaaattgatgctcatccacatgaagattttcgtttactttcggaaatacgaaaaaccgctacggacactatcgtcattctcttttcaaagtttctcgactacgattttactcggctggggtatcaggtaggcgcatttcggtatctatccacacacaatttgttttcggatctgccggaagcactttgcactgcactggaaatttcctctaaaaagcaaaaaggatactacacgttttctcattattcggaaattatccgaattccgttagatgatgtcttatacgtaaagcgagttaatcgtataaccatgatcaaagcaaagaacggcaattttcatcttcaattaccgttaaaagagatttataaagaaataaatgacagtagatttttatttatagacagaagctgctttgtaaatatagatcatgtgacttgctttgctgatgcagaagttaagttggataatcaagagagcctaccgatcagtcactcaaactttactgccattagaagcgtattactatattaaaatgcctaataaatacatcaacacgtaggataaacttcttatttcatattccatataaaaccgcccgctatgtatctaattttgatacatgagcaggcggttttaatttttacggcatcggaagaaccatacgcacgcattttttcactgggtacaagctgacatttaggtacataacgatttgctcttttccggcttgttcctcaaggtaagtcacgccatctgcacggccggatgttgggtagaccatataaagagaagcttccgttccgggcatcacagagatgccatctgcttttgagttaagatccgggtttgcgattttcatatagatttcactcttattgaagtaagcggactgcgcttcattcaaaaggttaaaatcgcggataaaaacgccgccgtccgtattgttttcatttttgaaatcaacggtcaacagaactacgtcatgctgtgtgttttctgcaagataatcgacaggcttgccgaatcgctgcataaaatcttcataacgcactacttccgcttcacgaacacgaacagaatatccattggtattttcttcttttgagtagaaaaaatcaccgtttaggggaatccattcgccgatgccgtgttcctgcgtttcaaatgaataggctgttgcattaacgtaccagatgcgccatgcacaaagcaccaatgcaacggacaaaagaatgaccgaaagcgttttactcactcttatcttgcgtttcatacggcgttacacgtccttcccgtacaaggtaaatttcatcggacagctcacgcagaacagaaaaatcatggcaagccagaataaccaatgcgccccgctgtttttgctcaagaagcagatctctcaccatttctatgccgtctgtatccagtgcgtttgtcggctcatcaatcagaagcagcgcaggatattccaaaattgctccggcaatgcctaatctctgcttcataccgagtgaaaactgcttgtattttcgcggatcatccgcgccgagtccgacctgctccaacacttcgcggatacgttcctccccgacttttcggtgaatatttgcaatcagctttaagttctgtgccgccgtataatgatcgataaatgccgggttttcaatcagcataccaatgtccggcggaaaagaaatatcctttccaagtaccttaccatcaatcgtgatcgtgccctccgtcgggcggatcagcccggcgattaaccgcataagcatagttttaccggagccgttcacaccgcgcagaccgtagatcgtaccgcttgtaagggtgagcgagacgtcttcaatgacggtaatattcttgatcgtttttgtaacatgatttattgcgatttccatataggcttactccttttcatgactacgataggtctgagccgagaatgtctcgatattggaacacaaaataccctataccgatactaagcacagcgagccatattcccaataatataccgaacggcatggtcagaccggttgacacaagcagcgcatttcttgcgcccatggcatagtttccgaaaaacgccgggctttgaatataggcgcctgcgaataaatagccggcaagtacgaagtagctttgcaccggtttcaaaatgagagataagatcaactgtaccaatgcgagtacgatcatggtgaagccggtcattaaaaataccgaccaaatattccaagtggtgctgctcgttaggtcgtctgctttcatgtagagctctctcgaaacataccaatttgcctgcatactcggctttgctccaaagcataatccggcagccgtgctggccgcaaaaacgatcaaatagtttgtaatggtattgatgattgtccaaacacattttgaaagccaccaatttcctctgctgccggagagcaccattagctgtttgcctatgccgtttaattctgcaaacggataatatagagaagtaaattgcatccataagacgaatacgaaccacatcgtcggcattacgaaatcgttttctgcgccggagatcaaatttactttaccgcagccgccaatcaatgccaagaaatagtctgccgttgtaacaggagattccaaatattgcggatcggtgagctcaaaaatgcgcagcgtccagaaatgatagatcgaaaggaagaagaacataataaatgtaacgatcaagcgctttttagcgtgccctatgccgtagcgcaaatcgtgatccaaaaatttaataaacatctgcgtctttccccctttccaaaacaatagcgagcggcagaagaataagtaatgccatcataatcgcatagactacgatagattgattggatgaagaactggtcatccaaatgtagtttagaacagaggtttcggtaaatgagcgatatacggatgctttttgcaaagatgcgatgatatacagcagtacaagatatggtgcaaaaagaaccacaaatttatttttttcaaagaatgaaagtgcaagcggaatcgttgcccatgcaccggcaaatataccgatcatcagcatattcaggaaagctgtgcataacgggtgagcgtagtagaggtttccgagcagcttagttgcgcttacttgataatataaggcaaagtttatatccgggcgataagccggcacaaggcatgacgcaagcaaaaagctaaaaagcatcggcagcaaaaccgttaaagcccctgaaaggaatgtggagacatattttcctaaaaagtaagaagcttttccaagctgcgatgccataatgcggtcgtatccgttcttttcttccgcaagataagaccagctgtacgggataacgacaaaaaccggcatcgtataaaagaaaaccatcggcagcgtttcattggctcgaccaccgatccacgaattataaagagtgtagatttgcaggaaagggtattcggcaaaagtgctgtctgcctgcaagtctacagttgtaagagtaagctgtaaattatctttatatgatttataagccaaaatatcatctgctgttacgattaaaagtaaaatcagcagcacaaatagaaatgatttgctgtgaaataaattgtagagctcattttgcagaaagtgcctaagacttttcatgtgggctatcctttcattttgctaaatcacgcagcataacgccgtaaaagatttctctgccgggggtgatggcaaagaacggatctttttgcgataaatatacgcggtcgatcaaaaactctattgtgaaattttgtgtttcgcccggctgtaattcaaagctccagtaatcgtctccgggaccgtgtggatcaaaataggtctcgtatgcagaataataatttccgacggttgtatacccctccgggttgttctgattctcgggaaggagatcttcatacgcgctaagtacaaacatattggcgttgaatttatattttacgccgtttttgttttctgcatcaacattcttaagggataattctacatgcagtatgcacgggtcttcaaagtcgga

SEQ ID NO: 1778 - DNA, 528 bp, Unknown
  gut microbiota DNA sequence
atcttcggcatccgtcggcaggcaattaatttgcatgatctcaccgtcctgattgaagagacaggtgcctatccgacggctgtgctctgccgcattgagtggttccttgcggatctccagtttgcagcagcccgcagcatgtgccgcatgtatcgcagcggcaagacaatccttgtaactgcgatacacgctgcccgaatcagtttctcccgtcaaactgtctatcaatttgtattgatagacgcaactgtctgccgactgaaactgtcccaacatttcttcctgcagttcgatgtacgcagctacccgctctcggatatcccaagcgtcgtcccaaggacaactcggcacatacccgactatttcctgccatgcggcgattttttcattcagcgtggcagtcttgcagtaccagatcaagaacattttttcctctgtactgaatcggtattgaatttccaccaggtatcgccggatgtcggcggagtctataaatctgaaaatatccatagtctacccctcctgttc

SEQ ID NO: 1779 - DNA, 1163 bp, Unknown
  gut microbiota DNA sequence
caagcgctcgagagagacggcaaaaaactgaaagcgaaaagcttaaaaggaaagccgcttgaaagagagcacaggaccttgaaaattaaacaacgagagaaagaatggaacctgtaatttctttgagagactcaaagaaacttacgagaaacagaactcaacaaatctgtgacgaacgtcagaacgacgttatgagcgaattaaagctctgaaaaagatttgaacgcgaaagcgtttagatacaattttttagagagtttgatcctggctcaggacgaacgctggcggcgtgcctaacacatgcaagtcgaacggagttgaaaagagcttgcttttttcaactcagtggcggacgggtgagtaacgcgtgagtaacctgcctttcagagggggataacgttctgaaaagaacgctaataccgcataagattgtagcttcgcatggagcagcaatcaaaggagcaatccgctgaaagatggactcgcgtccgattagatagttggcggggtaacggcccaccaagtcgacgatcggtagccggactgagaggttgatcggccacattgggactgagacacggcccagactcctacgggaggcagcagtgagggatattgggcaatgggggaaaccctgacccagcaacgccgcgtgagggatgacggttttcggattgtaaacctctgtcctctgtgaagatagtgacggtagcagaggaggaagctccggctaactacgtgccagcagccgcggtaatacgtagggagcaagcgttgtccggatttactgggtgtaaagggtgcgtaggcggattggcaagtcagaagtgaaatccatgggcttaacccatgaactgcttttgaaactgttagtcttgagtgaagtagaggtaggcggaattcccggtgtagcggtgaaatgcgtagagatcgggaggaacaccagtggcgaaggcggcctactgggctttaactgacgctgaggcacgaaagtgtgggtagcaaacaggattagataccctggtagtccacactgtaaacgatgattactaggtgtggggggtctaaccccctccgtgccggagttaacacaataagtaatccacctggggagtacgaccgcaaggttgaaactcaaaggaattgacgggggcccgcacaag

SEQ ID NO: 1780 - DNA, 5357 bp, Unknown
  gut microbiota DNA sequence
ttcctgctggcggacaccaagcgcaagggcaaccagctgctggaatatctcatggatacggatgtgcgcttcatggatactgacagctatgatgatatctatgcggagatggatcgtgtcggcaaggccttcgccggtctggtgaagatggcccgcgagggacacaagcccaccgacaacgtgctgtacctctactccggcggtgccggcggtcagttcgccatcgacatcgagctggactgagtcgccttagcgggcgcaggcttttaaatccggttatcagttgtcatcaggcgggtatgcctttcccgcacacatagagcagcacccaaaaaaacgggaatgggaaagagtatggaaaaatcttgccgaagcgcttgccgatacggcgagcgtttttgcatttctgtggttgtaaagctgccgaaaatggtgtagtatgtaggcggatatttttataccaatccggaggtggactatgcagatgaccgtgccgcgcccgcgtgaacaggcgctggagcaaatcatggcgtatatattggagaataaactttccgctgacgataagcttccgccggagcgtgaaatgtgccagatgtgggggttaatcgctgcaccctgcgcagcgccattgccgccctgacggagcaggggattgtgtacgccgttcagggcagcgggacccgtattgcgcacagatttcgccgtatcctacaggatttgcagggattttcggaatacgccgccgattgcggcctgcggccggaaacgaggctgctgtccatgtcgcaggtggagtgcgacaagcagctttcccggcggctccatctggtgctgggagaaaatgcctatcgaatctcccgcctgcgcattctcaatggccagcccacccttatcgaaacggcctatattcccgccgcgctggcccccggcctggaggagcatgatctggtgaccggctccctcttttcggtgctgcgggaggggtacggcctggatctggatcacggcgaagagaaggccagcatcaccacagccgcagaggaggaggccgttcatctcggcatcgccgccggggatcctgtgttctggatcgtcagcatcacgcaaacgccggagggcgttcctgtggaatattgccgcaccgtggcaagagcggacaaggtggagctggtcagcgttctccaccgcggagaaagcgaggcatccgatcatgcgtgaaatcagctataaatccccactttatatccagctgcgcgaggtgatccgcagtaagatcgaagaagaagaatacttgcccggcacagccatcccctcggaaaatcagctgatggagacctatgggctcaaccgggtgtccgttcgcagtgcgctggcggcactggagtttgagggacttttgaaaagcgtgaagggaaaaggggtttttgtagcggggcccaaggccaagcggaatatggatacgctgggcggttttcacaacaccatgcgccagagcggcggaaacaccgccacacggattctcagcaagacgctgcgtcaggcagaccctattatgcccgcctgctggagatttcccccgagagcaccatctggtttattcgccgggtagaaaatacggcgggcgagccggtggcgctggaggagctttacattccctacagtgtggtgcccggtctggaggaggtggatataaagctgttctccatctatgacatctatcagtggaacggcatcgtgctgggagagggacatcagacgctgcgcatcacccggctgccgcctatgctggccaagcacatggacgtgccgccggagcaggcggtaatggagttttcatgcaccacccgggatcggggcggccgggtggtggagttttcccgcagctatgtgcgcaacgataaggcggagtttgtcgtccacttccgtcacacaaatccataattggtataacttttaatattacaactatcaatacaggcggataaaatgcgttatccgcctgtattttttaccatttgttgttattttaaccaaaactgccgggactgattttagccgaaacatagaattcacgttttttgccgcaaaaaccgattatcatcttgtaattggtataagttgatactatacttatcacatcagggcaacacaacgaaaaaagattgagaggtaggccacttgtccgattccatcgtatcgctgcgccatgtggaaaaatggtatggcaacaaccacgtggtaaaagacatgaatcttgaaattcatgaaggcgaatttctgacattactggggccgtccggctgcggaaaaaccgtaacgctcccgcctttaatttcgattacaagaccaatgtcttcttccagaaggacgtgggcgacgcgctgaccatctacgataaatactatcagatgctgaaggtgggttaacccatcgctgcaaaaatggagggatatccttggttaagtttgatgaacaaaaacaaatcgacagcgtaaacggtgctttggcattgcggccgcaaatcgaagagctgatcgaccgtctgctggcagagggcgtgaaaaatctctgctggctgggcatcggcggcacatgggccagctgtatgcaggtggtatgctatctcaaggagcacaccgacatggataccttcgccaccaacgccgcagagtattgcaccacaggcgataagcgtgtgggcgcgggaacccttgtggttctctcctctgtgaccggcaccaccacggagatcgtggatgcggttcgtctggcccagagccacggcgcaaaggtgctggggttcattgacaagccggatgctgagctggccactctggtggattactgcatcagctacaaaggcaatgaacagctgaagttctttatggtggcggactgcttcctgcgccgtcagggcaacttccccgactatgacgcctattatgcccagatggacgcctatctggccaaggatctggtggagatcgagaagattgccgatccctttgcggaggactttgcccgcaagcatctggaggacaatctccactacttcgtgggcgccggctgcctgtatggcgccacctattcctacgccatgtgctactgggaagaaatgcactggattcggacgaagtccatccacagtgccgagttcttccacggtatgctggaaatcgtggacaaggatacgccggtcacggtctttgtgggcgaggatgcccagcggcccctgggcctgcgtgtggcgaagttcctgccgcggatttgcgagaacttcaccattatcgacacccatgattatccgctggagggtatcgatgagaagtaccgcggacggatgtgctatgccattatgcacgcggtaaccaatcgcatcgacgcccatgtggaagccatcagcggccacgacatggccattcgtcggtactaccggaagttagcgtattaagtgaaaaagggcgggttcccccgcccttttttcaaaggtttgcttatgaaatttgggatgtttaccagcggttatcagcgtctgccgctggaaaaatgctttacagacgctgcgcaactggggtatgattacatagagctttggggcggctatccccacgcctttgccccggatgtgatagaggactatcgggagatccgccgcttgcaagagcattacggcattcccgtgcctatctatacgccggagcacaatgcctatccctataactatatgctggggacggaaaagcagtggcgcaattgtatggcgtatctggaggtgtctgtccgtgccgccgggctgatcggcgccgggcagatgctgatttccgtgggacacggcggcgagtgcccggcggaattgcgccgcgcacggctgcgccgctctgtggagcatcttgcccgcgctgccgaacgggagcatgttgtccttctgctggaaacgctgtcccctctggagagcaacacctgcacacgacttcatgagctcaaggagctgctggaggcggtggactcgccgtggctgatggggatgtgcgatgtggtgccgccggtattgcagggcgaggacccggtggactattgccgccatctgggaagcagaatggcccatttgcatctggtggactgcgatggcgtgacggaaacccatctgatccccggagacggtgtattgaacctgaaacagattgtcagcgacttccggcaggcgggctatgacggccgcgccacgctggagctggtgactcactatatggacgatcctaccggcgccgcaggactggcgctgcaaagagcaaaggagttattatgataaaaattgcgtgtgcaggcgacaactgcgtggattattatgacaacaccggcgagagcttccccggcggaaatccggtcaatgtttcggtgtatgtaaagcgtctgggcggccagtccgcctatctgggcgcggtgggtacggatgattttggaaaacagatgtgcgccgcgctgcaagagaagggcgtagacgtcagccatgtgcagattctgcccggcaaaactgccttcacccatgtagagcgcatcaatggtgagcgggtattcggcgattatgatgagggcgtcatggcggatttcagactccggcaggcggatttcgacttcctcaagggatacaatctgctggtcaccggactgtgggggcatacggaaagtcaactggccgacgttcgcgccatggggatccccgtggcctttgatggggccgaacgcccgctggatgaggcgggcaggaccgcgctgccccatgtgaacgtggcgtttttctcagatgacgcctccgatgaggaaagcctcaaggcgcggattctggagatagcggcgctgggcccccagatcgtggtggccacccgaggcggaaaagggagccttgcctatgacggcgaaagcttctatccgggccagatcgttccgtgctccgtggtggataccatgggcgcgggggacagctttattgccggattcctgatggcgtggctgaaaaaggagtcgatcccggcctgcatgcgtgccggagcggaaaatgcagccgtaacgctgggctatcccggcgcgtggtgataatagctgaagtctttgcaggagctgctggccattgaatcggtagcccggcgggatcaggaaaagcccttcggaaacggcgtggcccaagcgcttgattacacgctttccctttgccaacgtatgggctttcatacaaagaacgccgacgggctgtacggctatgcggaaatcggcgagggtgcggagatcatcggctgccttggccatctggacgtggtccccgcgggagatggctggcattatccgccttatgccggaac

SEQ ID NO: 1781 - DNA, 1729 bp, Unknown
  gut microbiota DNA sequence
cgtcggaatgtcgcggccgtgcgccgccatgatcgtatcgtagcgccagtagtcaatgttgaacgagcagcaggcaacgtccacgactgccagcattttttcctggatgccgagttcctcggagacctcgccgatcaggcgcgtggccaggccgtggccgcagccggggcagaagccggcggaggaaaagacagtttcgggagctttgagtttcatttatttctcctccttttccagcatggccttggcctgcgcgacgatctcttccggttccggcagaccaaagaacgtgccatagaagccgaccggatatttgttttccacagccagcttgacatcgtcgaccatctggccgaggatgttgatctcgaccgtcatgaacgccttggcgttcttgcaggtctcgaatgccttgaccgggtacggccagagcgtgatcgggcggatcaggccgagcttgaagccctcggcgcgcgccatgttcaccgcttccttcgagatgcgggagctgatgccgtaggccacgagcaccacatcggcgtcctccgcctgataggactcccagcgctgctcggtctgctccatctgcgcatacttgctgcgcaggaactcgggatactgcgggttggtgtagtagacgttctgcaccttgcggggcgcggcgcccgccttgcagccgcggatcgcccagtcaaactggtcaatgtcgtgctcgacgaagtccttgagctcgacgccctcgaccatctggccgatggcggcgtcggacgcgaccagcacggggtggcggtacttctccgccagctcgaaggcggtggacatcatgtcgcagttttcctgcacggaggccggcgccagcacgatcgtgcggtagtcgccgtggccgccgccgcgggtcatctgccagtagtcgccctgtccctgcgcgatgtcgccgagaccggtgccgatgcgcatgacgttgatgatgaccgccggaagatccgccgcgaccagataggagatgccctcctgattcagcgagaagccggggcctgcggagctggtcagcgcgcgcgcgccggcagccgccgcgccgaggagcatgttgatgcccgcgagctcggactcggtctgcacgaacgtgccgccgacttcatccatgcgcttggccagatactcgaggatctcggtctgcggcgtgatgggatagccgctgtaaaaccggcagccggcgcgcagcgccgcttctgccagggcctcattgcccttcatcagttgtttgctcatgtttgtacctcttattccagaatctcaaagacactgtcggggcacacgcggtagcacgtgccgcaggcgacgcacagggagtcgtcgacctgaacggtgtcatagcccttgtcattgatgtgtccggagaacgacagcgccttgcgcggacagtcattcacgcagtaaccacagcctttgcagcggactgtgttgatcttgatcttgctcatgtggataagcctccttgtaatatgcgcggatcacgcagcctgctcggctgctttgcgctttgcgaccttcttcgactgggcaactgccagcagagccgcaacgacgccgagaactgcagtcccaactccgtaaagcagaatcttgtcataaccggctgcaccgttctggtcgatccagttgccaaacatggtgtgcacaaacatatccggcaggtagccgatgagggtcgcgattgcgacggccgtcg

SEQ ID NO: 1782 - DNA, 5487 bp, Unknown
  gut microbiota DNA sequence
gctgtttacagatcactgaacaggtcagccttgtacacaccgttctccaacatcttcttgaagctgtcctttacggctgcgacatcctcgtgataggtcataccgtaccaggtgtcgttggtcttcagaacctttacggacattttaccctgctccagcagttcaccgatgaagatagggatcaaatactctgctttcagaggattgcccggcacttctttctcgaagaactctttgaatcctttctccagtacatccagaaactccggagtcaagccccacatattcatagaaaccagagaattcacatcaacagctacaccgtctgcctctgctccagttgcggtctttacaatattcttggtctccacaacctctgtcaagttgccattctcgtccatcttgcaaacaccacgggttacaccgccattatcggacagagtattcttcagcacgaagccagccatacaggactttccgccattcaccagatactcatggacagccttaaaaccctccttgccgtagtaatcatctgcattgatcacaatgaacggtgtatcaagaaccttctttgcagcaagcacagcctgacctgttccccaaggttttgtacgaccttccggcaaagttcccgggatatcgttaatattctggaaagcatagtcaacagttacaccatgagaagcgcaaatagaagcaatgcggtctccgatgacttctttgaactccttctcgatatccttgcggatgataaataccacatgattgaagcctgcttcgattgcatcatggatggaatagtccatgatgatatgtccagcatcatccaccggctccaactgcttaattcccgttccgaagcggctaccgataccagcagccatgataagtaatgttgttttcatattttttcttcctcttttctttatgttccaatatataaaacgtaaatatctcacctgataaatgtcattaggttatctcgaatttttctaggaaaattagatttgattttccttagaagactcacaattatcaagctaattacaaaaaccactgcaacaaccactaatgagcacagtgtattttcctgaagttccgcaatagtaacattcatgcctacacgttgcgtccccatttcagcaatttttaatacaattcttttaattggctcatgtactgctaaaattgtaatcgtattctgaccgaggaactgtaggaatgtattccgtgtaacgaaccacttacatacaaatcctagccatatggagccgataattccgcctagcataaataataaataattttccccatatgaattactccacatcgacacccctggattcaaatatcctattgctacagaaagcaaaaaaagtaggcttgtcaaaaatatcttctgcttagatgctaatgatatcattcttatatcttgctcaacgattccgcacacatatccgaggatgtaccacattaaaccatttaaaaatcgtaaaaaccacgatgacaaaaagcttgctggcagcaccaactttagagcaaaccataaaacagaaacaaaacaacatacgaaaacgatccaaaaagaattactttttttattgtaaaaaatcggatacgccacaagttccgcaagatatagtataataagaaaccatatcggtcccatatcaaaatctctaaaatgagattcaattacaatccagtatataaacagtaataatctaaacagaataaacggccaaagaattgatttagttcgcttcagcaaaaatttccgaaatggaatatactttccaaatttgtataatatgtaacctgataatgcaaaaaacagtggcatatggaatgtataaagccattgaactagaaaaccttttgtgttcacatgaccaatgaccactagtatgattcctataccttttagtacatcaatccagtctgctctgctctgctctgctctgctctgctctgctctgctctgctctcaagagtattctctcctttgtacatcttgtcaatcccttttaaatttcttttcaactttatttattgcttgtcttatcgtctgttctcgaaatactaacagcgcacaaacataaataacagcacctattattccgccaccaaaacacctacaaagatcattgagcgaatcaaaaaatggcatgattccctcaattcctgcgcacatacaagtcattgccaaaaatgccttcataaatgttctaattgcttttctatacttaaatccatccatctttttgcacatctgaattaaaagcagtattgtacagaccgttgctgaaacggatgttgctagagctaaccccagatattcaaatttctttactaataagatattcaacccaatatttacagcaactgcaatcgttccattaatcattggtgtctttgtgtccttcatagaatagaaaactttattcaggacatctctaaaagacgctcccacaatacctaatgcgtaaatttttaaggcacggcttacaaataagactgtattttcattgaatgctccacgtccaaataaaatttgtacaatctctttagaaaacacaaaaatcaacgcggctaatggaagtactaataatgacaccacattaatataagttagggtaaaggaatttttttctgccttgttatttcttgcgaacaactcagtcattttaggatacaggatcgttgtcaagcttaaaataacgacttgcgtaatcatatttgcaacttcacttgaatagttcagtgcagagacacttccctctaccaaaccagaagccattgaacgatccacaattgagttaagttgatttacacccgtgctgataaataccggacccaccagtattaacatttgcctgatattcgtatctcgaagatctaaaacacgttgatgcctgaaatcagtttttttctttataagtacccttaaataaacaaattgtccaaaggatgctagaagtagaccaactgcaagaatatatgcgtttcctacatagaatccgattgcaataaaagcaatttgaatcaaattgtaaggaacattcatcaaagagttttgattgaaatagccctcaatttgcaaatacgcattatatacatataccaaaataatggcaatacatgtaggcataataatctttgcaaattgattgcataggataaaagtctctccctgaaatccgcctgcaaataacttcacaagctgctttgaaaaaagaacccctaaaatcgttaaaaaaacagatagaaaacaaaagatattaaacacattgtttgcgaatctatctgccagccctttgtttttcttgacttttatttcagtgtacagaggtataaaacctgttgtaaccgctgtaccaaacactgtaaatataattgcggggatattttgaactgcaacaaaaacatccgatacatagctagtcccatagtaattagccaaaaccatttctcgaacaaagcccaatccttttgctatgaacgcagcaagaatcaactcaactacctttattgcaatgctcttatcccttttttttgccattaattgaaacctctctttaccgccagattagctttctttctaaggtaaaaggccaatttgccgactgttattttctttcgatagaaccaggctacttttgcatagaagttcaacgtactacatgtgccatgtttttttataaacttataatttagtttatttttctcaatttctttaacgacatctggatatatcgcataaatgatatcttttgaatatgtttttgctttaaaataaattggtcttgagaaaagatgtatatacatatattcttctctcttcacatttgtcccatctaaataatttctaataatcttgccattttcccaagtaaatacctgtctgttattcttatatccatcttcctccggcaaatacaacaaataaaagctcgttgtaaatctatccaggtgagcaaaattggtttctttataatacggtatttccagtgcatcgtatatttcgcaaataccaacctcatcaaaaaattttccatcaccggatgtgaatacatccttataattcggagcattctctacttgatttcgatatcgttggttaacctccggtgtatttcggtaaatcacagaatgtccttgaaatccaattttatcgtatttttcaagtatctcatcagttatgaatgctcttatatctccaaaaatcaggtccatatcgcaatggccccagtagtcatatgtttttaattcatcactaaatatttctccatatgcagggcgaaaatcacacaatttccatggtttactaattactataggaaaatcaaaattattctgtattctttcttttatactgtcataggtgcagtaatgtacttttacattattagggtagttatactctgtcctatcatcagtaagtaaaatccaatcaatcgtttcatttgctgcacatgaaagcagccacatcttaaacccaaccggaagttttccgaaatacggaaccaaataagctattgatttcatctattcaatcctttcttaactgccaacacatatccaatcggatatccacaagtgacaagcacctttctatatattccatcaattgaagaaattgcttccttatatttccggccaattctaatattatctcggctatatccaatatatgctttgacaaacgctttgggatatttccaaaaatagtccattgcctcattgatataaaagcgccataaatagattgtttctcttgcacgtcccgtactttgtttaatcacagaattttcttgatcgtgataataggctcttatgttctcatcaatataacgagttttgtactttcgtgccattctccaccagacaaccgattctgggtagaacttgagtttttcatttggttctggaaatggaagttccttcattacatcggtgcgaacaatattccatttttcaaaacaaagtctcagtacaaaataagcatccaggtcattactgtcaaacatatgctgcggataagatccaatcggtgttccatcttcagcattatagcattttgcaataacgcccttatattgatttctttccccttcaggtattgattcccatgtattgataaaaacctctagtgcatttgccttgaaagaatcatctgaatctgcaattaaaaacagctccgatgtagtttcctgcagtgccctgtttattgccgaatgttttcctgcattttcttggtaaatatatataattttgaaatctgcttctttttcaaattctaccacaagacttttagtatcatctgttgacccatcatctacaatgatccaaataaaatcccggaatgtctgtctcttcaagctttcaaatacacgaggtaaagattttcttctgttatatgtcggtgtaaagaccgttcttcgctccattttctcctccatcactttcagcatttctcgtcgt

SEQ ID NO: 1783 - DNA, 595 bp, Unknown
  gut microbiota DNA sequence
gatcgatttttgcatcctgaccgaccgcctttatgaaagctacccctatcacaatgtggtgttcgtcggcatggacacagacggaaaaccccgctatgctaatcagcgagggatcggctcggacttcatcggggacgccaacggcagcgacaagcattattcctttgggattcctgcggcggtcgcaagcgacacgctccacctatttgaatcggcggtggatctgctgtcctacgggacgctgcaaaagctggacggcaagggctggcgcagcgaaaatctgctctccctcgccggggtctacaagccaagggcgaaaatcgaggaaagcagtttgcccgccgcattggtgcggtatcttgccgagcatccccatatccgccgtgtggtgctccggcttgacaacgacgccacgggacggatcgccgcaggaaccatcaagaccctgctgccgagaaaatatgcggtcacggtggacatccagccgcccctgcagggcaaggattacaacgactgcctttgtatgcggctggggttgcccattaccaagcgcggagaaaggaacaaagaacgataaacgatttaatttttcaac

SEQ ID NO: 1784 - DNA, 26318 bp, Unknown
  gut microbiota DNA sequence
atccatacagccgggcttcctaaaactttcttgaagaaagtttaatcaaagactttgttcgtcgctttgccgacagatggagaatgtgtttttctttttctacaaacagtttctcagataattgtgaaattctgttgaataaccggcaaaaaaatgctaaaatattcttttagaaatgaaacgaatttacatagaacacggttgccgcgcagtagttggggttgcgcggaaaatcgggtttttgatttaaagggtgaagcaaaatgatcttgcgaaaatgggaggtgcgtcctctcgataaggaacgcgcggcggcgtttgcacagacgtatggcgtgccgttcttcctcgcgatgctgatgaatattcgcggtcttgacgatgccgcgcatctgcgggaatttcttggcgagggcgagccgctctccgacccgtttcttttaaaagatatggacaaagctgcggcgcgtattacccgcgcggtggacaacatggaaaaaatcgcggtttacggggattacgatgccgacggcgtgacttcgaccgccatgctgtattcgtaccttgaaacgcgtggtgcggacgtaatcttctacataccgcagcgcgagggcgaaggctacggcatgaacatcggcgccgtggaatacttaaaagagcaaggtgtgtcgctcattgtcacggtcgacaacggcatttcctccgtgcaggaggtagcgcgcgcgaacgagcttggcattgatgtggtcgtcaccgatcatcaccgcccgcaggagatattgcccgatgccgtggcggtcgtggacgcataccgaccggatgacacaagcccctataagcatttttccggtgtaggcatcgcgtttaaattgcttatggcgctggaggacggcgcgggcgacgtggaagatctgttagaagcatacagcgatctcgcggccatcggcaccatcggcgatattgtgccgctgacgggcgaaaaccgcacgctgatccgcgcgggtcttgagcgtctttcacagagcgaccgcccgggtgtgcaggcacttttggaaaacgcaggcattacaggcaaggcactgacgagcacgaatgtggcgtttacgctggtgccgcgcatcaacgcgacgggccgtatgggcgcgccggaacgcgccgtgcgcttgctcatcagcggctatgaagaggaagccaaggtactgagtgaggaaatctgcgccgataacgaggaacgccgccgtgtggaagcagagattgccgaagcggcgtttgcggatatcgaagcgaaaggatacatgaaagaccgcgtggtcgtggtggacggtgaaaactggcaccatggtgttatcggcattgtggcgtcccgtgtgacggagcgctgcggcaagccgtgcatgatcatttcgcgcggcgaaacagaggcgaagggcagcggcagaagcattgagggtttctcgttgtttgaagccatctgcgcgtgcggcgacttgctcatcaaattcggcggacatcccatggcggcgggtatcacgttgaagcccgaaaacatcgaagcgttccgcaagcgcatcaatcagtatgcggcggagcacttcccgcagatgcccacgcagacggtcacactggactgcaagctgaacccggcggcgctttcggtttccatggcgcaaagcctgacgcagttggagccgtttggaaacggcaacccacagccggtgttcggcttattcaacatggagctttccaatgtcacaccggtcggcggcggggggcatctgcgcctgaccttagaaaagaacggcgcggtcatcacggcgatgcgttttaatacaaagcctgaggagctgccgtaccacatcggcgataagatcgaccttgcggtgcagctggaggcgcgcgaatttcgcggccagccgtcgttgaccgtcatcgtgcgcgatatgaagtttgcggcgttcaatacggaaaagaatatagcgtcgcttgcgagctttgaaaagtggcagcgcggcgaggtgctttccgtggaggataaaaacagattataccccgaccgcgcgtgcttagcagccatttaccgcgcactgcgcacggtgaacggtaaagagacggaccaggttcggtttgtttcgcagtttggaaaagatatgacactgggactctttaaaacggcgcttcttgtatttgaggagcgcggcttggtacacagcgaaattgcagacgacacatttacggcagcgctcatcgaaacgagcggcaaaacagatattacacgttccccggtgcttttggcactgcaataagggaacggaaggagtgaaaaacgatggcagaagcagcaaaaacgtatgcggaccttgtgtcactgatcgaaaaaagcgaaaaagaatatgacctcgcgttgatcgaaaaagcgtataagttcgcggaggcagcgcatcagggacaggtgcggcgctccggcgagccgtacatcatccaccccattgcggtggcgtataagcttgtggaattcggcatggataccccgtccgtcgtggcaggtctgctgcatgacgtcattgaggacacgccggtcacgtatgacgacattgtgaaagcgttcggtaaggagattgcaaacctgacggacggcgtgacaaagctcggcaagatcccgttctcctcccgtgaagagcagcaggcggaaaacctgcgcaaaatgctcattgcgatgagcgaggatatccgcgtaatcattattaaatttgcggaccgtatgcacaatttagcgacgctcgaatacgtagcgccgcagaagcagcgcgacaaggcgctggaatgtcttgaggtgtacgcacccattgcgcaccgtctcggtatgcgcaaggttaaggaatacatggaggacgtttctttaaagtaccttgaccctgtggcgtataaggagattgaagacaaccttgaggcgcgcagcacaaagcgcaagcagtttattgagacaacgaaagaaatgatccgcagtcgtgtggagccgcttatcccgggcgtatatattgaagggcgcgtaaaaagcgtcaacggcatttatcgcaagatgttcattcagggtaagagctttgacgaaatttacgacgtgttcgccctgcgcgtaatcgtcgataccatcaacgattgctataatgtgctcggtatcatccatgatatgttcaccccgctgccgaaccgctttaaggactacatttctacgccgaagcagaacatgtaccagtccttgcacacgacggtcatcagcaaagagggcatcccgttcgaggtgcagattcgcacgtgggaaatgcaccacacggcagaatacggcatcgcggcgcactggaagtataagctcggcatgacgagcggcaacgaaaagcccgactcgctggagggccgcttgcagtggatccgcaacatgctcgataaccagtccgaaagtgaagatatcactgaccttgtgcgctccatcaagaccgatcttgcgccggaagaggtgttcgtcttcaccccgaaaggcgacgttatcaacctgccgatgggctctacggttatcgattttgcgtatgccattcattccgccgtcggcaaccgcatgatcggtgcaaaggttgaccagaagatcgtgccgctcgattacaaggtaaaaacgggtgagatcattgagattttgacaacgaaggaggtcggccgcggcccgaaccgcgactggctttccatcgtgcgtacaagcgaagcacgcaataagatccgcgcgtggttcaagaaagaaaagcgcgatgagaacatcgtagagggcaaggcggagttggagcgcgaatttaagcgcaacggcatcgtgatgagcgacgagctgatgcagttcatgctggaaagcgccggccgccgtcacagctgcgtcacgcccgatgatttttacgcggccatcggctacggcggcattcagctttggaagctcctgccgcgcgtaaaagaggaataccaaaagacccacaagcctgcacccgaaccgcagcaggagattgcgcagcagaccccgccgccgaacctcaacaagaaagcggcaggcggcgtgctcgtagagggtatggacaactgtctcattaagttctcccgctgctgcaacccgctgccgggcgatgagattgtcggcttcatcacgcgcggtttcggtgtttccatccacaaacgcagctgctcgaacgtgccgaaggatttctcgcaggcgccggagccggagcgctgggtgcgtgcgcactgggcgggtgaagtcaaggaagagttcaagtctacgctgcatattgtggcaaccgaccgttccggcctgctcgcagacgtgacccagcagcttttcaacatgcacattttcattcactcgctcaactcccgcgaggtcaaaaattcggagaatgccgtcatttcggcaacgattaccatcaacggcctttcgcacctgcagaccgttattgaccgcttgcagaagattaagggtgtaatctctattgaccgcagctaaaggtaaacaaagatatgaaatataaatgtataacgggcgggcctatttcggaaaattgctacctgctcatcgacgaaaaaacgaatcaggcggcggtcgttgaccccggctttttgaacgacgtactgttaaatgaaattaaaaaatatgcggtgcagagaattttgctgacacacggccattttgaccacatttgggaggctgaccgcctgcacgagatgctcggtgtgccggtgtgcgcctatgagacggaagcggcgtttgcagcggacgataagcaaaacggctcgcttctcatgatgtacgaatccatcacctgcaaggtgcacgaggctttcaaagacggtgaaacatttcagatcggcgaagtgccggtcacggtgctgcacacgcccggccacaccgcgggcggcgtgagctacattacgccggacgccgtgtttacgggcgatacgctgatgggctactccgtcgggcggtgcgacctgccaaccggcaacagtgccgagctgcgcgagtctctgaaaaagcttgcggcgctgcccggaaatcccgatatctgcggcggccacggccccgtgacgacgctggaagacgaaaagcgccgaaatccgtatttataaaggaaaatgtatggttttatatattatcgatcacccttatcactatgaggcggaaaacctctgccgtgtgttttacccgtttgacaaagtcacggtacagcacgaatttatgccgagcgatgaaaaccgcacggtgtacaccgccgaagaaaacggcgaatatatcgtgcgcattgaagacgcagacggcaaaacggagcgcaaagcaaaagtaggcgcagagaccgaatacggcatggtgtctttattatttgatgcattttgcgcccacacgggcaaaatgccgcgctggggcatgctgacgggcattcaccccattaagcttctgcgccagctgaccgaacagcacggcgaagcggaagcggcaaggctgttccgtgaaaaatatttcgtctcaaacgaaaaaacggcacttgcggtgcgcaccctgcgcgcacaaaagcccattacggataaagtgcgtgaaaacgactactctttgtacatttccgtgccgttctgccccacgcgctgcgcgtactgctcattcgtttcacagagcgtggaaaaggccaagaaacagatcccggaatatcaccgcctgcttttggaagagctgaaagagacggcgaaagtcgccgatgctttgggcttaaacctgcgcgctgtgtatgtcgggggcggcacacccacgacgttctccgcagagcagctttccgagatgatccgcgttgtgaaagagtcgttcgacatgtcgcagtgcgaggaacttacggtagaggccggccgcccggataccattgaccgtgcaaagctggatgcgctgcttaaaagcggcgtttcgcgtatcagcatcaacccgcaaaccttgcaggacaacgtgctcgaaaacatcggccgccgccacacggcgcagcagactgtggatgcgtttcacctcgcgcgggaagcgggctttacgaatatcaatatggacctcattgtcggcttgccgggcgacacgtatgagacgttctgtgacacaatcgaaaaggtcattgcgcttgaccctgagaacgtgacggtgcattcgctcgcattgaagcgctcttcgttcatcacgcagagcggcgagatcaacaaggcccacgccgatgccgcgcttgccgaccgcatgatggcttatgccgaaaagcggctgacagagcgggggcttgagccgtattatctctatcgccaaagccgcatggcgggcaatttggagaatacgggctgggcaaagccgggcaccgagtgtgcatataatattttcacgatggatgagaccgaaacggtgctggcgtgcggcgcaggcggcgtgacgaagcttaagaacccgtattccgaagatctttcacgcatttttaacttcaaatattcgtatgaatatatcagccgttacccggagattctcgaacgaaaggagggtatcgcgaagcaatatgagcaatttcgcaagcggttacattaaatatatcaatcacttagagcagattaacgacgcggcgcttttgaacccgcaggtcatgatcgatgaggtggaggattcctatcacgagcacatcgaaaacattgcgcgcaacattgtgacgcattacaaaaccgcgaaggtgtgcatgctggcggggccgtcctccagcggcaagacgaccacggcgcatttattgcagcgcgagctcggcaagctcggtgtgcacgccgagattgtctcgcttgacgatttttaccttggcccgaacgaaacgcccgtgctgccgaacggcgaaaaggactatgagaccgtggacgcgctcgacattgcgcttattcaggattgtttgaattccgtcattcacagcggctcctgccttttgccggagtacgattttacaacgaagacccgaacattggcggcaagaaagctcgatgtcagcgaccgcgggttcgttatcatggagggtctgcacgcgctgaaccccatttttacgcgtgatctgccggagggcagcactataaagctgtatgtcagcgtaaagcagcagatcaaggacatcaacggcgaggtcatttcgccgatggatattcgccttgtgcgccgcatctcgcgtgatatccgttcccgcgataccatgccggagcgcaccatcgccatgtgggataatgtggtggcgggcgaagataaatacatccgcccgtaccgcctttccgcggactacacggtgaactccattcatatctatgaaccgtgtgtgctgcgcaggcttgtcattccgcttctgcgcgaaatcccggaggataacccgtgctaccgcaaggcgcgcgatttagatgcccgtctgatgcgctttgagcccattgatgccgagctggtgcctgcaaactccatgctgcgtgaatttttgggtccgaaagttgaaaacggtacgaattaaggttattgtcaggaaaaatttaacctttgtttacaaaattgccggtttgtcatttgctttttgacacaaattgcgctataatgggactaaagaaaggtacatgaaacggtgtgcttcttaaggttccgtttccaaaccacaaaaggagaatttgttatgggaatttttgatgatgttgttgtcaacgcaaaatccgctgcacagaccgtaggcaaaatggcaggccagtttgtggatatgtccaagctgcgcatcaatatgtccgagctgaacggcgagattacgaagcgctatcaggagcttggccgcttcatttacgaggccaagaaggccggttccgcagacgaagccgagcttgcagaccagatcgccggtatcgatgatctgtatgcacagctttccgcggtttccgcacagtacgcttccatgcagaataaagtgacttgcccggcatgcggcaagcaaatgccgacggattccatgttctgcagccactgcggcgcaaagctggagaacgcaccggcagagccggaagaagctgccgaagcagtcgagaaggccgaagtccccgcagagccggagacgacggaagtcacaatcgagacagaggagacagctgagccgacagaggaagtcaagaccgaggagtaattgaaaacgcgggcccggcctgcaaggacgtaaaaccagaaggaaagaggtgccccctctttccttttctttcgccgagaaacttttttgaaacggaagggttttatggagcaaaaacggcccgcggcgcgcgtacagcagggatttctgcatggtgcgttcattttaatgttcggcgttcttctggtgaaggccattggggcgttgtttaaaatcccgttatcgagtatcatcacggaagacggtatgggatatttcagcacggcgtacagtttttttaacgtgctgttcagcctttccaccgtcggttttcccgtggcagtggcgcggctgactgcggcggaggacgccttaggacattttcgtgacgtgcggcaaatcaaagcggcggcgctgccggtgttttcggtcatcggcgttctctgtgctttgctgatggcaagttttgcaccgctttatacgcgcttggtgcaaagctccggcgcacttttctccatgttggcgcttgcgccgtgtgccgcgctgtgtagtatttcctccgtgtaccgcggttattttgagggcctgcgcaatatgctgcctacggcgcgttcgcaggttgcggaatcgctcggcaagcttattttcgggctttccggcgcgatttttgtgatgcatatgggcatacgggagctgcaagcgagcggcacggtattcggctgtaccgtgaaaagtgaagcagacggctgtcagcttgtctgcgctttaggtgctgctgccgcaatcctcggcgtgacgctcggcgcggtgctggggcttttgacgcttgtcttccaaagtcgcagggacggcgtcacaaaagcgatgctgcaacgcgcgccgaagccgaaaagcaagcgtatttgggccggaaaattgctgcgcactgcactgcccatttcgcttggggcagtcgccatgagcttttccggactcattgatgcgtcatttttgcagacgcgtgtcgcctatgccgtgcagacagaccccgcagcgttgctttccatgtacgccggcgcgatccccaaagggaatctcgccgcgccggaaaccgtgccgaactaccttttcggctgctacaatatggcgctgaccctctttttgctcgtgccaagcgtaacgcagtcgttcggggtcagcgcgctgccgagcgtgacacgggcattccagacgggggattcgcagaaactgaagcgcaccgtggaagcggtgctgcgtattacgtttttgacggcactgccgatgggggtgggactttccgttttggcgcagcccgccgcactgctgatctacggtgcacggccgggcacggtcatcgtggggcgcgtgctgacgaccttgggcgcggcgtccgtttttgcggcgctgtgcgggccgctgaacagcatcttgcaggcgatgggccatgtggagctgcccgtggtgctgacgctcattgggctatgcgtaaaagccgtgctcgattacacgctcgccgctgtgccgcgtgtgaacgtgcttggcggcgctgtcggcacgctcgtgtgctatgcgctcgcaagtgtgttggcgtgcattgcgatacggcgtattgcaggcgtgaaaatagatttcttttccacttttaaaaagtcgtttctggcatccgtttgctgtggcgtggcggctctcttaacacacaaagcttggtgtgcggtgctaccggaatcgcgtttttccgcgctgcctgcggtgtttttgggggcgcttatctatgttgttttcctgctgattgcacacgggatctgtgaagaagacatcaaagcactgccaaacggagaaaaaattacaaaaagacttgaaaaatacttgcaaaaagcagggggatagggtaaaatatgaaagctgcgttgaaatatgtaggaaaatcccgttatacactggaagatctcaaggagattatcacgattctgcgtgcgccggacggctgcccgtgggaccgcgagcaggatcacaagagcatccgccgcgattttcttgaggagtgctacgaagcgatagaagccatcgatacggaagaccccgtgctgctgcgcgaggagcttggggatgtgctttttcaggtggcgttccacagtgagctcgagcgtgaagccggtcggttcgaccttgacgatgttatcagcgacgttgctgccaaaatggtgcagcgtcacccgcatgtgtttgccgatgtgacggcggacacgaccgagcaggtgctgacaaactgggatcagattaagcgcgagacgaaaaaacagaagtccgaccgcgaggtgcttgaaagcgtaacgcccgccatgcccgctttgatgcgtacccagaaggtactgaaaaaggcggcgaaaatgggcgcggataacggcacgaccgatgacctgcgcgaaagcgtttgtaaagctgtaagcggtgcaaccgaagaaaacggcgcggaatcgattggcaaagcgcttttcaatttaacggagctcgcacgccgtctcggcgtagatgcagagcaggcgctgtctgaagcctgccgcgcctatattgagcagttcggcgcagaagaataaagcaattcacgctccggcgatggttcgcgccgcgggtgatgaagataaatctaaaaatttggaggttattcataatgaataaaacagaactcattgctgctgttgcagaaaaggctaccatttccaagaaagacgcggaaaacgctgtttccgctgttatcgcttccatcacagagtccctcgcaggcggcgagaaggttcagatcgcaggtttcggcacctttgaagttcgcgagagaggcgagcgcgttggccgtgacccgagaacgagcgctgagatcgtgatcccggcttccaaggctccggcattcaaggccggcaaggccctgaaggaatctgtcaataagtaattttggcaaataatttgtgatggaacggatcccgaagtgggtccgttcttctgttataggtagttttatgcctccatgtattaaagaaaaggagtttgaacatgagactggataaatacttgaaggtttcccgaattatcaagcgccgcaccgtggcaaacgaagcctgcgacgccggtcgagtcgtcgtcaacggcaagattgcccgcgcttcctacgatgtgaaggtgaacgatgtcatcgagctcacgctcggcgcgcgcaccgtgaaggcccgcgtcgtttccgtgaatgaatatgcaaaaaaagacgaagcggctatgatgtacgaaatcatcgaagaaaagtaagtttttttgactgtgcttttaacgtgctgagctgctcttgtgcataaatattcgctgcttgttcggtctttttccgaaaatcgctgcatataaataggcgatacagcataaaagaggatcggtgatacagtggcacagacggcaagcgcaaaagcacattctttgcacattgaaaaccgctcgcgtcttacggcaagcggcgttacgcgcgtggattttttcagcgagacgctcatcacggtgcagacggcagatggaaggttgcacattaagggcgaagggctgtacattgaaaacatgagcgccgaaacgggcgagttgctcgtaaagggtcgcgtgctggcgctttcgtacacagacggtgtgcgcccgacgggcgttttgaaaaggcttttaaaatgagcggcattccggcagaaacgctgttgctgtgccttgtgtgcggcgttcttctgggatttgtgtttgccgtgctggagtttttgcgcctgctgttctctctcggcaaaatcgcggcagcggttacggatgtgctgttttgtctttttgccgccgtcgtcacgtttttgctgtcccttgcggtcagcgtcgggcacgcgcgcttttttcagatcgcctgcgaagtcatcggctttttatgcgtgcaggtcacggtgacgcacggcatttgccgctttttgccgtatgcagagcgccgcttgcactgctttagaaaccgaatttttgcaaaatacgcgcaaggacggcggaaaaaggtggaagcattgctaaaaagcgggaaaaaacacaaatcatttctgaacaaatcgaaaaaaagcgaaaaaaggacttgaataatgacggcgcatcattatataatggaacaagaaaagcagccgaacgctcggcataaggaaaggggaggaatcccatggaagaagtcaagattaaacgctataagggcagcctccttttaaaggtcgccgtgttctgttttgcgtgcttcatggtcactatgctcgtcgggcagcagatctccatcagccagaaaaaggacgaactgcagcagttgaaaaacgagcttaaggaacagcaggtcgtcaatgacgagctgcgctatgacctgaatgaagagaacgcagacaacacagactatgcggagaaggtggcacgccgcgaactggactatgtaaagcccggcgagcgtgtgttctacaatgtaggcggcaacaactaacaaatttgaaatcccggaggaaaattagagggtatgcaggaaacaaagcttgaggtcggagcaatttttgagggcaaggtaacgggcatcacaaagttcggcgcattcgtcgatctcggtaacggcaagaccggtatggtgcacatttcagaggttgccccggtcttcgtaaaggagattcgcgatttcgtcacggaaggccagaccgtgaaggtcaagatcatcggcatcaatgaagacggcaagatcagcctttccatgaaaaaggcagacgaaaacgcgcagcagcagcgccccccgcgccgccgcgatgagaacggcagacccccgcgccagaacaactatcaccgccgcgaagcttctgcctcggtgcagagccccgcaagaccgggcgattatgagtggcgcgcgcgcgaaaactccggctcttttgaagatatgatgtcccgctttaagcagatgagcgatgagaagatctcggacctcaagcgtgcggaaaataagcgcggcggcggttattcccgcaagggcccgcgtaacaactaaagtaaagcagaaacggcgctgttcttcggaacggcgctttttgttttatgagaaatttaaatcgcaaacaaattgtttataaatcttgaaaattttatttttctattgcaatttttgttcaaatgctttatactgtaggtacagagaacggcagaagccgtaagctgaataatgaaagccgagtctttcagaaaggatgtgttttttccgtagatgaaaaaagcacatccctttgtgctttttgcgggaaaaaccggtagacgtatgaacatcaagatcgttggcagaaaagtgaacctgagagagaattttaaggaactggtgcagcgcaagctctctaagtttgaccgcatctttgatgaagacgcggatgctaccgtaaccgtaacgctggaaaagaatcgccagaccgtggagattatgattaagcagcgcggcatgctgtaccgtgcagaagccactgcgccggaaatgaacgaagcgttggatgatgttgtggcggcactgggcaaccagatccgtagaaataaaaagcgccttgagcgcgcacagaagatgcagcctgtggagctgccggatacgtactacgatacgccggacgaggaagacgagccggaaatcgcaaagcgcaagacgttctatgtgaaggtcatgacggtggaagaagccattttgcagatggaaatgctgggccacacgttcttcatgtaccgtgacggcgacaccggcgagattgatgtggtgtataagcgccgcgacggcaagtacggcgtgctggagccggaaggctgattgaaaccaaaatagaaatttaatttgtcgattattggcggcgcctcgcttgaggcgtcgctttttttcattttttaacggaatttgcgatatttgtatatatacaatatcccgaaaatgcttgagaaatcgggtgcaaaatgctataatgcccgtgaaattcgcagacaggcatttaaaacgttacggtatataaaaaataaagtgtttcggaggtctatatggaggagacgcgaaaagaaaagcaagcggtgtcggagcccatcgacatcaccacgcttttgcacgatgtgctgcgcggtgtgaaaaagctgtggtgggcgtgccttttgctcacggtactgtgcgccgcgggctcgtggtacacggcaaagcgcgcgtatcgcccgctgtaccgcgcggcggcttcgttcacggtcgccaccggcagcggggaaagcggcgggttcagctatgggttttattacaacaccgccacggcttcgcagctcgcgcgcacgttcccgtacatactcgaaagcgagctcttaacggacagcatcaagcaggcgctcggcacggattctattacagcttcgctttcggcgagcgcagtggaggattccaacctgttcacgctgaccgcgacgggcgcgaatgccgaaagcacgttgaatgtcctgaacgccgctattgattgttacccggaggccgcacgctacgtgctgggcgacattaagctccatatgctgagcgccccaagcctgccgaccacgccgtataatatattcgacggcaaacgtgcggcgttgacgggcgcggcgtacggcctgctttttggcgcaggactgatcctgctgtacggctgcacacggcgcaccgtgcggcgcgaggaggagattgcatctaagctgcatcttttgtgtctcggcacgctgccgaaggtcgtttttaaaaagcgaagcaaaagtaggcgcgaaacgctcacccttacgaacccgcatgtgccggagcattaccgcgaggctgcgcgcgggcttgccatgcgccttgaacgtcgcatggcggcatcgggtgacaaggtgctgctgttttgcggcacgctgcccggggaaggcgtgcgcaccacggcgatgactgccgcgcatgtgctgggcgaaatgggcaaaagcgtggtactgatcgatttagatttaaagcgcggcatggataaactctcgccgggactggaagcgtgtctttttgggcactgcccggtacaggaggtgctgcaccggtgcggtacagagccgtatcgctacgccgcgtgcagccgcgggctttcaccgcgcgaggtgctcgctgttggcgaaaatctgcgcggcgcgattgcttctctgcgcgaagacgcggactgtgttttgctcattgctccggaaagcgcgcgctttgcggagattctgcccgcggcggaaagctgtgatgcggcggtgtacgtcatcgagcaggatcgcgcatcgcggacgaagatcaaagcgggcatcgaaaagctcctaagctgcgatgtgaccgttgcgggctgcgtgctgaacggcgtacaggcagggctttccggctacgattacggcaagtacggttatggctacggatacggaaaatacggtcgctacgggcattacggctacggccattacggcgcgcaccgcacacgggaggaaacggtatgagctatatcgacttacacgcgcatgtgctgcccggcgtggatgacggcgcggaaacgcttgaaacgtctctcatgatgctgcgtatggcatcagagcatggcacgaaagctttagccgtcacgccgcacggggcgggggtgacgaagacggagtatttaggaaagtttgagcgtctaaaagcggcggctgcgcgggaaagtctgcccgtaaagctctttttcggcatggaaatgatggcggacggcacgctgtttgaccgcctgcaaagcggtgacgtgcagccgctcggcgaaagtcggttccttttggtggagtttgacccgctcgactcgtcggaatggtgcgcggcggcgactgagcatatacgaaaatacgggtatgtgccgctcatcgcacacccggagcggtacgtcattttgcaaaacgaaccttggcgcgcggagctgtggacagagcggggggccgcgctgcaggtgacgcgcagcggtattttcggcgctttcgggcgcagggcggcagagaccgcgcgggtgctgctggagcgcgatctggctttttgcgtggcgagcgacgggcacgggaccgcgtaccgcagaccgattttggaggacgtgaacgcgtggctcacggagcacttcggtgctgcgtatgccgagcggatgctgcatgaaaacccacgcagaattctgagcggcgaagccggaaaggagagaatcgcatgagggtatttcaaatggtaatggcagtgctgttctgcgccgcactgacgttttacctgtgggttgccgtgccgcgcgtacaggcgcaggatacatccatgcccgttttgacggacgaaacggacggcgaacttgcgctcagcgtcaccgcgccggaaagcgcgtattgcgcggggctgcatgccgaagacgcgcatgacggagatctgacggatgagatctgcattgcgggtatgtccgcgttgttggatggcgaccgtcggcgcataaagtacgtggtgttcgatgcggactgccacgcggcgacgctcacgcgcacggtgcggtatacggattacaacccgccgcgctttgcgctgaatgtaccgtcgacctaccgcacgggcgagatgcccgcgcttttggcgcagatcacagcggaggacgtaatggacggcgatgtttccgaccgtattcgactgttcaccgaagatattacttttgtggaaaacgacatgtacacgctgccggtatccgtgacgaattcctacggcggacagagcgagatgcagctttatatgcagctgagcgacagcagtcttgaaattcgcctgaagcagggaatcgtgtatgtgaaggcaggcgaaaagtttgagccgaaggattatttggagggcgtgtttgaccatgcaggcacggcggtaaaggtgaaaaagcagacagtgacacaaatagataccgcaaagcccggctgttacccgatgcagtatgcggcagagacggaaacagagaccgtgcgcgcctgcctgacggtgatcgtggaggaggggaaaacgtgaaggacgagcgctttttttggggtgacctgcaccccgtgtgcgtgctgcgcgggctgctctataatctgtgggtgctgattttggcggtgcttacggcatggctgtgcgtggaggggtatcatctttttacgtatctccctgtgtataccgcttcggcgaccgtggcggtaaatgtaaagggcggcacgagcgcgtatacctctttagatcttacggcccgcatggcgcaggtgtttgcgagtgtgtttcaaagcgatacgttccgcgaggccgcgcagtgcgacgttgtggcttccgttttgccggagacgaacctcatcaatgtgcaggtgacggcggagaacccgcgcgaatcatttttatcgctgaaaaatgtgctggaaaaccacgcagacctgacggacgagctgttctcaaacgccgagctgcgcgtcatccgcgacccccaggtgccgcttgccccttcaaacccggtggacttaaagccgtaccgcatgcgggcctgtgtgggtgcgatgctggctgcatcgctgattgtatcggttttgtttctgcggcgcgatacggtgcaaactccgcaggccgcgcggcacaagctggatgggcgcgtgctgggcaccatcgggcacgagcgcaaggaaaagcggctgttcgtaaaaaagagccgcggtgcggggcgcaaggctgcggcgctgctgacagacccttttgtgcggtacacctacacggaagcgtatcaggatctctgcgcggcgttggagcaccgcatgcggcgggacggcaaaaaagttctgctgctcacgggcgcgggagaaaacgaaggaaaatcaagcgtagcggcgaatttggcgctggcgctttccatgcgcgggcggcatgtactgctgttggatctcgatttaagaaaaccggcattgcacaaaattttcggcctgcgcacggcggctaaaaacgggatcgggcagtatttgcaggcggagaaagacgcggagccgccgctcattttttcggaaaaatacggcatttctctcggccttaccgagcccgccgcgtacccggagcgccttttgcacagcgaaaagctgaaaaagctgcttttggcggcgcgggcggacgaacgctttgactatgttttgctcgattccccaccgatgctgctttccgccgatgccgaggcgctcagtgcgctttcggatctttcggtgctcgttgtgcggcaggactacactccggccggtatattaaacgactgcgccgacgcgctcacgcagagcgggacggattttgccggatttatcctgaatgatttttacgcggctgtgcacccacagcagctttttgcagtgcggacggcttcgtcaaaatagtgccttgtagctaaaaatgcagatgttttgtcggcgttttactgattttgacggctttttgttcaaatccgttgacgcacaacgggtaaaagcgatataataactcggataaggcactgccgcggaatgcgcggcgcgccgaattttcccgaaacgtcaaaatcaaaggagtacacgatatgagcaaatggaaggaacggattccgggcattgtgatctctgtccttttggtggcagtgtttgccgtgtttatggtgatccttctgcaaagcaagatggtgccgacgaagctgctgatccttggcggtattgcacttgtccttttggtggcttctgctgttttgttggtgcgcagcatccgaaataaagggcagttcatctgcggcgcgtcgctttctctggtactggcgctggtgcttggccttgcgagcaactacatttcggtcgcgaccggcacgctgacggagattggcacggtgcgcacggaatatacgcccgtagcggtctatgtgcgcacggatgacccggcttccgcgttggaagacacaaagggctatacgttcggcattttggaatcgcttgaccgcgaaagcaccgattccgccgtcagccagatcacggagcgctttggcagcgcagtgacgacgaagacgtatgccggcatcacacagctcatcgacggcctgctcaacaaagaatgcggtgcgatcatcctaaatactgcatatctcgacgttgtgacggagctcgataaatacgccgatgtagaaagcaaaattcgcgagcttgaagtgctgcacgtggaaacggcggtgcagagcgaagcggaaaagacgcagagcactggcaacagcgatgtggaaaatcgtatttacaccttgtacatcagcggcagcgatacgcgccagggccttaacacggtcggtcgcagcgatgtaaacattttggcgacaatcaatacggaaacgcgccagattctgcttgtgacgactccacgcgactactatgtgccgctgcccgtttcgggcggcatcccggataagctgacacatgcgggtatttacggcgtgaacgtttccataggcacgctcgaaatgctgtatgatacggatatcgattactatttccgcctcaatttttccggctttaccggcattgtggatgcgctcggcggcattacggtcgataacgatgttgcgtttacaaagggcaactacacgtacccggtgggcaaggtgcagatggacggcaaaatggcgttgacctttgcccgcgagcgctattcgtttgtggatggcgatattcagcgcggtaaaaaccagctgaaggttatttccgccatcatcgataaggcgctttccccggatattctggtgcgctacaactccattatggacagcatcaaggactgcttcgagatggatgtgccgtatgacgacatcgcggcgctcgtgcgccgtcagctttccgataacggctcttggaacgttgtccaatacagcgtgaccggcacgagcgattcgcagatcccgtactccatgagcgattacgcctacgttatgcgtccggattataacaccgtaaataaggcaaaagagctgatgcaggctgttaaggacggcaaaacgctctcgaagaccgatacgaacattacggatacggaccgcacaagatatgcttctatgccgggcgaccccgcagcctcgtacacgagcagcggaagcggtacccagagcagctccagcaacaactacagctactccgacagcaacgattacagctattcgggcggctccgacaattccggctacgaagagccttctgtgccctccgaaccctccggcggcgaaacgtcgtctgaacctgcgggcggggacgagacaccgtctgagccttccggcggcgaagaaattccctccgaaccctccggcggggacgagacacccgcagagccggatcccggcacaaacgacggcgaaacaatcgcagagcctgcggcctaaatgagatttcataccatgtaaactttttcccccgaagcccttgcggttttcgggggaattctttataattattatgaggtgttttggctattcagtatgcgacaaggagaaactatgcaccgaagaagaaaattgcccgaaaacggcgttgtcattgtgcttggcgcacgggtggtgggggcatcgaaaacctgccccgcgcacctcagtcgcgcgtttcaatatcgtgtggatactgcagcatcgtatctaaaagcctatccgaaagccgtttgtatcacgaccggcgggcagggcaaggacgagccgcaaagcgagggcgaagccgcaaaggaagcgctgattaagttcgggattgcgccgaagcgcatctttgcggaagtaaactccaaaacgacgcttgaaaacctgcgttttgcgcgggatattctgcgcgaaaatggcttttccgataccgttttgcttgcaacgcaaagttaccaccagtggcgcgcctgccgcatggcaaaaatgttgggacttacgccgtatccgctgcatgcgaagaccaatttgaaaagtctgccgaaaaacctgtgccgagaatttctggctatcctgaaattcctgctgtttacccgaaaggaatgagacgaatggaacaagagcaaaagcgcttgctgatccgcggtgcgcgcattttgaaccccgcgcgcggcgaggattatatcggcaatattttgatctccggggaccgcatcagcgcggtttccgaaaacctgtacgatgcggatgccgaagtcattgaagcaaaaggtttaacggcggtgccgggctttgtggatatgcatgtgcatctgcgtgaccctggctttaccgataaagaagatatttacacgggctgccgtgcggctgcggcgggcggcgtgacgagccttttgtgtatgccgaacacgaagccggcggttgatacgcccgagactgtgcgctatattttggacaaagcaaagaccgccgatgcgcatgtttacgttgcggcggcgattacaaagggactgaaaggcgaagagctgtgcgacttagaagcgctgcacgatgccggcgccattgctttgagcgacgacggtcgcccggtcatcgataccgcctgccttgtaaaggcattatgtgaagcgccgaagctccacatgcgcgtgacggcgcactgcgaagatttgttcctcgcgaaaaagtgggtcatgcatgagggagaagtttccgaaaaactcaatctgcccggcgtacctgcggcggcggaggactgcggcacggcgcgcgaaattgcggcggctgcggcgtatgacgtgccggtgcacatctgccatgtcagcacggcaacctctgcggcgctcatccgtgatgccaaagcccgcggcgtaaaggtgacggcggagaccgcaccgcactacttgcttttgaccgacgaagcgctcgaaaagcacgacgcggactaccgcatgaacccgccgctgcgcagcgagaaggaccgccttgcgatgatcgaggccgtaaaggacggcacgatcgacgtcatcgcgaccgaccacgcgccgcacacgccggcggaaaaagctgattttctgcacgcgccgaacggctccatcggtatggaaacgtcgtttgcggcggcatataccgcgcttgtgaagaccggcgttttgacgcttacagagctcgtcgaaaagatgagcgtgcgcccggcggagctgctcggcattgaagccggcgccatcggtgcgggcgaagtggccgatattgcgctgattgacgagcacgaagcgtgggttgtggaccccgaaaagctgcacggcaaaagccgcaacacgccgtttaagggcatgacgctcacgggccgtgtaaaggcgaccgtctgcggcggcagaattgtatttaatgaactgtaaaagtttgagaaatttgaaattatagatttgaaatgagagagggattactatgtcttttgaccgtatgattgaaaaaatcgtggaaacccagaatccgaccgttgcaggtcttgacccgaagctcgcgtacattccgtcctacattctggacggtgccgtcgcaaagtatggcaaaacgctggaggctgcggccgccgcactgctcgaatacaacaagggcctcatcgacgcgctgtgcgatattgtcccggccgtaaagccgcaggcggcgtactatgaaatgtacggctggcagggcgtgaaaacccttgcggagaccatcgcctacgcgcgcgcaaagggtatgttcgtcatcacggacggcaagcgcaacgatatcggtaccacgatggaagcctacgccacggcgcacctcggcaaaacggatgtgttcggcgagaaaacggaagctttcggcgcagatgcgctgaccgtgaacggttacctcggcacggacggcatcaagccgctgctcggcgtttgcgaagcggaagataagggcatttttgtgctcgtgaagacctccaacccgtcctccggcgaattgcaggatcagaaaatggaaagcggcaagaccgtttacgaaaccatgggcgagttctgcgagcactggggtgaaactgtcatgggtaaatacggctactccggcgtcggcgcggtcgtcggcgcaacgtacccggcacagctcggtgaaatgcgcgagaaagcgccgcacacgttcttcctcgtgcccggttacggcgcacagggcggcggcgcggatgacgttgccccggcgtttgacaaaaacggtctcggcgccatcatcaactcctcccgcggcattatgtgcgcatggcagaaggaaaagtgcgacgagcatgactatgcacaggtggcaagacgcgaggccattcgcatgcgcgacgagatctgcgcacgcatcggcgaaattcgcgcgaacggatgagtaacgctcggaaaggacaagctatgaaatatgacgttcagctctgcgaggtactgcgccgcacgcagaccgcagagaacacctttgattatacggtcttagcgccgaaactggctgaagtggcgcagcccggacagtttgcacacatttacgtgcccggtaaaacgctgcgccgcccgatttccatttgtgacatcgataagaaaaacggcacgctgcgctttgtgttccagattcgcggcgcgggtacagagcagctctcgaagtttgaggtcggcgacaagatggatattttggcgcccctcggccacggctttacgttcgacccgaacgcgcacaatttgttcatcggcggcggtatcggtgtgcctccgcttttcggcgcagcaaggcaatgcggcaaaaacgccacggtggcggtcggtttccgcaataaggatttcgtgattttggaagacgacttccatgcggcaggctgcgacctgcgcattgcgacggatgacggcagctacggccaccacggccttgtcatcgatttaattcaggatgtgcaccccgataaaatttttgcctgcggtccgaaggtcatgctgcgcgccgtgacggagtttgcaaaagcgcacaacattccgtgcgaaatttcccttgaggagcgcatggcgtgcggcatcggtgcgtgcctcggttgcgcggtggagctttacgacgaaaacggtgaaacgtatatgggccatgtctgcaaggacggcccggtgttcccggcggaaagggtggtattctgatggctgatttaaaggtttcggttgcgggtgtggagttccataacccgctcattgcggcgtccggcacgttcggtttcggtcgcgaatatgcagagttttacccgctctccgcactcggcggtatttcttctaagggcatcacgttaaaggcgcgaccgggcaatcctgcgccgcgcattgcggaagcccccggcggtatgctgaatgccgtgggtctgcaaaatccgggtgtcgatcacttcatcgaaaaagatctcccgtggctgcgcgagcagggcgtgaccatcattgcgaacattgccggcaacacgccggaggattactgcgccatggcggaaaaattgaatgacaccgacatcgacatgatcgaaatgaacatttcctgcccgaacgtgaagcagggcggcgtgcagttcggcacgagctgcgcaggcgttgaagacatcacgaaagcggtgcgcgcgcactgcaaaaagccgctgatggtgaagctttccccgaatgtgacggatatttccgagattgcgctcgcggcggaaagcgccggtgcggatgccgtctccatgatcaacacgctgaccggcatgcgtatcgacatcaacacgaagcgtccgatcattcacaacaacacaggcggcttctccggcccggcgcttttgcccattgcggtgcgcatggtgtggcagacgtatcagaaggtgaaaattccgatcgtcggtctcggcggcatcagcacgtggcaggacgccgtggaaatgctgcttgcaggtgcgacggcgctgcagatcggcaccgtgctgttcacagacccgtatgcgcctgtgaagattaccgaagggcttacaaattacatggataaaaacggcgtgaagaccctttccgaattgaccggtgcgatgcgtccgtggtaaatgatatggaaaaattacacttatatcttgtgcgccactgcgaaagcctcggcaactgcgagaatatctttcagggtcagcttgacctcgatatcagcgctacaggagaaaagcagttggcgcttttggcgctgcggtttcggaacatccccatcgatgctgtgtattcgagcccgttaaagcgcgcatataaaacggcggaagcggtaaatttgtaccacagtttgcccatcataaaactgccggagctgatggaagtagatgttggcgcgctgtccggcatgaagcttgacaaagcgtttgcggattatccggtatttgccgaaaagtggcagaattccccgcaaaattgcatttttccggagggagagacgacagcggaagtctatgaccgcgcgaaaaaagcgcttgcacgcgtgaaagcggattgcatgggcaaaacagcggtcatcacgtcgcacggttttttgttgcgctgcatggcgtgtgagattttggagcacgatattgaacgtttgagtgatattcgtatcggcggcaacacctcggtttcggaattttatatcggcaaagacggcagcgtggaaacggtgcgcctcagcgataaaagccacttgccgaaggaattgctcggcgacccgaaccagtatgttgtccacaaataatatatagcaaaagacataagaaaagcccctgaagcataccattctctaaagggggagtgggtatgctttgggggcttttggagtatttatcgtcgattttgtttttctttctgcacatcacaagcgccgggtcgtttccaaaggcgctgactgcggcggaggagaaaaaatatctggagcaaatggcggcgggcgaccaccacgcgcggcaaaaactcatcgaacacaatttacggcttgtggcgcacattgcgaagaaatactatgccgatgaaaatgaccgcgatgacctcgtttccattggcacggtggggctcatcaaggctgtggacagcttcgacccgacaaagggcattcggctttcgagctacgcttcgcggtgcattgaaaatgctatcctcttgcagatgcgtttatggtt

SEQ ID NO: 1785 - DNA, 1473 bp, Unknown
  gut microbiota DNA sequence
aagctaccgaaagaaacaaagaccttctcacaggaaccacctatcagcgctctattgaggatctggagaaccaggtgctgacctatgcacaggtgaaagcgcttgcattggctgagccgctgatgaaacagctggctgaaaaagaaaacgaggtcaagaacctgaaaattctgctgtccagggagcgacagactcttgcagagcagaaaaaggagcttgcgcaaatcgatgaaaaaatcaaagcggccaggcagcgctgggaaacatcgatagccgcagtagacgccctgaaaaaatatgatgccgatgcacgcaagaatgcctatcagcgaatcaagtcacttctgacagatgactttctcatctccggagacggatcccagatgccaatgcttttaggcatgggcatggagcttccggaaaagcaagatgaaaagaagccttatatcctgctgaaatatgcggaacaaaaataccttgttcccatgggtgacacaccggcgggcaatgcccgccgtgtgatcaacaccttgaaagagtttcagaagcttgcggatcaggacaaggaacagctggacaaggtggtttccagaaaagaggcgcttcagagccttgtgcggtcaccggatcattcctattcggatcaattggcggcctgcgaaaaggaggttcgccggcttagcgagcaaatcgctgtgcgtgcggagtgtggagccttcacggattagcaccatgtgtgcctgctccggtattctgtggcctgtttttgccccacgccatcttgtattataagatataccgtgatagaatatggtaaaagaggaagtgatcccatgcctgtgaaacagccgaaaaaactgctgattctgaacattttggatatcctgcggaagtattccgacgaggagcaccgtctaagccagaaggacatcgctgaaattctgaaaaccgaatacgacatgaccgccgaccgcaaagccatccggcggaacattctgaacctcatggactgcggctacaacatcgagtacagcgagtccattcgaatggtgccgaaccccaagaccggcgtgccggaggagagctacctgtggtcggacttctatctggagcgggacttcaccgacggcgagctgcggctgctcattgacagcctgcttttttccaagcacgttccttacagccagtgcaaggagctggtgggcaagctggagggcctgtccaatgtgtatttccgcagccgggtgaagcacattgcccgcctgccggaggacaaaaccgacaacaagcagctctttctcaccatcgagctgttggacgaggccatcagccgggggcggaaggtcagcttcaagtatctggaatacggcacggacaagcagcaccatatcaagacccgccccgacggaacagagcgggtgtacatcatctctccttaccaaatggcagccaaggaggggaaatattacctga

SEQ ID NO: 1786 - DNA, 7927 bp, Unknown
  gut microbiota DNA sequence
gtgtacatgtcaagcgcgtgcatcacgccgtcgttttgcaaatattcaacgaccttctctttgatgtacgggttgttatgtccgtagttcagcgcgccggagccgcaaaaaaagtcgatatactccttgccgttctcatccgtctggatagagcccttcgccttgacaaagaccgtcgggaagttacggcagtaagagcgaacttcggattcatacgtttcaaatgctttcgtgttgtttgtactcatgtagtaccatcctttctaccatgccatctgcatgattcagcgatcacacgcgttatgcgtggggctgcgtttttcccgctcatgagttttgaagcgagagtcagcggtcgttcgaccaatgtgtaatagaagttttggtcgaatccatacggcacgcacaaatcgttttgtgcgataccgtgattaagtttaccacacttgcccgaaaaaagaaaggtcttctttcgcaaaaaaacatatatatctgcaaaaattctgcaaaaaagagcagcacccgcaaaagacgctgcccaaatttacaaaattggaatttgactatctcttaactcgttttgataaatgaagttcattatcatctacataaccaagtttattatatacagattgtgcaacaagattttcttgtcctgttagaagttcataattgtcaagtggataattcttactacaataagcctctgcaaaagtaatcatctcactcgctaagcctctttttctgtatgctggtttaacatacacttctgtaatttcaggcatatattcatcatagcagaacgattttttaagctgaacacaaacaaatccaactaacatatcatcttcatcagcaacgataacaacttcctgtttattattcataagggaatttctaatattgtctatgcttgtttcgccctcaccattaaattcgttatttaagatttttaattgctctgcatcatttactgttgcaaatcttaccaaattacacctcatcaaatctaaatttattcgatgttctcgccgagcgtaccctggctgagcgccttcagatacgcagtgatgaaatcatcaaggtcgccgtccatcaccgcgctgatgttgcccttttcgcagcccgtgcggtgatcctttacgagcgtgtacggcatgaagacataggagcgaatctggctgccccacgtgatctccttctgctcgcccttaatgtcggagattttttcaaggtgttcacgttccttgatctcaacgagcttagagataagcattttcatagccacgtcgcggttctggtactggctgcgttccacctgacaggaaacgacaatacccgtcggaatgtggatcaaacgcacggccgaagaggtcttgttgaccttctgtccgcccgcaccgctcgcacggtatacttccatcttaatatcgtccgggttgatttccacgctgaggtcctcgtcaatctccggcataacctccagagaggagaatgaagtgtgacggcggcctgcggaatcgaacggcgagacgcgcaccaaacggtgaacgcccgcttcactcttcaaaaagccataagcattttcgccctcgacaaggatggaagcgctcttcaggcccgcttcgtcgccctcaaggtaatcgagcgtagaaaccttaaagccgtgacgctcaccccaacggttgtacatacggaacagcatctcggcccagtcctgcgcctccgtgccgccggaacccgcatggaacgtcaaaatcgcgttcttactgtcatattcgccggtgagaagcgttgtcagacgcatcgtctcaatctctttgccgatggcctccacttcctcctgtgcctccggcaaaagagaaaggtcttcttcctcattgcccatttcaatgagcgtcagcgtatcttcgcagcgggaaacaaggttcaggtacgtctcgtccttctgctttaacgcagcagtcttctgcaaaatcttctgtgcagattccatgttgtcgtaaaagcccggctccgccgccttgttttccagcatctccacttcttcacgcagtctttcaaggcccaacgcgtccttcaattcatccagcgccgcctgcttttcattcagttcatgttttaatacttcatattgcagcatacgttttcgttacctttcaaaaatatccgtccaaacccgccttcaaacatttcacggcggcgttcagcttaaatgtgcgcaaatctctgtttattataatagataacccgccgtttgtaaatagaaaaaatgcgggaaaacgcacggtttcgctgaaatctttatattagccttttttgaagttttacttcgttttctcgctgaattattaacagtctgaaaatttgcacgctttgcattgcgattgcgggcattttgtagtattatatgaataagaaaataattctggcagtattctgaccgtctttcgaatattgccaaccgaattttggaggttctgttttggactacaaaggcatcaagtgtcccgtgtgcgacaagccgtttacggaaaatgacgatatcgtcgtttgcccggtctgcggtgcaccgtaccacagaggctgctataaagaaaaaggtgcgtgcattttcacagatctgcatgaaagcggcaagacttgggcgccgcctgttccgccggacgcaccgaacacggccagtgagcttaaagacaaggaatgcccgaactgcggcaccttaaacgcccacagcgcgctgttctgcaacatctgcggcacttccctcaccggcgcgccggatgaacaccgcaacacgggctacaacacgcagcaaaatccgaataacgcgaacaatccgaacggctataacaattacaataacccgtacggcagttatcccccgccgcaaaacaacgcaaactatcagagccgcggctttggcggcgtgccgttcgcgttcgaccccatgggcggcgcaaatcccgcggaatttgttgcggataacgtcacctacggcgacgtcagcaaggtcgtgcagcagaatacggcgtattacctttccgtgttccgcaatattaagtctttcggacgcagcaagttcaatttcagcgcgttcctgttctccggcggctggctcctgtatcgcaagcagtacaaggcgggcatcatcaccacgacgctcatgttccttttatatatcgcgaacctgatgctctcgtgtttcgtcgtcaaccccatcacgacgcacgtcatcgataacgccggcgtgtcttcatcggatctcagctacgtgcagcttgcaaacctgctttcgcagtacttgatggataacccctcacagtatcttttgttctgcctgccgcttttgtgcagcgccctgatgctcggcattatgatcttcgtcggcgtgcgcgcaaaccgcatgtatttaaatcactgcgtccgcaccgtgcaggagattaaaagcgtcagccatacggaaaccgacctttccgcagaatacaccgcacgcggcggcgtgaacgttgtcgtaacgttctgcctgctcgcctgctacatgatcctgcgttggatcccgctctttttgacttgattccagcttaaaagtgacatcaccgcttacggtttcacgcggtaatgtcgttaagaatagaactcctttggaaaataggaagtatatttggaggtattgatttatgaaaaccgtcagaaaagccgtcatccccgcagcgggcctcggcacacgcgtgctcccggcatcgaaagcgatgcccaaggaaatgctgcccattgtggataaacccgctatccagttcattgtggaggaagcggttcgcgccggcattacggatattctcatcatcacaaaccgcggcaaatccatcatggaagatcatttcgaccgcgccccggagcttgaggagcgtctgctcgcaagcggcaaaaaagaagtgtacgatgaagttgtgaaccttgcgcaccttgcaaacatcacctacatccgccagaaagagacgcgaggtctcggccacgccatctcctgtgccaaagcatttgtcggcgatgagccatttgccgttctctacggcgatgatgtcatcctcggcgaagatcccgcctgtggccagcttatccgcgcttataacgagaccggcaagggtgtcgtcggcgtgaaagaggtcagcgaagaagccattcagcgctactcctccctcaaggtagagcctctgcacgataactggtttacctgcaccgatatgattgaaaagccgagtaaggataagattatgtctctttactccatcctcggccgctgtgtattgccgccgcagatttttgatattctcgcccgtaccgcacccggcgccggcggcgaaattcagctcaccgatgccatgtgtgagcttgcccgcaccgaaagcatgatcgccgtcgatttcacaggcaagcgctatgatatgggcaataagctcggcgtcatgcaggcacaggtagaagtcgccttaaagcaccccgagattggcgaaagcttccgcgcctaccttaaagagcttgccaaaacgctttaaatgtaaagtcgattcacattacacatatgtaaagttcattcgctttgtaaagtcaatcagcttcataaagcgtctatatcaaatttgattttccaaaaatccgccgagttccaagatttttcttgactttgcggatttttatgttataatacttttgttagtttgtgcttatgcgttttgtgtaacacaaatgacaatccttgctccgtttaaaagtacggggccaaagtccaaaaggaggtgcaaaccatgacagaggtagtaaagaacaagtacgagaccgttatcgttctctccgcaaagctcggtgaggaaggtaatgcagagctggtcgaaaagttcaaggcattgattgcaaagcacggcactgtcgagagcgttgacgagtggggtaagagaagactcgcgtatccgatcaacaaggaaaccgaaggctactacaccctcgtaaacttcgagagcacgccggacttcaccgctgagctggacagacgctataagatcactgacggcgttctccgttccatcatcgtgaagaaggatccccgttttgcaaccgctgctgcaaagccgcgtaaagccgctgagccgaagccgatcgacgttgaggctgtcgcagccgaggctgtcgaagcaaacgagtccgctgctgagtaagttttttgaaacgaaagagagttgttacctatgttgaatgttgcagttgttatgggcagactggttgccgatcctgagcttcgccacactccgagcgatgttgccgttaccagcttcacgctggcggtagaccgctcctatgttaagtccggcacagaacgtcaggctgatttcattgatgttgtcgcttggcgcagcaccgcggattttgtatgcaaatacttccgcaagggccagatgatggcggttcacggttccattcagacacgcacatatacagataaggacggcaataagcgcaaggcgaccgagattgttgcgaacgatgtcaattttgcggattccaaacgcagtgacagcggcgcaaattacggtgccccctctgccccgtcttacggcaataattacggaagtaacagcgcagccggaaatgaaatgcagcgcccggcttacagcgaacccgctcccacctattcgagtggtaacagcggagatttcgaggagatcatcggggacgacgacctgccgttctgatgatccaacaacgactaagataaggaggctttcgcaatggcagacagaccggagagagataatcgccgcggtggtcgcaagggccgcagaaaagtatgcagcttctgcgttgacaaagcggattacatcgattacaaggatgttgccaagcttcgccgttttatttctgaaagaggcaagatcctccccagaagagttacgggaacttgtgcacatcatcagcgtggcctgacagtcgctattaagcgtgctcgtcacctcgctctcctgcccttcagcagcgactgatcgtgcagatctaatatcagcgtacaagggagattttcgtcggaaggtctcccttttgctatcccccattgatttgcaaaacccgcactctgtgcctttaacggtacagaatgcgggtttcttttaatttacttgaatcgtcatcagaacagacgaatgatcttgccgccgcagccgcaatggtaccgctccggatgctgcaccactgccgtgagtttcatgcgcggaaactgccttttgcattttgtacattgcagcatatatttcaccggtttctcctcgtactccacaagtgcttccttcgtcgttgccgtaatgcagtagctatacgcgttgttcatcttacctgcgtatgtcttccaaaggagcttgtgattcatgcagcgcgggcacgtgtgcaaaagctcatgcgccaaaacgctgcgcacacaattctcgtccttgtcctccaaatacgctgagacctcgattcgatattcatatttttcgccatgtaatcgcatacagcgaccgtagcgcttttttgcgcgcgtgttgatctgtacctccggctcgatgttgcccgagaccgggatacccagcgcacgcacttcttcgtagatttctttcatcaatgcgttataatcatacttcataaagtttcctcgcttttctttattttactactatctactacgaaagaaaagtggtataattaaaaaggaaaatcgttttcctatcaatttttcggaggaattttcatgaagtattattcgatcggctacgccgtcaacgacggtttgccggaagttacacgcgaagacgtgcagaagctcacccacatgaaccttgcgttcggtctcatcagcgaaaacggccttttggatctgcaccagatgacgcatctcgatctcatcccgcagttccgcgattggaaccccgctctgcgcgtggtgctttccgtcggtggctggggcgcgggcggcttctcactcatgtcccgtaccgaagaaggccgccgcgcatttgcggagtcctgccgcaaagccgtggaggagtatcacctcgatggcatcgatatcgactgggaatacccatgcagcgaccaagccgagattgactgtgactcgagcgataaacagaactacacaaagctcctgcaagctctgcgcgactcccttggcatgaaccgcatcgtctccaccgccgtcggcgcaggtgattatttcccggaaaacaccgaaatggacaaggtcgccgagattgtcgattacgtgcagctcatgacctacgacatgcgcaacggcttcacgcatcaggccggccaccacgcctccctcagtgccagtcgcggcgatacgagcaatacgaacacgcgctacatcgtcgagctgttccacaacgccggtgtgccgtacaataagctcgtcgtcggcgcagcattctactgccgccattacacgggcgccgcaaacgtcaacaacggcctcctgcaggaagccagcgccggtatgtacggcccgaactacgacggtctcaccgaggagttccgccgcgagcataactacacggaatattgggacgaggatgctgaagccgcatatctctggaacggcgaaacgttcatcagcttcgaatcccctgaggccatccgccgcaagtgcgagtacgtcaaggaaaagggcatgctcggcgtcatgtactgggagcacagcgccgaccacacccgtgagctgctcactgtcatcgcaaaaacactgaatatctaaattctaacggaaaaggagcctgcgcgcatgaaaaccgcgttcaggctctctttttaacgataaaaacaagaaatccctgttttttgtaaaagaaaagacccatcggaaattccgataggtcttttggcgtggcaggggcagaaggat

SEQ ID NO: 1787 - DNA, 1397 bp, Unknown
  gut microbiota DNA sequence
cctacactgcaatgcgatgtgctctatctgagccttgaggacacccagcgccgcatcaaagaccggctctacaatcttaccgacagcgccccggacaacctgtatttcgccgtgacctccgggctgatcggcggcgggctggaggtgcagatcacggactttctgaccgagcatcccgccaccaagctggtcatcattgacacgctgcaaaaggtgcgggactccaagggcagcgccggaaaggcaggaatgtacggcaacgactacgacgacatttcctccatcaagcgcattgccgacggcttcaacatcgccattttgctggtgcatcacctgcgaaagctgcaagacagcgacgatccctttaacgatgtcagcggctctaccggcatcatcggcgctgcggacaccaacttcatcctgcgccgtaagcgcagcggaaacgccgctacgctgctggtcagtgggcgtgatgtggagtatcaggaactgaccttgcaattcaacgaccttgtctgggagctggtggagcgcaagaacagcgaggacattcacaaggcagagctgccgaaatttctgtttcgggtggtggactttattgagtgccgcaccgaatgggtaggcacggccacggagctgctgaccgaaatgaaggagcaggaggttacgcccaatatggtcacaaagtatctcggtcagttcgcctatgaggtgctggagccgctgggcatcgagtatcgaaccaagcgaacgggaaaaagccgactcatcaaatttctgcgccgtgacggcgatgacgcaaatgacgccggaatcgctatataagaaaatccccgtcacaaccgtcattgccgtcacaaaccgaagaaagggggtgaacaaatgcgcagcaaaaactacgggatcaatgtccgtgtgaccgagcaggagaagcagaagctgctggaaaatgcccggttctgttctctgccgctgtcggaatatctgcggcggctggggcttgggaaagaggtcagagcggctatcacgaagcgggattaccgcctgtttcagatgctgaacggtctgaaagcggagctcccacagcttcagaaagaggaaattctgagcagactggaagcaattttgaatgaattaaagtaagcgagaattacgcctgcgcagtctaagcgagcagactgtttgtactcctaaagtccaaacagtgcccctgccgccgatgcctgcgtcatctgagcgagcagtgcgtttttactcccggcagggccggagcgcaaaacactcgttagggcgtgccctaaaacccctgaaagaaataactatgaaagtgaggacaacacaatgagaaaatcggattttactttacccacgctggacgacctattctccacgcaggc

SEQ ID NO: 1788 - DNA, 1227 bp, Unknown
  gut microbiota DNA sequence
accatgaaggctcctgattgctgcagttgcctcataaccattcatgacaggcatttggatatccataaaaataagatcatacgaaccttccggagaagcttccactttttcaactgcgatttttccattttctgcggtttccacttctgcccctgtcatccgcaaaatttcaacaccaatttctctgttcaactcattatcatcaaccagcagaatcctttttcctgtataatctgcttctgacagtttctccagatcatttctcgctgtattttcctttctgcctgaagtaaactgccgcagtgtagccgtcagccgggaacggaacagcggttttgcaataaaagcatctacacctgccgcctttgcctcttcttcaattttgctgaattcataggatgtcagtacaatgatggtaatctctttcccgatccttttccgaatctgtctggccgtttctatactatccatctccggcatcttccagtccaggataacagcaaaataatccttttttagcttatgacgtgcataacaacgttcaacagcttccttgccagaaagaacccattcacctgtaataccgatttctttcagtgtggcaattgtactttcacagcatgtcttatcatcatccacaaccagaaccggcagattcatcagatctctgtcctgttctttttcttttttctgaagctccagataaattgttactgtgattttagttcccttgtgcaaggtactgtccactttaatagtgccattcatcaggttcacaatatttctgctgattgccattccaagaccggttccttgaactctggttgtccggtggtcatctgcacggctgaaaggatcaaacatgattttctggaattccggtgacataccgattccatcatcctcaatcgtaaattcatagcatccaagttctgaaaatccattgggtttttcctctatcgaaaaagtaatatttccaccatccggtgtatacttgatcgcattactcatcagattcacaaatacctgctgaatcctcaagctgtcaccacagacagcctcatgttcaatacgattgatgtgtatatcaaaattatgtttatcaagcaccggtttcgtaagtgtaataagattatctaccagctccgacagattgaaatcttcctgtgccagtgtcatttttccactttcaatacgtgccatatccaatacttcattgatcagccc

SEQ ID NO: 1789 - DNA, 740 bp, Unknown
  gut microbiota DNA sequence
tgattgatgtgtatatcaaaattatgtttatgttcatcaagcaccggtttcgtaagtgtaataagattatctaccagctctgacagattgaaatcttcctgtgccagtgtcatttttccactttcaatacgtgccatatccaatacttcattgatcagccccagcagatggcggcttgattctgtgatcttgccgaggcattcaatgactctgtccttgctctcaacatttgctcctgcgattgccgtcagacccacaatcgcattcattggtgtccggatatcatgggacatattggaaaggaattctgttttcgcacgatttgcattttctgcggaccggtaagcctctttcagtgcctgacgggattcaatctctgctttcttctcctgtgtcacatccatggatgccagcaataccttttccagctttccattcttccattccaagggaatataagaagcgattttataagtcttttcatccaggctgcaatactcaaacttataaatatcattttcacttttcagttttttccgaatattatccggggctatcaggatatctatagcttccaatggttccagtgtcttatatttttcaagaacctgcatctgaaaatcatgataaaatcccagaggtttatatatcatctgtccattcagattgtagaattcatatctgtcattttccagatcacagacaacaaagcggtcaaccagacgcacaatactctgaat

SEQ ID NO: 1790 - DNA, 323 bp, Unknown
  gut microbiota DNA sequence
ttatcaggatatctatagcttccaatggttccagtgtcttatatttttcaagaacctgcatctgaaaaccatgataaaatcccagaggtttatatatcatctgtccattcagagtgtagcattcatatctgtcattttccagatcacagacaacaaagcggtcaaacagacgcacaatactctgaatcagctgctccatggaagcattatccgctgccatctgcagatgccgtttgctctctgcctttgcctctgtgatatcacgcagaaagatcatggcatattctgaatcctctatttcgccacgtatgaccacattgcgg

SEQ ID NO: 1791 - DNA, 136 bp, Unknown
  gut microbiota DNA sequence
cagctgctccatggaagcattatccgctgccatctgcagatgccgtgcgctctctacctttgcctctgtgatatcacgcagaaagatcatggcatattctgaatcctctatttcgccacgtatgaccacattgcgg

SEQ ID NO: 1792 - DNA, 37253 bp, Unknown
  gut microbiota DNA sequence
tatctgctccatggaagcattatccgctgccatctgcagatgccgtgcgctctctacctttgtctctgtgatatcacgcagaaagatcatggcatattctgaatcctctatttcgccacgtatgaccacattgcggacccatcgttcttctccattcagagtgatacggcactctaaagacaattcggtttccagacccttcagcctttctgcaatataaccgcggtcgtaaaaagaggataccgccttcttatctgtctccacaacataggaattcacaaaatgccgaatcaattcatcccacgtatgactctgttcaaagacggtcatcagggacggttcaaccttaaaggtatcaaaagtattcgcttccagattcacataatactcacacagatttgctttcgtaaaagcccggtggaaagcagcagatttttgtgcctgcatgatttcttttttcttcgcatcaatgttaataaaaatcccggcaatcctgctggcagaaccatccagacggcgtattccttctgccgatgcccgaaaccactggtattgattatccttcattctcatacgatactctacctggtattttgtccggttcgtcttatccttaattgccgcctgaagctgcgccattactctttctttatcctgtggatgcagaagatctgaccaggattccagtttattcggaaagtccagagtgtcatgatagccgagcatttttcggaattcatgactccagtttacattcacaatctcactgttttcgtcacagtcaaaataccagaagccggaacagatagcctcattgagcagtgccaaatttacatgatcccagttgaactgtacggacataacccagatctgtctgcccgcctcatctgtcgcatcctctttacaaagccgtacatttttcactgtaccgtctgctgcaaggatctgtgcttcccctgttccgtgaagctgcaaaaaacggtctcgctccagtatatattccttgtcataaaagaagtttttcaatgagccttttgtctgttccatgaaagtatcgaatgtatatcctatactatgcaacagcagattattcacagacaaaatagacaggttttggtcataagatcctgtcattatacctaccccgccattattttccagtgctttccgtacggcctgtgacatagcctgtgtctgtcccgttacagtctcacctaaagaatatatgttttctgcataatttcccattttcattttataaaaaagcctctcttcgtcttatgccttcttcatcctgcttttatctgtatcttccaaattagattcatttattgccaagccctctctatgcttagtaaacaaatttttatcaaatcatattgaaatgtctaaacgcatccatgatggcatcttccttctcctgtgggcaagatactttttgtccatcgccggatccaatattataattttcacgtttatcaagacctgcctttgttttgatttaaccaatagatccggaatgtactttaaaaccatatttacgcaatacataatcttgaatttctttttatgtagcactccctgatttaccttgaatcttctctacatccaaatcaacatcgacatatccattgactttttccctactcaaaaggactaccgtttccacatgcgcggtacccgggaacatatcgacgggggtgacggcctcaatattatagccctcggcggtaaactgctttaaatcgcgggcgagagtggcggggtcgcaggagacgtagacgacgcgcgtggggcgcatggcggcgatggtcgtgataacggcggcatcgcagcccttgcgcggagggtcgatgacgatgacgtcggggcgctcgccgcgctcgtagaggatgcgcgcggcgtctttggcgtcaccgcaaaggaactcggcgttcgtgacatggttgtgcgcggcgtttttgcgggcattttcaacagcggaggggataatctccgcgccgatgagcttcttcgcgcggctcgccatggaaagcccaatggtgccggtgccgcagtagagatcaagcagcgtttccgcacctgtaagcccggcgtactctgcggccttattgtaaagcgcctccgcctgcgtgcggttcacctgataaaacgcgtggggcgaaatttcaaactccagcctgcagagcgtatcgcgaatcgtgggcttgccccacagcgtgcgcagctcgcgacccaaaacgacatttgtacgctcgcggttgatgtttaacacaatgccggtaatttccggcacagcctcgcgcagcattttgacgagcaagtcttccccgtgcagctttgcgccgttcgcgacgatgcacacgagcacctcaccgctcttttcgccgcagcgcatgtaaaggtggcgcagaacgccgctgtgcgccgtttcatcgtagatgctctccccgctcagtctttgccacgcgcggaacgcttccgccgcgcgatcaaacacctcgggctgcaaaaggcaagtgtgcgtgtcgataatgcggtgggaattcacggcgtaaaagcccatctgcatttcgccgtttttggaaagcccgatgggcagctggcatttgttgcggtagcgcgtgcgggacggcgcgccgaggatcggctccatggggatattttcaaagccgccgatgcgctccaaggcatcgcggacacgctgcgttttgatcttcagctccgcttcatacgtgatatggcggtaaacgcagccgccgcacgggcctgcaatggagcaatccggtgtggtgcgatcgggcgacggcgtaagcagctcctcgagccgcccgaatgcgtactttttgaggacttttacgacgcgcacgacgcagcggtcgcccacggcggtaccgggcacgaacacggccatgccatctgcgcggcagatgccgctgccctcggcggtcatggcggtgatctccgcttcaaacaaatcatttttctttatcatggaaaaacctccgtcaaacacaaaattctctttttcatgcataaagcagagaacatgcgggtaatttaagggtgagatacgatttcaaacggcttatgtggaagaacgcggtcaatttatatgtgcaaaatatacacaaatttttagtttgatttgtgcgacaatagcaaaagagagattgttgcagaaaccgttgacaatcgatatttcagtcgttataatagagacataacaaatgacaacgagctctgcggtaaacgttaccgcgacttttcaatacaactcctccccaaaagagagcaaaaggcgagattcatttctcgccttttgctcttttctgcattactttttacagaaggcttttgaagtctccgcaaaaagcgaaaagagcggtaaaatcacgaaacgacgttctgcggcgtgccgttccggaacgctttcaggttctcggcgacagtcttaatgagacgggcgcgcgcgtctcgggacgcccacgcgatgtgcggcgtgacgatacagttttgggcggcgagcagcgggtcatcctttttcggcggctcgtgcacaaggacgtcaagccctgctccggcgatgcgcccactattcagcgcctcggcaagggcagcttcgtccacaactgcgccgcgcgccgtattgataaggaacgcagtgggcttcatcaggttaaggcgctccgcattcacaagcccgcgggtctcgtccgtgagcgggcaatgcagcgagacgacatcggcatttttgaaaagcgcgtcgagctccgcccactgataacgctcgggcagctcccgttttgtgcggctgtatacgagaattttcatgccgagcgccgcgccgagctttgagacggtctgcccgatatgtccgaagccgacaatgccgagcgttttgccgtacagctcaaacagcgggtgcgtgctgtggctcatcgtttcggctttatcccagtcgccgccgcgggtggcagcgcttattttttcggtgtgattgcacagctccaaaagcagcgcaaacgcctgctgcgcgacggtctccacgcaataaagcggcacattgcacacggtgatgcccagttctcctgcggctttgacatcgacagtattataccccgttgcaagaaggccgataaagcgcagcttcggcaatttctgcatgattttgcggcttataacattgcggttcaagatgacagcttcggcgtcctttgcgcgctccacgatttcttcgggcttagtggagtcatacacggtgacgctgccgagcgtcctgagcggcgcccacgagacgtcgccggggtttgtagagccgccgtccaaaataacgatatgcatagcgaggtcctttctgcttccattttttatcctacatgtaaaaatgtgttatggctctttctaacggccgtttctgaccgccgtttaagaacccccttgatagggtttcttacggctgaacagtcccccggactgttcgggctcgtcgtttctttcgcttgctattataccgcattttgttttttgtttcaacgattttgcgcgccgtttgtcaaaggattttgtcatcctctacacatatttgcagtttttaaaacttagaattgcaatttcacaaaaatccgattataataattctgttaagcgggaaacgttttcacggcgtttgccgcctgtgtattttcggcagataaacagaacacaaatagcagaataccgcggtttgcggaggaacgggggacttctatgaactacgatcgaacaccatttgaaacggacaagcccggcgaggaatgcggtgttttcggcgcatacgattttgacggacacgacatttcttcttccatttattacggattattcgccttgcagcaccgcggacaggaaagctgcggcatcgccgtcagcgacaccgagggccccaaaggcaaggtggattactacaaggacatgggccttgtaaacgaggtattcgacgaggagcgtctcaatcgcctgcacggcaatatcggcgtgggccatgtgcgctactccaccgccggcgcgagcaaccgcgaaaacgcgcagccgctcatcatccactatatcaagggcacgctggccgtagcgcacaacggtaacctgacaaatgccgttgatctccgcgaaaaactaaagtacagcggcgctattttccaaacgaccatcgattccgagacgattgcctactacatcgcacgcgagcgcgtacagacgaaaaacgtgcaggaggccgtcagccgcacgatggacaaaattgaaggtgcttatgccctcgccgtcatgtccccccgcaagctgatcggcgcgcgcgatccctatggcttcaagcccctatgtatcggcaagcgcgacaacacgtatttcctctccagcgagacctgtgcgcttgacgccgtgggcgcggaattcgtccgcgacgtagagccgggcgagattgtcaccatcacgccgaacggcattctctccgacaaatcgcactgcctccccgccgaaaagcaggggcgctgcatttttgagtacatttatttcgcccgcccggacagccgcattgacggcatcaacgtgtattccgcacgtctgcttgccggccgtttcctcgcgaaagattcccccgtggatgcggacatcgtcgtcggcgtgccggaatccggcaacgcggcagcacagggctacgccatggaatccggcatcccctacggcacggcattcgtgaaaaacaactacgtcggccgcacattcatcaaaccgaagcagagcagccgcgaatccagcgtgcgcgttaaattgaatgtcctgcgcgaggttgtcaaggataagcgcgtcatcctcatcgatgactccatcgtgcgcggcacgacgagcgaccagattgtgaacatgctgaaagacgccggcgcaaaagaggtgcacatgcgcatcagctcgcccccgttcctgtggccgtgttacttcggcatcgatgtgccggagcgtcaccagcttatcgcctataatcacacggtcgacgagatctgcaaggagatcggcgcagatacgctcggctatttacgtttagagcgtctgccggaaatggtgaacggtctcggcatctgcacgggatgctttacgggcgactaccccattcccgccccggaagaagacattcgcggcgaatacgaagcgtaatgcgtttctgccggcgaaaaggctatgctcataaacgcgtggtggattatcgtcattcccggcgtgtttctcatcgcaacactcctttgcatcaccagcctcggcagtaccctgcaaacgggttcgagccgccgccacagcaatttgtaaaatcgaatttacctgtatacacaaaaacgctcccggcataaatgtagatgtccataaaacagaatcagtcccggcagtaatgtctgccgggattgttcttgccgtacattgaagccatatgatatgattaaacagactgataaacttgagtttatttgattaaggagaattgaaaataatgttgaaattaaaaagattgtcagttgatgatggcttagatatttacacaatgctgcaagagatccctgctgaagaaaatggattaattaacaaagccaacggattaacatttgatgagtataaagaatggctgattgtaaaacagagggattctgagcaagaagggattgtagatggttggaaagtgccttctacaactttttggctatatgctgatggtattccggttggatttggttctgtcagacattttttgactgaggcactgagaaaagcaggaggaaatatcgggtacggaattgcaccagcgtttcgtggaaaaggatatggaaaagaactgctgagattattgcttaatgaagcgaaagaaatgggaatagataaagtgttagtaaccattcttttagataacatagcatctcaagctgtggcaatagcaaacggaggtgttgttactgaaagaactgacgagagagttttcatttggattgatactaagaaataaaaaggaaaatcaattccaatttgtcaaacagtaagggcgcacttctatacaccattcggtgtagtgcggtaatgtgcgattttgcaccgcatccaagcctcccgcgtcagagggagccatggatattccagctctaacataaaaaaagaatccgacctttgattgcagccataggtcggattcacttttttatgagcaaccagctaaaaaccgggagcatttttcgtttcgtgttttagcagcaaaggtgccgcttcaaaaacagtctgctgtataaggtttttattccgccttggaaagcagtccgtcgatgaactgacgggcgagtctcgcggagcggttgccacgctccagcgcaaagcgctcggcgagcaactccagttcctgcgtcggcatatcgatgccgttttcctccgcaaggtggcgcacgatgtgcaggaacgtgtccttgttcggcttgctgaacgtcacgtggatgccgaagcgctcggaaagtgatgcaagctcctgcatcgtatcgttgcggtgaatgtcatcgccctcacggtcggagaacttctccttgatgatatgacggcgattactcgtcgcgtagattgccacgttctgcgacttcgccgtaacggagccttccagcaccgctttcagtgcattgaagttatcgtcgtccttgaggaacgaaaggtcgtcgatgaacagaataaacttcagcgggttcgcagaaagctcatcgagaattttcgggatcgactgtaactgatccttgcgcacctcgatgatacgcaaaccctcgcgccacagcgcattgacgacggctttcaccgtagacgattttcccgtaccggcgtcgcccgtcagcaaaatgttcgctgcgggtttaccctcaagcagcgcctttgtgttatcgatgatgatctggcgctcgcgggcgtaatccacaaggtcggaaagctccgtcttgtccgggttgctgaccggcacgatctcggcattctcgccaaggtagaacatacggtttttggcgtaaatgccgtagccgtacttgccgatgttctcggtgcgctctgtgtagcacgctttaatgtccggcgcttcgctgacaaagccgggtaaaaagcccctatactccatcgcgctgcgcagcgtttccggcgtgagctccgccgtcatctgcagcgttttaagctcttccaaaacggcctcgcgcaggtaagcggggatctcttcctttttgcccacggcctgcacgtagacgttctcgctgttttcgcagatttcgcgcacatacgcgccgagtatgccgccgtttgcgcgatacagcgcagagacgaacgacgcatacagcgccggagacggctctgcgagatacttacgcagacgatttataaccgcatcttcctgtaattctctgaacaccgccaacgtggaaaggcggatgctcaactcctgtaaactacccatcagttcaaaatcgcccccgaagcaccgctggagaccagcgccgcatagcgcttcaggtagccggaaagttctttcttcttcggcacaaagttcttcatacgttcattgaggacagcctcgtccaccttcagctcaattttgttctccggaatattgatgctgatgacatcgccttcctccacaacgccgatggggccgccggaagccgcttccggggaaacatggccgacgcacgcgccgcgcgttgcgccgctgaaacggccgtccgtgatgagcgccacgctgttgccgagacccatgcccatgatagcagaggtcgggttcagcatctcgcgcataccggggccgcccttcggaccctcatagcggatgacaacgacgtcgcccggtacgatcttgcccgcgttgatggccgcctgtgcgtcctcctcgctctcaaacacgcgtgccgggccttcatgcacaagcatctccggcagaacggcagagcgctttacaacgctgccctccggcgcaagattaccgcgcagcacggcgatgccgccggtctgactgtatggattctcgatgggacggataacgttgtggttcaggttcacgcaattcttgatgttctcgccgacggtcttgccggtcacggtcatgcagtccgtgtgcagcagaccctttttgctcagctcgttcatcacagcgtacacgccgcccgcttcgtcaagctcttcaatgtacgttctgcccgccggtgccagatggcacaggttcggggtcttttcgctgatccggtttgcgatgtcgaggttgatctcgatgccgcactcgtgcgcgatggccggcagatgcagcatactgttcgtggagcagccgagtgccatatcgaccgtaagtgcgttcataatggcgtccttcgtcatgatgtcacgcgggcgaatattctttctcagcatatccatgaccgccatgcctgcgtgctttgcaagctcgatacgtgcggaatataccgccgggatggtgccgttgccgcgcagacccatgccgagggcttcagtcaggcagttcatggagtttgcggtgtacatgccggagcaggagccgcatgtcgggcaggtcttgcactcatattcgcgcagcttttcttcggtaatcttaccggcgttgaattcgcccaccgcctccgaaatggaggagaagctcgtttttgcaccgtctacgtggcccgcaagcatcgggccgccgctgacgaacaccgtcggaacgttaaggcgcgccgccgccatcaaaaggcccggcacgttcttgtcgcagttcggcaccataacgagcgcatcaaagccgtgtgccaatgccatggcttcggtggaatccgcaatgaggtcgcgcgtgacgagcgaatacttcatgccggtgtggcccattgcaatgccgtcgcataccgcgatcgccgggaagacaatcggcgtgccgcctgccatcgcaacgccgatctttacggcatccacaatcttatcgatattcatgtggcccgggacgatctcgttataggagctgacgatgccgacgagcggacgttcgatctcctcctccgtgaggcccagagcatggtacagcgcacggtgcggcgcgttctgcgtaccgattttcagagaatcacttttcattttatttcctcgatccgtgaaattttggctgtggcgcagcgtcccacatggaaaaacgcgccgtgtgtaaatagggtttaagccatagaggaaaactcccctatggctatccccttaaaacagattccgttcaaatcagttgttgatgagcttgtcctcgtcgctccagctgtacagcttgcggatatccgcgcccacagcctcgctcggatgctcggcagccagcttgcgcattgcgttgaagtgtacctggctgcctgcggaagacatgtcgagcaggaattcctttgcgaaggtgccgtcctgaatgtccttcaggatcttcttcatggtcttcttcgtctcctcggtgatgatcttcgggccggtgatgtaatcgccgtactctgccgtgttggagatggagtatctcatgccggcaaagccgctctggtagatgaggtcaacgatgagcttcatctcgtggatgcactcaaagtacgcgtttctcgggtcgtagcctgcctcaaccagcgtctcgaagccggcctgcatcagagcgcaaacgccgccgcagagaactgcctgctcgccgaagaggtcggtctcggtctcggtacggaacgtggtctccaaaacgcctgctcttgcgccgccgataccgagtgcatatgcgaggccgatgtcccaagcgtcgcccgttgcatcctgctcgaccgcgatgaggcacggtacgcccttgcctgcctgatactcgcttctgaccgtgtgacccgggcccttcggcgcgatcatgatgacgttgacgttcttcggcggcttgatgcagccgaagtgaatgttaaagccgtgtgcaaatgccagggtcttgccctcggtcaggttcggctcaatgctctctttgtatagtgcagcctgcttttcatcgttgatgagaatcatgatgatgtccgcagcctttgcagcctcggcgctcgtcatgaccttgaggccctgtgcctcggcctttgcccagctcttggagccttcatacagaccgacgataacgtcaacgccgctgtccttcaggttcagtgcatgtgcgtgaccctgcgagccgtagccgatgatggcaacggtcttgcctgcgagcttctgcagatcgcaatcctgctgataaaaaattcttgccatgataaattacctctttctgtgcatgaattggtatgttaatttaaatggacaaactaaattagaaattgatggcctgccggatcgtcgtgctgcccttttcaagggaaacattgccggtgcggcagatctcaaggatctcgtagtcgcgcatcaaatcgacgaattcatcgatttttcgcgattcggaggtcaggcaaagcatcagggaatccttggagtaatccatggtcttcgcgccgaacgcgtccgccgcggcaaggatgtcactgcgcgttttggaatcgtttttcagcttaatgagcatcagctcgcagctgacggaggtgtccggggtaaactctttaatggagcaaacgtccggcagcttataaagctggttcacgagctgctgcttctgcgtctcgccgccctcaaacgtgacggtgatgcgggaaagcgcgttcgattccgtttcgctgacggtcagagaaatgatgttgaactgacgtcttctgaacatgctcgtcacacggttcagcacgccgaactggttattgaccagaaccgctacggtatatcgattcatctcattcacccaccttcatgataatatcatccatgctgccgcccggcgggagcatgggcaggacgaattcgtccttatcgatcctgcaatcgatgacatacgggccgtcgcagctgaacgcatgctcaaacgccttgtcgagcgccgccacggtatcaacagcctcgccgtccgcgccgaacgcgcgcgcaagcgccacaaagtcggtcttgcggtcgagaatcgtgttggaatagtgcttattaaagaacagcgtctgccactgacgcaccatgccaagcacgccgttattcatcagaaggatgacaaccggcacgttgtaggttacggcggtggtcagttcgttgaggcacatgccgaagctgccgtcgcccgtgacgagcacgctgcgctcgcctgtgccgaccgccgcaccgatggccgcaccgaggccgaagcccatggtgccgaggccgccgctggaaatgaagcggcgcggctttttaaagttcacgttctgcgccgcccacatctggtgctggccgacgtccgttgcaacggcggtattctcgccgaggtgcttgttcagcgtcatgatcgcgttgcggggcgtaaggcccgggcgaatatcgagataatcgttttcggtttcttttaaggctttcacagccttttcccagtcgggcttctgctctgcgttgacgagcggaatgagcttttgcagcgtcagcttcacgtcgccgcgcaggccgcaggcggagttcacggttttcgagagctcggagccgtccacgtcaatatgaatgatctgcgcaagcttcgcaaacttctcgcggttgcccgtcacgcggtcgttaaagcgcacgccgagcgaaatgatgaggtcggcgtcgtgcatcgccatggaggaagcgtagtggccgtgcatgccctgcataccgaggaaacgcgggtggtcggtcggaatgccggaaagacccatcaaggagcagccgatcggcgcgtcaatcttctcggcgagcgccagcatttcttcctgtgcttccgatgtgatgagaccgccgccgaagtaaatgaacggacgcttcgaggcgttgatgagcgctgcggcttctttgatgcgcacgtccttcgccgcgtggcgttcttcgggctgtacgggtgcctgcggttcgtagtcgcagaccgctgtctgcacgtccttcggcacgtcgatgagcaccgggcccggtctgccggactgcgcaagcgcaaacgcctcgcggatggtgtccgccagattctccacggagccgacgaagtagttgtgcttcgtaatgggcagcgtcacacccgtaatgtcgatctcctggaagctgtctgtgccgatctgtgtcgtgggcacattgccgcaaatcgcaacaagcgggatggaatcgaggtacgccgtcgcaatgccggtcacaaggttcgttgcgcccgggccggaggtggacatcaccacgcccaccttgccggtcgctcttgcgtagccgtccgccgcgtgggcagcgccctgctcgtgcgccgtcagcatgtggcgaatttcattctgatatttataaagactgtcgtaaacgttcaggatctgcccgcccggataaccgaaaacggtgtcgcagccctgttcaattaaagttctgatgaggatatctgcacctgtaagctgcattcaattactccttcgttaagtattcaaggatgaggtcgccgcactttttgcagccgaccttcgtcatgccgtcttccataatgtcggcagtacggtagcccgcgtcaagatacttggaaaccgcatgctccaccgcatcggcttccttcgccatatcgaagctgtaacgcagcatcatggcggcggaaagaatggtgccgatcgggtttgcaaggtcctgacccgcaatgtccggtgcagagccgtggatcggctcgtacaggccgcagctcgttgcaccgaggctcgaggacgggatcatgccgatggagccggtgatcatggaagcttcgtcggaaagaatgtcaccgaacatgttctccgttacgatgacgtcgaactgtgccgggttcttcacgatctgcatcgcgcagttatcgacgagcatatcggtcagctccacgtcggtgtattcttccgccaagcggtgcatgaccttcttccaaaggcggctcgtgtcgagcacattgctcttttctacggagcacaaacggtgattgcgctttcttgccgtctcaaatccgatgcggccgatgcgctcgatctccgcttcactgtacttcataatgtccgtcgcgaccggctggccgtctgcatcatcggtcttatgctcgccaaaatagatgccgccgatgagctcgcgcacgatgatgaaatcaatgcctttttccacgatggattttttcagcggagaagcgtcagagagctgcggccagatcttcgccgggcggttgttgctgtaaacgcccatgcccgcgcgcaggcgcagcaaacccttttccgggcgcttcgggcccggcacgtcgttccacttgtcgccgcctacggcgccgagcagcacactgtcggaagctacgcacttatcgagcatttcctgcggcagcgggtcgccccacttatcgatggcacagccgcccatatcgacgtctgtataatgaaaggtgtgtccgtacagctctgcaattttatccagcacgcggagcgcttcgtttacgatctccgggccgatgccgtcgccgcggatcaccgcgatgttcttcgtcatttgttttccgcctccttgagggacttcagcaagccgcctgctttgatgatgttctgaatgaacggcgggaacggctgtgccttatacgtcttgccggtcgtgatgtcggtgatgatgccggtatcaaaatcgaccgaaacttcgtcgtttgcgttgatctcgtccgccgcttcctcgcactcgagaatcggcaggccgatattgatggcgttgcggtagaaaatacgcgcaaagctctttgcaatgacgcaacccgtgccgcaggttttaatgacgagcggtgcgtgctcacgggaagagccgcagccgaagttccagcccgccacaatgacgtcgcccttttcgaccttctttacgaacgccttgtcaatatcctccatgcagtggagcgcaagctcctgtgcgttcggggtgttgaggtaacgtgcgggaatgataacatccgtatcgacgttatcgggatatttgaaaaccttgccctgtgtgttcatgcttacgcctccttatattcggtgatgtagccggtcagcgcgctggctgccgccgtgtgcggagaagccaggtacacttcgctgtccacatgacccatgcggccgacaaagttgcggttcgttgtggcgatgcagcgttcgcccgctgccagaatgcccatatagccgccgaggcacggaccgcacgtcggggtagaaacaacagcgcccgcatcgataaatgccgtcacgtagccgcgctccacgcattcgcggtagatctgcatcgtgcccggaatgatgatgcagcggatgccgtccgcaatcttcttgccgttcaaaatgctgtacgccgcttccatgtcttccattctgccgttcgtgcagctgccgatgacaacctggtcgaccttaatatcgtgcagctcgcttgccgggtgtgtgttctccggcagatgcggacaggcgacggtcggcacaatctttgcgagatcgatatcgataaccttttcgtattccgcgtcggggtctgcttcgtatacaaccggctcgcgttcgcttctgtcctgtaaataggcaagcgtaatatcgtccaccgggaaaataccgtttttcgcaccggcctcaatcgccatattgcagatgcacaggcggtcgtccatagagaggttcttcacgccctcgccggtgaactccatgctcttatacagcgcgccgtccacgccgatcatgccgatgattgtgaggataacgtctttgccgctgcaattttccggcagcttgccggccaggttaaatttgatcgcggacggaaccttaaaccacgccatgcccgttgccatgccggctgccatatccgtagagccaacgcctgtggagaacgtgcccagcgcaccgtaggtgcaggtgtggctgtccgcgccgatgatgcagtcaccggcggtcacaatgccctgctccggcaaaagcgcatgctcaatgcccatcttgcccacgtcatagaagtggctcacgcagtggctgcacgcaaactcgcggcacgtcttgctctgttccgccgccttaatatccttgttcggcacaaagtggtcgagtacgatcgtcactctgtccttatcgaaaacgtctgtaaagcccgctttcttaaactcatggattgcgaccggcgtcgtgatgtcgttgccgagcacgatatccagctttgcattgatgagctgaccggcggtaacttcactgagacccgcgtgcgccgcaaggatcttctgcgtcatggtcattttcatttcagtttccccctttgatcatattgttgtaagcgctcaacagcgcctttgtattcgcctttacaacgtcggtgtcggtgcctgcgccccagaacatcgaaccgtcttccttttcaaggccgatgtacgaagccgccacgctctgcgagccctgcccctgcatactgtgctgggtaaagacctgcagggtgtactctgcaccggtgtacgcacgcagcgcgttgttgatcgcgttgagggaaccgttgccctccgcttccatctcggtctcttcgccgtccttcgcgaacgtgatgccgatcttcacgttgtccttgtcgcgcataaactcaaaatccgtcacggtaacaccgttcgtcagattgaggtagttctcttcaaagatattcagaacctcatccggcttcagttccttgtgctcgtggtcggaaatatccttgcacagatagctgaagtgctcgcgcattttcggcggcaggttatagccgtacgtctgctccagcagataaccgatgccacccttgccggactgggagttgacacggataacgtctgcgtcgtacgttctgccgatgtccttcgggtcgatcggaatgtacggtacgttccactgatgcagcttatttttcgctctgtatttcatgccctttgcaatcgcatcctggtggctgccggaaaacgccgcaaacaccagtgcgcccgcatacggggctctttcgtacacatgcatacgcgtgcatttttcatattcgtccacaaggtacggcatgtcggagaagtcaagcttcgggtcaacaccgtgggagtacatgttcatcgcaagcgtaatgacatccacgttgccggtacgttcaccgttgccgaacagcgtaccctctacgcggtctgcgccggcaaggagcgccagctcggtgtccgcaacgcccgtgccgcggtcgttgtgcgggtgcagagacaaagtcacgaattcacggtacttgaggttctcgctcatgtactcgacctgcgaagcatacacgtgcggcatgctcatttccaccgtgaccggcagattgatgatgacgttgttcgtctcgctcggctccagaacgtcgagaaccgcattgcagacctccagcgcgtattccggctcggtgcccgtaaaggactctggagaatactcaaagcggaagttgccttcgtattcggccgcaagctttttgacgagcttcgcgccgtctacggcgatcttcttgatttcttccttggacttcttaaacacctgctcgcgctgtgcaacgctgacggagttatagaagtggataatcgcgctcggtgcgcccttgcacgcgtcgaatgtcttacggatgatgtgctcgcggcactgggtgagcacctgcacggtaacgtcctcgggaatcatgttgttgtcgatcagcgtgcggaggaactcatattccgtttcgctcgccgccgggaaaccgacctcgatctccttaaagccgacctgcaaaagcactttgtagtattcaagcttttcttcaaggctcatcgggatgacaaggctctggttgccgtcgcgcatatccacgctgcaccagatcggcgccttttcaatgtggtctttttccacccacttgttatattctttcgataccgggaagtacccgaccttatatttgcttgcgtccatcattttgctttctcctctcaacccttggtggttctgaagcctgcttcacgcagggcgtttttgatcgttttcacatggttgttgtcgcgcgtctccatttcgatgcgcaggaagcagccgttaatgctttcggtgttgcccttttcataatgcacgccggtcacgttgccgccgcagtccgcgatgatcgaagagatctccttgagctgaccgggcttgtcgataagctcgatgaggaggctcgcggaacggccggagttcatcaggccgcggtcaatcacgcgggaaaggctcgtcacgtcgatgttgccgccggagacgatgcacacaacgcgcttgccctttaagtcaaatttattgaacatcacggcggcaacggaagcagcgcccgcgccctccgcgatcattttctgtttttcgatgagtgccaagattgcgctcgaaacttcgtcctcgctcaccagcgcgatgtcatccacatattttttgacaatctcaaacgtgttgtcacccgggcgctttacagcgatgccgtccgccacggtctgcacggtgtcgagtgtctcgatcttgccgtcgtgaatggagttgtacatgctcggtgcgccggtcatctgtacgccgtacaccttcacgctcgggcggatgtgctttgcggtatacgcaatgccggagatgagtccgccgccgcccaccggcaccacaatggcatcgatgttgtcaaggtcattcagaacctccagcgcgatggtgccttggcccgcgataacgtcttcgtcgtcaaacggatgcacgaacgtatagccctctttttctttcaattcaatcgccttgttatacgcgtcgtcgtaaacgccctccacaaggcaaacctctgcgccgtagccctttgtggcctccaccttggagatcggtgcggagtccggcagacagatgagcgatttgatgccgtttttcgttgccgccagcgccacgccctgtgcgtggttgcccgcggaacaggcaataacgcctttcgctttctcttctgcggaaagctgggagatcttatacgcagagccgcgcaccttaaaagagccggtgatctgcaaattctcgggcttaaggtacaggtcgcaatccggcgcgatgccgtaggtcttcacgacgtttgtttcgcggatgatgctctttagaacggtttgcgcatcaaatactttgtctaatgataacatgttcttctgcctttcctgctgtgttcggtttaaagccttatgaatttgaaagtttgtgctttcaaacttgcagcttgtttccttgttcttccgctttgaagtgtaaaaaaaccgcctcaaagccgtttatgctttgagacgggtgtaataactaaattatgcactcgcggtaccactcaaattgcggagaacctccgccactcttcgaagtccaataacttctatgcactgacgtagcaatcacgggataccctactgaattcgctgttcaggcatccggctcggaagggagaaatctctgcatctctgcaccggtttacacctgccaccggctctctgaaacagctctgcacagacagtcttcgtcatcgctttttgttatgaaattgaatagattataacacccactttccccgttgtcaatgcttttcgaccgccttgtcaaaatttttcttttgtaagttttgcaggaaactccctttcttccaccgttttttccttttttcgcaaatcgggcgctttttccgcaattcacgcaaaaagtgtggaaaacaacgtgcaaaatccgcagttctgccatagccaaaatataaaaggtatgataaaataagaaggttaaaaagagactatgtattttcgggtgattttcgtgacaaaaagtatgacagagggtaagcccctcaagcttatcctgcaatttgcggttccgcttttgttcggcaacctcttgcagcaaatgtataatctggttgatgccgccatcgtcggccgtgtgctcggcaccggcgcactcgccgccgtcggcgctacaagcagcgtgcagtttctggtactcggtttctgcatcggcatctgcatcggcttcggtatccccatcgccaaaagcttcggcgcagagcgtcttgataaaatgcgttcgtacattttcaactccgtgctgcttaccgccttattcgcggtgctcatcacggcggtatgttctctgtgctgcacgctcattttacaaatgctctccgtgccgcaggatgtttttgacgacgcctacgcgtatctcatcgtcattttcctcggcatcccctttaccttattatacaacctgctctccagcatcctgcgctccgtcggtgacagccgcacgccgttcctgttcctcgccatctcgaccgtcctaaatatcggtcttgacctgctctgcatcattgtcttcaagtggggcgttgcgggcgcggcgatcgccaccattgcagcgcaggcggtcagcggcattttgtgcctcatctatatccgcttccgcgtgccgctcctcacgctttcccgcgcagactgcaaagcggatgccgaatccatccgtgacctcgtcgtcatgggcatccccatggggcttcaaacctccatcacggccatcggcagcatggtcatgcaggcggcgaacaacggcctcggcagcgtgtacgtttcgggcttcacggccggcatgcgcctaaagcagttctgcatgtgcccgtttgatgccctcggctctgctgtttccgtcttctgcggtcagaatctcggtgcaaaaaagccggagcgcattcggcagggcgtacggctcggcgtcatcgtcggcgtcgcctacggcttctgcatcggccttgttatgatcttcttcggccgcagcatgtccatgctctttgttgaatcaaacgcgggcgacgtgctcgacgcttccgcaaaatatctgcgctgcatgggctacttcttctggagtctcggcatcctcaacatctgccgcatggcgacacagggcatcggcttctccggccgcgcggtattctccggcgtaacggaaatgttcgcacgctccatcgtcagcctcggctttgtcggcgcgttcggctatacggctatctgtttctcggatcaaaccgcgtggatcgccgccgtgctctacatcacccccacctgcctgcactgcattaagaaagtcacaaagcagatcgaagcggaaaaagcgaacgccaatctctccaaaaacgttggttaaagtttcgcccgcctttttcaataggcgaaatctttttgcctacccaaagtcagccgtaggaaacccagttgcatgggttttctaaagggcttgccaaagcaattctttagaaaaagctccccatctcaactatataaaaggaaaccatctatgaacgaaactattgtaacactcaaaaaaggcgaaggccgcgctttcaaggcgggcggtctttggatctatgacaacgagatcgaaagcatccacggcacgttcaaaaacggcgccgtcgtcaccgtgcaggagcaaaacggctgcccgctcggccgcggcttcatcaaccagaactccaagatccgcgttcgcatgctcacccgcgacgcgtcacaggagattgacggcgcgttcctcgagatgcgcgtgcgcaacgcctgggcataccgcaagcgcacggtcgatacctccgcctgccgcgtcattttcggcgaagcggatttcctacccggccttgtcatcgataaattctccgatgtcctcgtcgtcgagtccctcgcgctcggcatcgataaaatgaaactgcagatcgttgacatcttaaagaaagtcctgctcgaagacggcatcaaaattcgcggcgtgtacgagcgcagcgacgccaaagagcgattaaaagaaggcatggaccgcaaaaagggcttcatcggcgacgaattcgacaccgatgttgagatcgtcgaaaacggcgtgcgctacatcgtggacgttaaagacggccagaagaccggctttttcctcgaccaaaaatataaccgtctcgccatgcagcgcatctgcaaggatatggatgtgctcgattgcttcacacacacgggctccttcgcgctgaacgccggcatcgcgggcgcaaagcacgtccttggtgtagacgcgtccgagctcgccgtcgcgcaggcgcagaaaaacgccgctctaaataatctttccgatacggtcgagttcaagtgcgccgacgtttttgacctgctccccgcgctcgaaaacgaaggcaagcagttcgacgtcgtcattctcgatcccccggcgttcacaaagtccaaaaacgccattaaaaacgccgtcaaaggttaccgcgagattaacctgcgcggcatgaagctcgtcaaggacggcggctaccttgccacctgctcttgctcgcactacatgaacgccgagctcttcgcccagaccattgggcaggccgcgcgcgccgcgcactgccgcctgcgtcaggtggagttccgcacccagtcgccagatcatcccattttgtggagtgccgacgaatcctattacctcaagttctatatttttcaagtctgtcacgagcactgaggaggcgcttttccttgaaattcacaaacgacctcgggtcggataacatcaaaggcctcgtctggaccttggccgttccctccatgctctcgcagctcgtcagcgtactgtacagcattgtagaccgtatgtacatcggcaatattccgaacaacggcacgcaggcgctcgcgggtgtcggcgtgtgcggccccatcgtcacgctcatctcgtcgtttgcgtttctcgtcggcatcggcggtgcgccgcttgtcagcatcaatcttggcgaaaagaacatagacgccgctaaaaaagtcatcgcaaactgcttcgtgtacattttggccctcgctgtgcccgtcacggtgttggcatatatcttccgccgccccattttgctcacgtttggcgcaaccgaggccgtttacccctacgccgaaacctacttttcgctctacctgctcggcacggtcttcgccctcaccgccacaggcatgaaccagtttatcatcacacagggacacagccgcagcggcatgttctccgttttaatcggcgccatcatcaacattgtgctcgaccccattttcatcttcgctctccatatgggcgtcgcgggcgcggccatcgccacggtcatttcgcaggttgcaagctgcgcgttcgtgctgtgcgtcctgttcggcaaacacatcgaagttcccatcacatttggcggatatgatttaaaagtcatcggccgtgtgacgagcatcggcatgagcgcgttcctcattattcttttcgataacgtcatgctcatctcgctcaacatgatgcttcagcgctacggcggcgacaacagtgacatgctcctcgcctgcaacaccatcgtgcaaagcttcgagctgcttatcaccatgccgctcggcggcctcaccatgggtacacagaccattttaggctacaatttaggcgcacgccgcccggagaaaatccttcgcgcgcagcggtacatcttcgtcatcgcggtcagcttttgcgccctcatgacgctcgccgcgcagaccgtcccgcatctctttgcaggcattttcaccaaagaacccgaatacattgccatgacggcgcggctcatccgtatttacacgctcggcaccgtgttgcttggcatgcagtacgagattgtggacggctttacgggtatgggcgtcgtcaaaatcgcgctgccgctttcggtctttcgcaaggtcgtcttctttgcgtgcattttcatcctgccgcgcttcctgcccatcgagcaaatcttcttctgcgagcccatctcggatattttcccgccgctcgtctccattttggtctacgcactcaccatcaaacgcgttattaaccgcggtccgcaaaagcagaccgcctgacttctgtaaatcttttccgaaaggactgttttaaatggcatttcgttccgtaccgtatgactccctgtctttaaacccgttcacaaaaatcggcaaagagtgggccctgctcaccgccggcgatgaaaacggattcaacaccatgaccgtctcctggggcgccatgggcttcatgtggggcaagccgtccgtcaccgtgtatatccgcccgcagcgctacacgaaagagtttgtcgatacccgcgatactttcacgctctcgttctaccccgcagagaaaaaagacgcactctcctacctcggtaaagtttccggccgcgatgaagacaaggtcaaaaaagtcggcttcaccccggcgttcacaaacggcaatgcgtattttgaagaagcggagctcgtgctcgtctgccgcaaaatgagccgcacgccgttaagacccgagcagttcctcgacgaaaccgtagacggacgctggtacccgaacaaggactaccacgaaatgtacatcgcagaagtcatcgatgtgctcgtcaaagaatcataaaaagcacaaaaccgccgcataccggaaaaatttcggtatgcggcggttttctcatatctatcctgtttttaaacgcattcaccgaagcaatccttaatctccgtcatgcgcgtcatctgctttgcgccaaacggacagcgcttcggcaagtatcgcgttatcaaacccagagtctttttcgcgtgtttttcttgcgattttgcagggattgtgctaccatgtttcctataaattcaaaagaggagggacaccgtatgacgtttgtctccacaaaaaaattagaaaagcccatcccggagggcatgtccccgcagaaagcaccgtgcgggtctgcctttgcaagataaaaaattcggaggtatttcccgtgtctgataaacttcaaaaatccccgctggcggtcgttttcaatatcgtgctcgccgtcgcgctcgtgctgttcatcatcagcgccgctgtcgtcttcacactcaatttccgtccgctctattattttgacgttgaccatttaaacatcaccgccatgtccggcctgccgcgcgaggaaattttgcagaactacaacgtgctcatcgattacaactccattttcggcacaaaagttctgaatttccccacgcttgccatgagcgagagcggccgcatccattttgaagaagtcaaaaacgtgttcggcgtcttcgagatcacgctcatcatcagcggcattttgagccttgcgggcatcatctaccgccattttaaaaagaacccggggtatctgctgctttccggcattttaacggtcgccattccctcagcgctcggtgtactcatcgccttaaactgggaaacggtgttcgtcctattccataagattgtcttccataacaactattggatcttcgatgccgcaacagaccccgtcatcaccattttgcccgatacctttttcatgcactgcgctttgatgatcttggcgctcgtggtactgggcagcatcatctgcctgctcgcatacaggcacgcaaaacataaaaagacgcataccgcctaaagctttgctgaagctccgcttttcacactcaaacaaggagggatctgctttgcagacctataactggccatataaaaatgaattagacatcaccgaaacgctttcctgcgacgttttggtgctcggcggcggccttgccggctgctatgccgccatcgcggcggcacggcgcggacagtccgtcatcttagtggaaaaaggcgccaccgcccgcagcggcagcgcaggcaccggtttcgaccattgggaatccgcctgtacgaacccctgctccaccgtcacgccgaaggaaatcgccgaagcgtacgtcgatgagcagtgcggctactctaacggcatcgcgcactacatcgagtgccgcgagggctacgaccgtctattagaccttgagtcgttcggcggcaaagtccgcgacaccgacgatgaattcaagggcgcagagttccgcgatgacgaaacaaagctgatgttcgcctacgattataaaaataaattcactctgcgcgtctggggcagcacctttaagcccgctcttttcaaggagcttctgcgcctcggcgtgaaagtgcttgaccgcaccgaagccaccgcattgctcaccaccgcccgaaacggcaaaaagcatggcgcgggcgcctgcgccatggacgtgcgcaccggcaaattctacattctccgcgccaaagagaccgttctcaccatgagccgcccggcgcgcgtctggctttttaacccggatatgaccggcctatgcgagttccgccccatgcagagcatcggcagtggccacgccatgggctacaaggccggcatcgagttcaccatgatggaaaaatccgtcaagggcaagttctccgccgccggccgcagctttccgccctacggcgcaggcaataaccacaacacgtggtatgccgcaacgatggtcgacgcccgcggcgtggaaatcccttacgtcgaccgcgacggcaatgagcttaaaaccgtctccgagcgctactaccccgctcccggccagaaatttttcttaaagggcggcgtcatcgataacccgaagtacgagtaccgcggccccgaaacgctcgattttgaagaactcatgcgccgcggctaccagctgccgttctacgcagacctcagccgtatgcccgacgcggagcgccgcgtcatctggggcatgatggtcggcgaagagggcaaaacaaaaattccgatcctcaaaaattacacggagcgtggcttcgaccccaaaaagcatatgctgcaaagctacggcacgggctggcagtccgcaaatttccttgagcaggaacggcagctgttcggcgcaccgggcggcatttggcacgattgggacctcaaaacaaacatcgacggcatctacgccgccggcgaccagctctacgcttcggactgcgccggtttcgcctgcgccacgggctactacgccggccgcaaagccgccgcagctgccaaaacactcgataccctgcccgactataatgaagcggaagccgcagccgagcgcgaacgcctgctcgcccccatccgccgcgaagacggcatggattggcgcgaactcaacatggccatctccaaagccatgcagaactactgcggcggcgtaaagtgcgatgcgcttttgcatgagggtctcgacctgctcgaaagctttgaaaccgagattgtcccgcagatcagctgcaaaaacccgcacgagctcatgcgcgcgcacgaagtctttgacattttgaccgtctccaagttaattttgcacgcctgcctctcccgcaaaacgtcgtccgagccgctgtttttcaagcgcacggacagcaccgagaccgaccccgagcgcgaccgccgcttcatcaccgtccgacaagaaaacggcgaagtcatctacggcagccatccgctctactatttcggcgacctcgagaccgaatacgaaaagcgcaatcaggattacatcaaaaacgagcagaagggggcgtatcggaaatgagcgagcttcaaaacaaaatcctcacggcagaacccgtgccgtgcagcacacacccgatcctctacgatgaaaccaaatgcgtcggctgcaacgcctgcgtcaacatctgtcaggtagatatcctcatcccctcgcccgaaaaaggcaagcaccccatcgtgctctaccccggcgagtgctactactgcggcgcatgcgtcatggcctgtccgcgcgacggcgccatccgccttgagcatcccctcatgaaccgcgcaaagtttgtccccgtccgctacccggaagataaataatcaaaacacaaaaacgaaagatgccctgcctgtgccaaaaacacaagcagggcatcttcttatttcttacggtacaaaatgaggctgtcgtgcaaaacgccgtcctgttcctcgcgctgcggcacaaggcacaggtcacaaaaccccgccttgcggtaacacgcgatcgcacgtaaattgtgcgccttcgggtcaatgagcagcacatcggcatgatatttttcaaacaacgtctccgccgtcaaattcatgatgcgcgtcccaacgccatggtcgcgctcaccgacttccccaatgaacagatcaatgccgtaaaccacttcgcccggctttaccgcccgcgcccagtccgcttccggcatttcgtagtcctccgcagagtcgattttctcaaactgcaaatatccaatgtccctgccgtccttcatcaaaatgcacggcgtaacgttcgcgtccctatgccggtaaaaatcacgcagtacgcgctcgcgggtaaagtgcaccgtcatgccctcccagtagcgcatcgtctcggggtcggtcatccagcgcagcatcaggcttatatcccgctcgttttcctccatgcgccgcacggcaaggctgttctctttcgcaataaactccataaaaccacctacgcaaaagcgggcggaagccttgcccccacctgcttgatatttacgattcctgttcctcaaaagatgaatcagaagatcagctgttgatcagctgcttatacagacggatatagtcgtttgcggaacggccccagctgttatcgcacgccatagcgcgctccacaagcaccttccagccgtccttgctctcgttatacgcatagatcgcgcggtgcacggagttcagcatatcctgcgtgtcatacgtctggaacgtgaagccgttgcccttgccgtcgccgctgtccgtaatggagtccttcaggccgcccgtttcgcgcacgaccggaatggaaccatagcgcagcgccaccatctgtgaaagaccgcacggctcgctcttgctcggcatcaggaaaatatcggagccgccgtagatcttgcgcgcaagctccggcacaaagccctggcacagcacaaatctgcccggatacttcgcctgcatctctttaaagaactgctcatactcccagtcgccgctgccaagaaccacaaactgcgcattcgagtacgtcatgatgttgtccacgccgccccttacaaggtcaagtcccttgtgggagacaaggcgcgttaccataccgatgagcggcacatccgggtcaacggcaaggacgaggcgctcctgcagctttgccttgttgacggctttgccctccaggtgctttgcgtcatacgtctcatacaggttcttatccgtcgccgggtcatagcccaccacgtcaatgccgttcaaaatgccggaaagcttccaggcacgctcgcgcaaaatcgggtccagcttgtgggcgaaccacggatcaagaatttccttcgcgtacgtcgggctcacggtagagacccagttcgcgctctcaatcgcgcccttcatcaggttcacgcaatcgttgtattcgagtaagctctgctcgctcttcggaataccgaaaacgtcctccagaatctcaaaaccgtactggccctgatactggatattgtgaatggtgaacagcgtcttaataccgctgtaccagtcgttgtttgcatagaacaaacggtagtagatcggcaccagcgccgtctgccagtcgttcgcgtggatcacatcaggcttaaattcaatgtacggcagcatctccaaaatggcacgggagaagaacgcaaagcgctccgcgtcgtcaaagtgaccgtaaagtccttggcgcttaaagtagtactggttatcgatgaggtagtaaatgacattgcctaccttcgcctcaaaaataccgcaatactggcgacgccaagccaccggcacactgatgcttgttaaaaacttcatgttgtcgcgtaattcctgcggcacgctttcatacagcggcatcaccacgcggcaaccaatcagacgtgcgcgcagcgcctgcggcaaagaacccgctacgtctgcaaggccgcctgttgcggcaaaaggcaacgcttcactggcacaaaataaaactttcatatcaattacaccgctttcctttccttcatttttcggggcagcttagaccttgctttcctttgcaatgtacaccgggtaggtttgatagcccatcagcgtgcggttctcttcaatctccacgttcttgtccgccacaacataatcgagccgactgttcgcgccgatgaccgtgtcctgcatgataacgcagttgcggaccttcgcgcctttgccgatcttcacgccgcggaacagcacacaattttccacttcaccgtctatcacgcagccgtctgcaacaagacagttggtggcatacgaattcaaaccgtatttcgccggcatatcatcgcgcaccttcgtgtagatcgggcggttcggattgaacagctctgcgcgcacgcgcggatccatcaaacccatgttagcgttaaagtacgcttcaaacgaggaaatttgatatgcaacgcccttaaattcataacctatcacgcgcagttcgggaattacgcgctgaaccatatctttatcaaagtcatattcgttgcggctcatgcatccttcaacgagctgaagcagcagttcgcggctaaggatatacatgccgatgccgtaatttacaccgtgctcgcttccgcggtgcaaaagcagctcgcgaatgcggttctcggggtctaccatatagatgttgttgcggtccacgtccggcgaagtgccatggcggtaaatgaccgtaatgtccgcgttctggcacacatgctgctccagtgcctcgcggtaatcgatattgcagaccatatcgcaatcggagagaatcacatattcctcaagggaatttttcaggaagcggcgaatggaatcgagcgattcgatcttgccgtcggttctcgaagtcgatttgccgaacggcggcagcaggtacaggccctcgcgctttctcgaaaggtcccatgccttgccggagccgaggtggtccatcaaggactggtagttatcctccgtgatgatgccgaccttgttgaggccggagttcaccatgttggagagggtgaagtcaaccaaacggtaacggccgccgaacggcacggaagccattacgcgcagctccgtcaggtcgcgtactctttcttcgtgtgcataggcaaagatgatgcccaaaacattatttccaaacattatgcctgcgcctccttatcgatcatttccttcggcgccacaacggtgccctcagagagcttgcaatccgggcctacgaccgccacgccccaatcgtctctgttttccatgtcctccgggcgtttaccgatgacgcagttcttgccgatgacggcgttctccgccacgatcgcatactgcaccttcgcgccttcttcaatcacagcgcccggcatcacgatggagtccgtcacagtcgcggtcggcgccacataaacgccgtggaacaatacggagaactcaagatcgccgtatacgttgcagccctctgctacgagtgagttctgcacctttgcgccctttgcaatgtaatgcggcggcatgaccgggtttctggaataaattttccaatcttcgcgggaaaggtcaagaccggtcttcgggtttaaaaggtccatattggattcccacaggctgtcaatcgtgccgacgtccttccagtagccctcaaagcgatacgcaaacatacgctcgcctgcgttcagcatggtgggcagcacatccttaccgaagtcattcgaggagttcgggtccttctcgtcctcttccagatacgcgcgcagctttttccaagagaagacgtaaatacccatggaagccttgttgctcttcggaacagccggcttctcgtcaaattcgtaaatggagccgtccgggttcgtgttcagaataccgaagcgggaagcctcctccatcggcacttcgtaaacggcgatggtgcaggccgcatcgtgctccttgtgatacgcaatcatcttggagtaatccatcttgtagatgtggtcgccgctcagcacaaccacgtaatccgggttgtagcgctcaataaacgggatattctggtaaatggcatttgccgtgcccttgtaccagtcagagccgctgctctgctcgtacggctgcaaaatatgtacgccggcgttcatactgtcgagatcccacggctggccggaaccgatgtattcgttcagctcgagcggctgatactgtgtcagaacacccacggtctcaatgccggagttcacacagttggaaagcggaaagtcgataatacggtacttgcctccaaacggaacagccggctttgcgaggttcttggtaagaacaccgagacggctgccacggccgcctgccagcagcattgcaactacttcttgcttaggtaacatgactgatgatcccctctctggtagatttcgagcgttccggcattttgccgccgcccgtatattgtttcatgtaaaatgaatcaggcttttttctttgcggcttttgtgccggctgcctttttggccgcgggcttctttgccgtcgtctttgtcgtcttcgctgcaggcttctttgccgccttgcgcttgcagcgcaggaagaataccgtgttctccggcaacgtcagtgaaatgctctgctcaaagccgtgcatcgcttcatccacggtgcgaatgttgttgccgttcgtaaagcccgtgccgccaaactccgcagcgtcggaggtaaacacctcttcgtaaacgcccgcgtacggcacgccgatgcagtaattctcgcggcggaccggcaggaaattgcacacggcaatcagctcgttgccctcacggtcaaagcggcggaacgcaatgacgctctggctgtcgtcgtcgttcgagatccacgagaagccctcccacgagaaatcgatctcccacagctcggaacggccgaggtagaacgcgttgagctttttaaagaacgtctgcgccatctggtgctcagggtattgcagcaaattccactcgagttcttcgttaaagttccactcgtcgtgctgcgagaactccgtgcccataaactgcaattttttgcccgggtgtgccatcatgtaggttgcaaagcagcgtacgcctgcagccttttcctccggcgtgcccggcatcttattatagagagaacccttgccgtaaacgacctcatcgtgcgagatcggcaaaatgaaattctcggagaacgcatagaagaacgagaacgtcaggctgttgtggttgccctttctaaatagcggatccaaagacatgtagcgcaacatgtcgttcatccagcccatgttccatttataattgaatccgagaccgcccatgtaagtcggcttcgtcaccatcggccacgcggtgctttcttcggcaatcatcatgacctccggcacctcggcgaaaatcgcctcgttcagtctttgtaagaacgcaatggcctccagattttccttgccgccgttcttattcgggatccactcgccgtccttgcggttgtagtcaaggtacagcattgaggccacagcgtccacgcgcaagccgtcaatgtggtattccttcacccagaacagtgcgctgctcatcaaaaagctgatgacttccgtgcggccgtagtcaaacaccagcgtgccccactccttgtgctcgccctttctcgggtctgcatattcatagcacggcatgccgtcaaatttcgcaaggccggcctcgtcgcgcgggaagtgtcccggcacccagtccataatcacgccgatgcccgcttggtggcagcggtcgataaagcgcataaagtccttcggcgtgccgtagcgggaggtcggcgcaaagtagcccgtcacctgatagccccaggaagcgtcgaacgggtattccgtcaacggcatcaactcaatgtgcgtaaagcccatttcctgcacatacgggatcagctcgtcgccgagcttgtcgtaagagaacacgctgccgtccgcatatttgcgccaggagcctgcgtgcatctcgtagatgttcaccggctggttataatgcgggtattttttcttgtgctcaaaccagcggccgtcgttccacttgtaccccgaaatgtcgtagtagcgggaagccgtgcccggacgcgtctccgcgtggaacgcatacgggtcggccttgtacgtcaccgtgccgtcctccgccgtaatgacgagcttatacgcgtcaaattcctttaagggttcgtccgtatagccctcccaaaccgcgtcgtcgatctttgtaagcggatacttttccggatcccattcacagaaatcaccggtaatggcaactgcctgcgcgttcggcgcccatacgcggcacacggtgcatgccttcccgtccttcaccgtgttgtgcacacccatgtattcgtaggaatggctgtttttgccgctgcggaacaaataaagcggaacattgccttccggcgccgttttgtttatcatctcactcatacgtcctgtcctttccattcggaacattccggcaaacgccggcggtgcatgccattctcatttttgcacccgcagtccgtccgaattttttgccgcacagcgtcttattttcctattttccgtgccgttcaatttaataaaagacgctctgcaccaatgtttatactaataataccacaacaagaaaaaagttcaagggtttttagctaatttctaacaataatccatgaaaactcacttcggtttgtatagtttcaataactaaccaccgataaaacccacataaaggcaagcttctccgccgcatttcagcccacttgcggcgttccccgtgtattctgtgttttcagtatactgcccccgcgttaaatacagtgtcggaaaaaggaaagtttactgaaactttctgtaaatccctccgcaaaaatcacgtcatccccaaattagcgtttgacaaatcccattttctgtggtaaaatacataacacagttgatatggaagcgtagctcagctggttagagtgcctgcttcacacgcaggaggtccgcggttcgagcccgcgcgtttccaccaagctttgttctaatgtatgtgcatagccgaatagccgctatgcacatcgattaaaacaaagtatttcgttttaataatcctgattttagcgacccgttctcaaacgccgttcctgaggcagattaggtttatccaatcctgtataccaagtatttcccattgcagaggcgtgcaaatgcacactgatttgcgccgggtattctcgcctgtgggttcattcggttttcaaggtgcgaaatcagaaataaaaaaggctctccagacaagcatctgaaaagccttgaaatatcgtttggcttgtgctataatctaactaagtgttagacatgaagcacccctcttgtaaaaaacgtcctatcggcgtcttttcgcgaagttttcagatggtgtaacatctggaatcgataaacgatttggtagatcgtttatcgaccgagaagcgtccgtagcggacgttttctttatttctgcctaaaattatagcacttctttcccccgctcgtcaacgcaaaataagattgtttctgtattttcaacaaggtatcgcaattttgctcattacgtaacccgcccctgcttttctctcatcaaaaaccggcaacattgccgtttttcgcgcttgacaaaacatcaaaagcgtttataattagaaatagaaagagtgctgccgatgaacggttagccctcagttcagcttaaagaaatgagccgagaccttgggcagggcggctcatttctttttatgtttacgatcacgaaacagttcgatcaacgcaataacgacaagtgccaactggcacaaatcgctaaagttcagctcgagcttcataagcgtcatccctctctccgtgttggattgagggattttttcatattcaagaaatgttccctcacacggtacaccgaagtgtatctgagggctgaaccgtccaccgttatggcagcacccgaaccgctatcacggtccttttaaattctaccagaaattcttttatctggcaagttttatattcacacagaaaaagccggcaacattgccggttttcctttatgcatcaactattgtatttttagttcactgtggatcaattttaagtcatcgccttttgtcttaagaaaggtgttttcttcgtaaaaaatgaacacgcgtaactttacttcaaaaatatcgggaataacataaaaaaggcgactaactaaaacatcttcattttcgtatacatcgcaatcgactttcggaaacccaaacatttcttctattgaccacgcgatttttccttttttccattgcaaatattgtcgatacaattcttccttaagcactataactcatctccaatcaagtaaacttacaatttcttcgttctttctatgagattaagccaatatcataatagcatttcaatttttatttgtcaaataaattatttaaaataggtattgacttataaatcgttttactgtaatctattacttgacaggaggtatctccactatggctatcgataccatgaaaaaaggctcaatcgaaatgctcacgttgtttttgctgtgtgaagaagacacatacggctatcagcttgtgcagaagatcaaagagcgaagcaaaggtttaatcacagtgcaggaggggtcattttatccgcttctgtatcgcttggcagacgatgggtacatcaccggtcaggagatcgtaacacgcatgagcacggggcgctcccgtatgcgtgtgatttatcatatcgaaaatgccgggcgcgaacggttagcatctttaaaaaaggattacgaaaccgttcagcaaggaattcataacattcttgattcttaaattggggggatatgggatgagcgaaaccgtaaatgttgtccacgactatctgcgtcgaatagacaaagaaatgacgtgtgacaaaaagaagaaaaagcagtttttgcagcgactgcaaaatgacatggaagattttgctgatagcacaacaactacgctgaccgaaaatgacttagaaaaacatttcggcacaccacaaagcatagccgaaaattttctgagcactgaaccgtacaatgaagtaaaacgaacatttaagcaccgaaaagctgtgcgcgtttttgtaatcgccacagttgtatttgctcttgtgtgcgttttgggatatattctgtttgataactggcgggaacgacagttcgaggatgggc

SEQ ID NO: 1793 - DNA, 1879 bp, Unknown
  gut microbiota DNA sequence
atccggcgctgtgttcgcgcagagccgtgtccgcgccggagacggccggacgcggacacggggatatgcagttcctccgggctgacggtaagtgaggagattggttgagatcgcaaaaacagaatgaaagaagggcagaaaattcatgccttggtaattgataggtaagttcagaatgcagcccggcggaaacggaggcggggatcaggcgttgacgccgttgcggatggccttgaccttgtcgtactcgccgttgacgtagtacagggcgttgtccatcgagagctttgccacgaggtagttggacgtgtcggagtaataaccgctgtgcggcgtgagcagcacgtcgtcgcggccgacgagcgggcaggtatccagatcggggtcctcgctctcgaccatgtcgagcgcggcgccgcggatgtagccgttatcgagcgcccagacgagatcctcgtcgcagatcagcggaccgcggccctcgttgacgatgatggggtgctttttgcacttcatgaacgcttccttgttgaacatatggtagttctcgtcggtgaggttcatgtgcaggctcagcacgtcggactcggcgagcagggtgtcgaaatcgacaagcttgacaccgaggttctcggcgatggcgggcggcaggaacgggtcgtaggcgatgacctccatgtcgaacgccagcgccttgcgggcgacggactggccgatgcggccgagaccggcgatgcccatgacctgaccggcgatgcgcttgagacccggcacgacctgatagtcccagacgtggtcctgctggacgctgcggtcatactgacggatgccgcgctggaggttgagcatgagcgccatggcgctctcggcggtctcctgcgtgcagtagtcgaggatggagcagacggcgatgcccttctcgcgcgcatagtcgagatcggcctcgttgtagcccgtggactggaaggagatgaccttgcagtgatccatggcgtcgatctcctttttgccgaagtggacgtagccgtcgatgatgatgtcggcgtccttgatctcggcgtaaaacgcatcgttattctcagcgtgctcgtcgaacacggcgatcgccagctccgcaccctcggggaggcaggaacgctcgatgctgatgtctctgtctttggtataaggtacttcggccagaacgattttcatagtaagctctcctttttcattactgaatggcgccgctgtccttcatggcggcgatctccgtatcggtataaccgaggtcgtggaagatgctgtccgtatcggcgccgaggcggccggcggacgtgtaggggcgcatggcgtactccgagaactgcatcggcgggcacggcatcatgacctcgagatcatccttgaaggtgaccttgcgcacgtagccgttggcgatggcctgctcgtcggtgctcacatcgcggatggagcgcatacgctcgcaggagacgttgttttccgagagaaaggcttcccactcggcgacgggcttcgtcttgaaaatggcgttgagccgcgtgacgacctcgacgacaaagtcggtctcgtgcagcgcctccagactggcggcacggggatcgtcgaccagctccggcataccgaagaggtttgcaaacttcggcagctcgcggcggtattcgttgtcaaacacgccgatccacttcccgtcgctgcactggtagaagtggcagaacgggtcggacgggcgcagggggtcgttcggacggtcgccgccgaactgcggctggtgcgacacgacgccgatggcgttgcaccagatgccgctggcaaacagcgacgtgctcacaaacgtgcccatgccggtgctctttttgccgatgagcgccatgaggat

SEQ ID NO: 1794 - DNA, 1220 bp, Unknown
  gut microbiota DNA sequence
gccctgattcttctaaaaggaggaaacgcgatgtatcgaagcgtattggccctgctttttgcctcggttctgctgctgggcggctgcgccgccgggcagcagactgtgccgaaggaaaaaagcggacaggaagcaaccatggacggatcggcctttgatcggtccgacgatgagatcacttatatggataccacagaaaatgtcatctatctggcgggcggctgcttctggggcatggaacagctgatgcagtccatccccggtgtcatcgatgccgagagcggctacgccaacggcacctgcgaggcggacgccgattacaagaccgtttgcaagggcgagaccggctttcgggagaccgtgcgggtagaatacgaccccgagcaggtgagcctcgatgcgctgctgttggcctacttctatgtgatcgaccccacggtacaaaaccaacagggcaacgaccggggcagccagtaccagaccggcgtctactacaccaacgaaagcgcgaaggagacggtggagcgcatcgcggagatcgagcgcggccgcagcgagaagttcttcgtggagatcggcccgctcaagaactactatcccgccgaggaataccaccagaactacctcgaaaagaatccgaacggctactgccacatcccgcgcgcggagatggaactcttctccaaactgcgcatcgacccgggcgactatcagaagcccgcggcagagtccatccgggacaagctgacggcggagcagtaccgcgtcacgcaggagagcgacacggagcgcgccttcacgggcgagttttgggacaagtttgaaaagggcatctatgtggatgtcgtgaccggtgagccgctcttttcctccacggataagtacgagagcagctgcggctggcccgcctttaccaagcccatcgagggccccgccgtggtggaaaaagaggatctgagccacgggatgcgccgcacggaggtcagaagccgcgccggagactcccacctcggccatgtgttcaccggcgatccggagtcccccaatggcgtgcgctactgcatcaacagtgcggccctgcgctttgtcccctatgaaaaaatggaggccgagggctacgggtacctcctgtacctgtttgagaaatgatttcaggtgcatacacatcaagcagaaaagtaaggtggctgtccttttaaagggcagccaccttactgcag

SEQ ID NO: 1795 - DNA, 6704 bp, Unknown
  gut microbiota DNA sequence
tggatcgtgcagaatttggagaatgcacttgaaacttggaatgaaaagctggcggagatctggcagctcattacgcagtcgccggagcagttcaagggcggcacgatctggaatgtgatcgtcggcatccacggtgcggtgcaggccatcggccttgcgctgctcgttttgttctttgttgtgggcgtgatgaaaacctgcggctcctttgcggaactgaagcggccggaacacgccctcaaagtgtttatccgcttcgctctcgccaaggccgccgtcacatacggcttggagctgatgatcgccctgttcaacatcgtgcagggtctgatctctaccatcatgaacgccgcaggatttggggcagcgcaggaaaccgtgctgcccgccgagatcgtgaccgccgtggaggattgcggcttttttgaaagcatcccattgtgggcagtcaccctgatcggcgggctgtttatcacggttttgtcgtttattatgatcatgaccgtgtacggcagatttttcaaactttatctctacacggccattgcgccggttccgctctcggcctttgccggagagcctacgcagaacatcggcaagagctttatcaagagttatgtctccgtttgcctggagggcgcgatcatcgtactggcctgcatcatcttctccctgtttgcatccagcccgcccgtcgtcgatcccgacgctgcggcggtgacgcaggtgtggtcgtatgtgggcgagctgatcttcaatatgctggtgcttgtcggcgctgtcaaaatggctgaccgcgttgtgcgtgaaatgatgggactgtaagtataattgcagaaattgacagtaaaaaatcaaaacatttgattttatcgcttgtatttatcacgatttgtgctatactgaatatgaatattcatggaggtgattttaatgctgattgaatttcgtttcaaaaattaccgttcttttcgtgatgaagcggtgctttctatggaagcaactgggctaagctcgtttaaaaactgtttgattccgttatcctcaaaatccaagctgcttcccgctattgcgatttacggcaaaaacggtggaggtaaaagtaatgtgatccgcgctttttggctggccgttcagtttatccgaaatgcgcagagaacgcagcacgagcgcgccgcgattcctgtcaatccgtttgcactgaatgactattccaaagaagaacctactgagtttttttttgaatatactttcggcggagtaaaatattggtatggttttgccgctacgcgagaaaaggtttattcggaatatctatatcacgcgcctaagggtcagaaagctctgatctttaatcgtacaaaccagcagttctcctttacagaagataaaaacaaacgatccttaatcggtgaaatggtcgctgaaaatcagctgtttttctcggtagcgtgcaccatgaatgatgtagcttgtgttgcagcgatgcgctggtttcgagatcaggttttcttctctcgggattattccgatattccccgtcaactgattgagtattcagaagataaaaatatgctgaaagcgatttccgactatgccaaagcggcagatctgggcattcaagatatgcagtttgaggtcaacagcaatgagattcaggataatgaatccttgccggataatatcccggaggaaatcaaggctgctctggttcagtttatgcacaccctcgccgaaacctccaacaacagtgaaatacgtctgaaaatgggtgaagtttctgctaaggccaatcaccaaggtgaaaatcgcaacgggcagaaagcgacttacgcgctggaactttccgatgagtcagacggtacacgtaaattgatggcactggctcctgcaatcgaatctgccctgcgcatcggcggtatcttattggtagatgaactggagcgtgagcttcaccctatgctggtaaattatatcgttgcgaaatttcagagcaaggcttctaatcccaacggcgcacagatcgtctttacgacccacaatacagaattgatgaatctggaacttctccgaaaagatcagctgtactttgtggataaacgtgataaggacggaatctctgagctgtataccatcagcgaattttccacccggacaacagagaatattcggaaaggctaccttgtcggaaaatacggtgccacgccggatattgagattgaggaggtggaataaatgccacgtcccaccagacgaagaaagccatatattgtggtgttctgtgaaggagaaagcgaacaggcttatacggattttttgaagaaagaattcaaagatgttgcgtccatcaaacggccaagcgctaccggactttttgaggaagcagacgggaaattcaaaaaggacaaagcctaccgagactatgccgaagtcacagacgagatttggtttttcttcgatgtagaaacaaaagatattggcttatggaatgcccgcatgaagatcattaagcgtcttcgcgcgctacgtaaaaagcccggaatcaaagttcggcttctgatgacgaccggctgcattgagtattggctaatgctgcattatgaaatgtatacgccaccgatccaaaccgtcgctgaaaagcagcgagtaatagaacgtttgctttctaaagagccgaattaccaaaaaggtgatactgcgacaacagcaagaatcgcgcaaaattatccgaaggccgttattcattcaaagcaaaccgttctgaatttattgtcacaaggactccccggtttagaggatacagatgagcgaaatcgttggctttgtcagaaatgcctgactttttcaaacgtctatgaagccattgaatttttaaccagcttacaataaacaacagttaaacgtcttccgtacgggaggcgtttttcttatgcccaaatcacaaggaggtattattttggaagtgaaaatcaatcgggagatccgcaattatacggaatccatgtttttcggactgtccatgcggcagttcgttttttctgtcttggcgatcctcgttgccgtgggactgtactttctgctgaaaccccacttcgggacggaaaccgtcagttggatgtgtattctcggtgccgcaccctttgcggcgctgggctttatcacttatcacggcatgaccgctgagcagtttctctgggcatggctgcgctcggagctgttagagccgaaagagcttcgctttgaatcatcgaacctctactacgaagcgctgaaagacaaattggagggaggaaaatcatgatcaaaacgctgaaaaacctgttaaaacaggacaaggagcgatacaccgtgccccgcaaggtgcaagatgtgatccctatccgccgcatctggaaggatggtatttttcaagtgggcggtcgcttttccaagacctatcagtttaccgacatcaactaccttgtggcaagccgcgaggacaaggagcagatgttccttgcctattcggagctactgaacagtttggattccggggcgacaacgaagatcaccatcaacaaccgcaggctgaatcgggcgaatttcgagcagtcgatcttgatgcccatgcagggcgacgcctgcgatgtgtaccgccgggaatacaatcaaatgctgcttcataaggccaccggcgccaacggcatcattcaggagaagtatatcacggtgtcagtctgcaagaaagacatcgaagaagcccgcacctactttgcccggatcggcgccgacctgatcgctcatttcgccgccctcggctccaagtgtaccgagctggacgccgccgaaaaactgcgggtgctccacgacttctaccgtcagggcgaggaagcggcgtttcacttcgacccgcaggacatgatgcgcaaggggcacgactttaaggattatatctgccccgactttatggagaaaagcagcgactgtctgaagctgggcgagaaatactgccgagtcctgtttctgaaagactacgcttcgtatatcaaagacagtatggttacggagctgaccgacttcaaccgaaatatgatgctgtcgatcgatgttgtgccgatccccaccgacgaggccgtgcgggaggtggaaaaccgcctactcggcatcgaaaccaacatcaccaactggcagcgcaggcagaatgccaacaacaatttctccgccgtcgtcccctatgatatggagctccagcgcaaagagagcaaggaatttctggacgacctgaccacgagagatcagcggatgatgcttgccgttattacgatggtgattaccgccgacgacaaaaaacagctcgacagcgacaccgaaacggtacttgccgtggcgcgaaagcatatgtgccagcttgccgtgctgaaattccagcagctcgacgggctgaacaccgttctccccatcggcacacggaagatcaatgcgttccgtaccctcaccaccgaaagtcttgcggtgttcatgccctttaaagtgcaggaggtgcaggacaagggcggcatttacttcggagagaacgccatctcccacaacctcatcatgtgcaacaaagcaaatcttctgaaccaatcggcgttcctgttgggcgtgcccggttcgggcaaatcgttcagcgctaaggaactgatcgcttttcttattctcaacactgccgatgatgtactggtctgcgacccggaaaacgaatttggtgcgctggcggcggctttgggcaaggaaacagcgaccgtcattcatatggcggcaggcggcaaagaccgcttgaacgccatgtatatggtggacggttacggtgagaacaaccccatcgtggaaaaatcgcagttcatcatgtcccttgtggagcagatcgacaaggccggtgtcggcccgcagcagaaatccatcatcgaccgctgcacggcgctggtgtatcaggacgccgagcgaacaggcaagcccgccacactctgcgaccttcgaaacaagctgctggagcagcccgaagaaaaggccaaggagatcgccttgtcgctggagctgttcaccaccggttcgctggacattttcggtcacgaaagcactgttgacctcgacaagcgcatcgtcgtatttgatattcacggccttggcgagcagctgaagccgacgggactgttggtgatcaccgacaccatcctcaaccgtgtcaccctcaactggaaaaagggcaagcgcactcacattttcatcgacgaatttcatgtcgtttttgaaaatgagcagagcggcattttcttcaattccgcatggcggcagttccgtaagcgcaacggttatcccaccgccatcacgcaaaatgtcgaatatcttctggattccgtgcaggcgagcacgatgctctccaattcggagttcattatcatgctcaatcaggcggcgtccgaccgtgccaagctctcgaagctcctgaacatttccgacgagcagatgagctctgtcaccaatgccgacgcaggctgcgggctgatcaagtacggctcggcgctggtgccgtttatcaaccgtttccccaaagataccgagctttaccgcttgatgacgacgcgccccggcgagggtgtgttcggcaatgcgcagaggtaaagccatgcccgacgtcaagacgagagatgcggtcaagggaacagtaaagatgattgacaagtcggcggtagctgccgagcggatgaagaatgcctatgtccgcaccaaggacaaggcggagcacagcgtttttgcggcggaatcctctccagaagaatacgttgccgaccgcactttgaccgggacggaaacggcggcgcacgaagttacccacgggctggataagttcggccgcaagggtgtaaaaaccgccaaggagaatatctccaaggcaaaggactattttcagcgaagaaaaaccgacttaccgaaaaagcaggcgcaagacgccatgcggcgggtgcgccgctctgccgatgctacgcaaaagacgatcaaaacggtagaccgcagcagcaagaccatcaagcagacggcaaaatctacgggcaaagcggcggtcaagaccacgcagaaaaccatcaagaccgccgagcagactgccctgacgaccataaaaacgacgcaggctgcggcaaaaacggcacagaaaaccgcacaggccacggcgaaagccactaaaactgcggcgcaggccgcccgtgcggcaacaaaagcaactgcggcaggcatcaaggcggcggccaaggctactgctgccgccgtcaaagccatcattgccggaacaaaggcgctgagcgccgctattgctgcaggcgggtgggttgcggtagttatcatccttgtgatttgcgtgatcgggctgattgtcggctcttgcctcggcatctttttctccggtgaggacagcggcacgggacagaccatgcggcaggccgcgcaggagatcaacgccgactatcagtcgcagatcgacgccacaagggcaaatctcacctatgacgagctggaaatgtccggctcccgtgcggtgtggccggaggtgctggcggtgtatgccgtgaaaaccaccaccaaccccgacgctccgcaagaggtcgccacggtggatgacagcaagaaagccatcctcaaagatattttctggcagatgaacgaaatatcctcccgcaccgaaagcaaga

SEQ ID NO: 1796 - DNA, 997 bp, Unknown
  gut microbiota DNA sequence
cattaccgaaactgacgacggccacgggaacattgtggaaaccactacgacggtcacgcgcacctatctctatatcacggtcagccacaagaccgccgaggaaatggcagataatttcaactttaccgccgaccagcggcagcagctctcgaaactgcttgccgaggaaaaccgcaggttgtggtctgctgttctctatggtatttattccggggatgatgccatcgtcaaggtggcgctgtcgcaagtcggcaatgtgggcggtgagccctattggtcgtggtacggatttaactcccgtgtggaatggtgcgcctgctttgtttcgtggtgctttaacgagtgcggttatcttgatacgggaaccgccccgaaatttgccgggtgcgtcggcggtgttgaatggttccgcagccacaggcaatgggcggataacacggttaatcccgctcccggcatgatcgttttctttgactggaatgacccaaacggcgcatccggtccgcaggacggcgaagccgatcacgtcggcattgtggaaaaatgcgaaaacggcatcgtctacaccatcgagggcaactccggcgacgcctgccgtcagaaccaatatcccgtcgggtattatgaaattctcggatatgggatcttgaacccataggaaaacagccgcctgatttgggcggctggtacataatttagcagtgatcctttgcaatataagtaggtatacagcgcaatgaaatattcagacataatttttgctcaactcagacaatatttcggcataaacgtcaactatatgctattgtatagacagaaaattcaggtttcggctatatataacttgaaacttgattttgcaagcagtggtggccaccacagacaaaaaatattttttagcgaaagagtgacaaactcaatgaaaccaaaaagactgttagcgttgttgatggctgttgtaacggtggtatccgtatttacgatgcgttacataaat

SEQ ID NO: 1797 - DNA, 762 bp, Unknown
  gut microbiota DNA sequence
cgaatttccgtaaaacccatttatatgagatcttgccacagcctccacacccataaatccccatacccgccgtccagcagagttggtgatgttgttgcaatgctccagattaaatttcttggcattggcaatcatggcgtcgctgaagctacgggctttcagcggagcaagggaattttcctcgcaccacatccggtagatttcatagaaatccttggagctgatggaggcatccgctttcaatcggatgtatccctccgactccatgaaatcaaagatattgttgttgtcacgcttgaccgcttcccggttttcccggatacggtcactctccgtaaacttaaagttgttggcaacaagccgctgtaagccttcaaatgcccacaggaagataccctcggcttcagctttcatcttctctgcaaggtcaggatcatcggctctgtccatgggcttttctttggtggtcagcacaagttgtctgcggtaaaaaccgtcgctgcggtcatacagagcttgcagatcgccgttgctgaatgccagcaaccgggcaaacatccagccctgataactctgctttcccttgcgttccagatccatcttgccctgtgcagtcacaatggattttacatagttggtctgacgcagagcttccatccgcatatcatcatccacgcacagcaggatgtgttccagatcagcacgggcgaagcggttttcggaaatttttccgatgctgccgtctttcatattcgtgccgaa

SEQ ID NO: 1798 - DNA, 4104 bp, Unknown
  gut microbiota DNA sequence
gcacaaaagagatggtgctcgggttatgggataaatgctgaaaacataacgactttgtttttatttgttatccggtacaagtaagctcccatatacttgcaccacgaggtggtaatttggcgcacagagaatttatctatatcggtgaaccgcttccaaaattggatgaaaaggagcatgccgctttctttctgaacttgcagaaaggcattcttctctccctaaaacaacgaaatctgctgacacccgctcaatatcaagaatgtttagccgaactgggaaaaagagaaagcaaaaatcaaatccgtaataccataaaacagaaacattcattgtgaaagaaaatttcaccgatttttacacaaatattaactgccaacagcattctctaatgtgatcgagaaaattaacaacttcagggagtgggattgtggaaagccatccgaaacaaactgtaaaaacaaatttgcacattcgacaaaccaattttcgctttctataataataggcacagaagcattcaatgtaaaagggggatttatatgaaccgatatgaacgcatgaatcaagagcgaaaaatagtcgatatgcgaaaacgtgtggccgcctattgccgtgtttccaccgaccacgaagatcaggcaaactcctttgagagccagcagcgctatttcagacagtatattgagcgcaaccccgattgggagctttacgagattttcgcggacgaaggcatctccggcaccaacaccaaaaagcgcagcgaattcaagcgcatgattgcctgcgccaaagagggcgatttcgatttgatcatcacgaaagagatttcccgttttgcgagaaatacgctcgacagcatttattacacgcgtgacctcaaaaagcacggcgtcggcgtgatttttatgaacgacaacatcaacaccttagacggcgatgcagagcttcgcttggcaattatgtcctctattgcgcaggaggaaagccgtaagacgtccgagcgtgtgaagtgggggcaaaaacgccagatggaacaaggcgttgtgttcggcagaagcatgttgggctacgatgttaaagacggcaaaatgaccatcaacgaggaaggtgccaaaatcgtgcggcttatcttccataagtttgcaaacgaaaacaagggcacacacgttatcgcacgcgagcttcgcgaagcaggcatcacgcctatgcgcgtcaaagagtggagcaacaccgtcattttgcgcgtgatccgcaacgaaaagtattgcggcgacctcgtgcaaaagaaaactttcacgccggattttctctctcacgaaaagaaatataaccgtggcgaagaagaatttgtcatcatcaaagaccaccacgaacccatcgtttcccgagagcttttcgagaaagccaaccgtattttagatgaaaaatctctaacgcaggaaggcaaggcaaagcactctaaccgctatccgttctccggcaaaatcaagtgcggctgctgcggctccagttatgtggcaagatacaaaaaccgaaataacggaacccgctacaaagcatggcgatgctacaagtccgctacacaaggcagcccgcacaccgataaagccggaaatcagcttggctgctcaaatccaagcatccgcaatgaagatgccgttcatatcatgtacctcgtaacccgcagtctgcaattagaagaaaagaaaatcaccgctaatttgctttcggtcattcaatccgtgctttccgtaaacaccaactattcgcatattgaaaaactcaaagagcaaattcaaactgtcgaggataagcgcacgcagctgattgacctgtgcatatccggcgcgatcaccaagcaggaattcatcactaaacgcgaagcctgcgataaggagatttccgaactgcaagatacgatcagcggcatagaccagcagcacctcctcgccgatcagcaggaaagcgtgatgaaagaaatcaccgctgccattcatgaaatcgtcagcggtgtcgaatatgaagatgcgttttattcacagattttagaaaaaatggtggttcaaagtaaggataccgtcgatgtttacctgaatttgctcccgattaagtggagttacgccgtcgcaaaggcctcaaaaggcgttttagaccccaaaagcggcatttctgaaacagagataccgatatccgtcaatatcgcccgaagctccgggtagggcatggagtagcgctggctgaggtagcgcagggaagcgcctaattctccgtgagggccgccgtattggcttatgatgagctttgcgagcgcggggttcgggtttttgatgcgtacggggtactgcagcttcttttcataaatccacattattcgttcgcctccgtttcccacggccacgggtcgctgatccacgcccagcggctcgttgagcgcgaagtctcgtttaaggggccgtacgctttttcgtactcgaccgtaagcttatcgtattcctcgcggtaagcagcaagctttttcgccgcttctttgcaatacggatgcgaatcaagatacaaatgcagctcccacatcgcgaactgcacggcggaaatgtgccgccttaaacgctgctgttcgttcaccgcggctcaccccgccttccgtaaaacggtttattcaaaaccgggaacagtgtgccgtcatcgagcgcgcgcgccggctcataggtttcgctccactgctgaaacggcacgtaggccatgccgggcgcagggtcctcgggcagcggcgtacaggtggtgcggcagccgcgcagcatggtgttttcatctgccatgtgctgtgtctcctttcaaactatacttgcaagacaagctcgcagttcatagtatgaaatcagggcgcagcgtgtgcatcatgcgccgtggcgcggaccggacttttcccccttcttttcggaaacacgctgccacaaaacggcgagcataaagccaaacgccaccgcaagcagcacgatggcggccgtaataagacggtctgtctgtaccgcacgggcgtttttctccgcttccgtctgggtcagatccgcgtcgcgcgcttctcctgtcacaacggttgtttcggccggtgcttcttctgcactggcttcggcggcttcgctttccgcaggcttttcactgcttgccgcgtcttttccctttgcggcggacgacgtgcccgtctttcctgtcaccgccgtcacgggttttgtctcacgcgtgacagccacggtatacactgccgtttcgccactttcggacgtcacggtgaattcaaaatcgaccgtgctgccgcccgcaccgagattcttgcggttcacgcgcacagcgcagtcctctgccggctgggcgtcgaaaacgagtgacgtgacggaaaacggcaccgagagcgaatattggaacctctccgggtcaaagctcggggaaagcgtgcccgtcggcgggatgagcgaaagtagtgccgcgccgatctccggctctttcacgtaagtgaatgtcttttccgtcgtctgcaccgtatctatgagttcttgccccacagcgttcgccgcatcggttacggaaaagctgaccgtcaccgcatcaaactccgcgccgcgctccgtgcggaacaccagcgtgaacggctccgtgagcgcgccgccgtccttcgccgtgtaaacgagcgcaaaacgtccgtcctgctgcgaggtatacacgtagcgcgatttcacactttccggcaactcggccttcgcgttggctatgacttccgcgtcaaaatccgcaaacagcacgaacgcgccgatgtccccgcgcgccggcgtgcaggtcacggcgaacgacccgccggggcgcacctcttctgcctgtgctgcgaatgcgaacagcggctccgtctcttctgccatggccgaaacacccggtgcaaaaagaaacaggagcgcgcacagaagaaaccacgagccaaagtcgtgcttcttcatagtgcacctcccgcaaatcattttaatattgctttcagtatagaaaccgccgagcacactgtcaataagttgtgaactttaatcactttttctgtctgcgttgtaaatagatatgacc

SEQ ID NO: 1799 - DNA, 477 bp, Unknown
  gut microbiota DNA sequence
gatcaagagggcttttgtcgcccagcgtgcgcatgggctttctgttgcttcagcgcaaatgatctttgagctttcggtttagattttctacacttgcaaacttttcccagttgtaaaaatagcgctggtcgtttcgatgactccgctctaccttgccgttgtgccatggcgttctgggtgggatcagcttgtgctgcacgccggcgttcttcaaagcgatgtcaaacggacagagttccgtatcgctgatgtacttgtatgtaaactccgttccgttatccgtctggattgtctgaatcttgaacggaaatattttttgaagcattttgaagaactttaccgagttttccggtgtatgctcctcaaacccgtaaatgaatcgtattctggtgcattcgtctatggctgtccattggtataagtgctttccgtcccgtctcgctgcgcctttcaggcagttattgtgctgttttcact

SEQ ID NO: 1800 - DNA, 1450 bp, Unknown
  gut microbiota DNA sequence
aaacggccacccgcacccgcttcgccctcaaaaaagccccggaaatcaaggctttcccggtgcttaatgttcgacactgcgtcgccgcctggccgagtccgccttctgcttgcgccggatggaacggccgcattccgggcagtacttctgccggttgctgccgggtgcaaagggctttccgcatcggtcgcagagccgtgtgcgctgccggtaaatatcggcgcagagtaccttgtcggcgggcagaaccgcccgccggaagtacttgcacagcagcgaataggaaatcgtctgcacgcacacgcagccttcgccatcgtccaacggcagacagttgccaccgtcgtagttggcgcacagccgccggatcagccggttacagcgtgcccgctgtgcaggtgtcaggcgtttgatctcatccaaccttcttcacctctttctccatcacatagttgatgacactgattttcgggatcttcagcgtcgtgccgatcttcacggcgtgaatgtacccatagtcgatcagcttgtaagccagcttgcggctgatgcccagcatctcccgaagctctttaacggtcacaatgtccgggtattccggaaacatcatctgataaagctctctgagctctcctttcttcataggtttgaacctcctttgtctgttcttgacgccgcatttctgcggtggtttttgcttgctgccgctcatccgcatcgttcctgccctggagtctcaccacggcgtatcgcttcttcggtgcgctcgtttctttttcggggagtcatggcatcacttgccggaagcatatcctttggaggcggcgattcaattttcaaggtgcacagggagacagtcccctcaataggtagccagcgagaaaggcattttatagaccccctcactaatcaactgggaaatttttttcgatttgtacgaaggaattttgaaaaaattctttgaaagtctctctactaaccaactgggaaattttttcggatttgaacgaaaaaacttttgaaaatttttctgcgtccccctctactacttaattgggaatttttacggcaaaaacaaaaagaattttgaagaaaatttttaagcgcccctcccactaatcaactgggaacttttcgggcaaataacaaataggattttgaaggaaatttttcagggccttcctactaaccaattaggaactttttcgagattttggcaaagtaatttgaaaaattccctcaacttttcaaaagtcccttctacttactctgaataaggggcgccgtttgtgggggtgttttcgggaaatttctcaaatatttttctatcaagacgcaaaaaagccgcccccccgatgccgggaggacggctgataatcactattgacttatagatggctcatatataaatagagcaccggccaagcggtcggtgccctatttatacata

SEQ ID NO: 1801 - DNA, 703 bp, Unknown
  gut microbiota DNA sequence
cggtcaaaggtaagtgcggtatgtcgttccctacgttcacgccgtaagtgggcgtttactctcgcccgcaattctacaatgcgaaatggttttgtcagatagtcgtctgctcccagagcaagcccaaatgtgatgtcatgctccattgtctttgctgtcagaaaaagaataggacagtctacaagggaacgaattttatcacaataagaaaagccgtctacatctggcatcataatatccagtataatcaagtcatatctgttcagcttatcaagcggtacttgtgcggcagaggtataagcggtcacgaaatgtccgtccttttgcagcccgtttttgacaagctctaaaatagctcgttcatcatcaatcataaggatcgccgccatattgttgcctcctttcgttgtcctttttagtatagcacaagctaaaagggcaggaaagctgtcattgtcgctttgcaatatagtagttattatttacctcgaccgcaaccgcttccgctttatcggttccgtaaatctcatagacatctgtgtaaaaccaacactctcgcccctgtccggcattttccccgtaccagtcaatcttgcttaaatcttcttttgacaaagggattttcgtttctgtatcgaatgtaacactttcagcaagaatatcaatgtagctgcctaattcatcatctgataccatatcagac

SEQ ID NO: 1802 - DNA, 4351 bp, Unknown
  gut microbiota DNA sequence
atgaggtcaagatcggcaaggatatttcggtgcggccgccgggcaaagaacgctttgtaaggctgatacggaatttcggtgaggactactctctggataacatccgcaggcgcattatatcccagagccgccccgaacgaaaaaagcccgaacaaaagccggagatcctgcggatcaggctgattggcagcctgaaaaccgcccgaaaactgaccggctttcgggcgctgtatgttcactactgctatctgctgggcatcttcccgaagaaccgcccgcagcaaagcagaaaacggctgcactttctcctgcgggaggatctgttgaagttggacgccatcaccgccgaaacaaggctgcttatagggcatcggatcgataccgccgagcagcttttttcctaccgggataaggtaagcgaaaaaatcaccgttctgaccgagaaatgcaagcaactctataaaacacagcggacggctgcggtgaagtccgatcccgaaaaggcggcggaggtcaaagcgaagattgccgcactttccaaagagcttgccgcactgcggaaggaggtggttttatgtaacagtattgccgagcgttccggcgtgattaaggaaaaaatcgaagccatccgtgtggacgagcaaatcaaaaaaaaggagaaatgtgaccgcaccgagcagcagaaaaccggcagatgatcggcggtcacacaaaatttgcaggcaaattttctaagcgcaaaggagatgatgaaatatgtacaattccggtgacgcagcggagcaagtggtacggatcagtttggagggtacggaagttgccctaaagctgaccggctcggcggcaaagaatatcgccgccatgctctacgctgtctggaaaaaccgagataagaacaaaaccaaaggccatcagcggctttctgccatgctcaaaagcggcaaggagctgaaagtgttcaccgtcagcgaggagcatctgaaacagtttgcgttggaagccaagcggtacggcgttgtctactgcgccctgcgtggcaaagagcgttccgccgacggtatggtagacattatggtgcgtgccgaggatgcgtccaagatcaaccgtatcgtagagcgcttcaagctggcgacggtcgataccgtttccatcaagcgggacatcgagcagtccaaggcggataaaaccgctccgtctgcccctgagcaggagaagcccgataaggcggcggacgaccgcctgctggatgacctgctgggcgcacccgttcaaaaggaggaacacgcatccccaaaccctgcggcggcaaagacggagaaatcccgtccgtccgcgcctacctccgagaagcaaagcaaaaccgccgagggtactgctaaatctcccgaagaacgcccctctgtccgtgaggaactgcgggaaattcgggagagcaggcagaaagaggcggcagagccgagcgtttccgaacccaccccggcaaaagagccgaaaaagcagccgactaccacccacaagcaaccttcccgaaagaaaccgaagaaagcaaaggagcgatgaccgatgagcaattttgacgatatttttgaatctaccccgcagaccgacgaatttgacaaggaggcgtgggcggtaaagaaaaaggcggagcgtgatgaggtttacgctcttgccgatgccaccgccgaggcggtctgcgcagacggcggtaaattccgtgagtatctggatgtgcaggcggctttccgcaactactctgccaccaacgccctgctgatccttgccacgaagccggacgcccgcaggcttggcgataaagatttctggcgggatcagggcgtgtatatcaagcggcaggagttcggacgccccatcaagatcgtcgagtccaacggcgaatacacccgtgacgacggcagcatcggcgtgtcctacaacatcaagcgggtctatgacatctcgcagaccaccgcccgaacgagagcgccgcaggcggctttccatgatgcacgggcactgctgaacgccctgatctacaagcgccctgcgccggtgcagtctgtggacgagctgccgaacggcatggatgccgtctatgaccgtgagcaaaacgccgtttttgtacgccgcgggctttcggcaaacgaccttttctgcggcctgtccaaagcgctggcgcaggcggagcttgcccgaaccggcgaggaatacaccgaagaaaatgccggtttcaaggcgcattgcgtttcctatattctcggcaaagagttcggtgtggaggtgagcggctatgcctttgaagcgcccgccgattttctgcgcaccgatgacccgcagacgatccgtgccgagctgaccgacattcgggacaccgcctatgacatttccgcaaggatgatgcggtctctggaacagagcaaagcaccccgtcagagtgaacaggagcgatgacgatgggaaaacaggaaaaaagggtattgacccttgaccgctatgagcacggtgttgtggttaatgccctcaatgaaatgcggaacgatctgctggaggaagaacgccccaccgacattgtagatgaagttcttttgaaggtgatcgatgctcctcgtcgtcgcggactgcgttcactcgtttcgcccgcaagcgagcgaaagctcgaccactccgtcgctcctcctctccccacaaagtctgacgactttgcgggggccccatataaatatgaaagggacagagatgaagaacgataaaaacacttcccttatcctctgtctgttcgggattctccccgtggtgtggctggggctgctgatcgcccccaccgcccacggtggtctgccggagatcgtcgcccggtttcccgcggtgatgaacgacccgtttcatatcgagctttgcgaggacagcctgaaaactgtcctcattctgctctgcgcctacgggcttgcggtgggtgtcattctatcatcccgccgcaattaccgccgcggcgaggaacacggttcggccaagtggggctctgctcgaaccgtcaaccgaaaataccgggtggctgcgccggaggacaacaagatcttcacacagaatgtccgtatgggtctggacgggcgaaagcaccgccgcaacctcaatacggtcgttgtcggcggcagcggcgcaggcaagacgagattttacgcaaaaccgaatctgtgccaagccaacacgagttttaccgtgctggacccgaaaggcgagctgctgcgcagtacggggcacctgctgcggcaaaagggctatgaggtgcgggtgctggatcttctgaatatggagaaaagccactgctacaacccgtttgtgtacctgcgggacgacaacgatgtgcagcggcttgtgaccaatctgttcaaaagcaccacgccgaagggcagtcagtccaacgatcccttttgggacaccgctgcatctatgcttctgttggcgctgatcttctatctgaaatacgaagcgccgcccgacgaacagaacttcccgatggtcatggaaatgctgcgtgcggcggatgtgcgggaggactgcgacgaatacacctcgccccttgacgaactgtttgaaaggctggaaatgcgggaacccgaccacatcgccgtgaagtattacaaggactatcattccggcagcgcaaaaacgctgaaatccattcagatcactttggcggcgaggcttgaaaaattcaacctgtcctctctggcggcgctgaccgctacggacgaattggatttacccagcttaggcgaaaagaaaattgcgttgtttgccctgatccccgacaatgacaccagctttaactttttggtcagcatcctgtacacccagctttttcagcagctattctatctggccgaccacaaatacggcggcagtctgcccgttcccgtccacttcttgatggacgagttcagcaatgtttcgctgcccgacgacttttcaaagattctggcggttatgcgttcaaggcaggtgtttgtttcaattatcctgcaaaatatagcggctcttaaagccttatttgaaaaggaatgggaaagcattttaggcaactgcgacgagtttctttacctcggcggcaacgaaacctcgacccacaagttgatttcagaatcctatctcggcaaggccactattgacaccaacacctacggcaaatcgtcggggcgtaacggtaattacagcacgaattatcagatttccgggcgtgagcttatgacgccggacgaggttcgtatgctggataaccgctgcgcccttttgtttatccgcggtgaacggccggtgatagacgaaaaatatgacattctgaagcatccgaaca

SEQ ID NO: 1803 - DNA, 1015 bp, Unknown
  gut microbiota DNA sequence
accctatgaacacggcgggacggaacacgccgttgcgacgctctcgtttgcaggcgctgccgccgaaaccgtatccgcccccaatgaacccatacccgattatgagcttctgtccgacgaggatatagaggctcttttttaattcaattctcaaggaggataaacccatgaaaaacaccaaaaaggccgcaaacaagctgcctgtgccctacaaggtcagaaagggcttccgtttctactgtgccgctgtgctgtcggtcgcccttgtgctcggttgctccatgacggcctttgccgccaatgacccgatcgccgtcgtgaacaacctgagcgatttcattttcggtctgatccgtgcggtcggtctgatcctgctcggctggggcatcgtgcaggtgggactttcgtttcagtcccacgaccccagccagcgcagcaacggctttctcacccttgcgggcggcatcgtcatcacctttgccaaagagatcctcaacctgatcacgggctgaaaggaggcatcagatggaaaagtgcgagtgttatatccactctctgaagcagggtgaaacccatgtgctcggtgaggcaacgatcctcaaacgcatcggggacaacgactaccttgccgaatacaacggcgtaaagtgccacgccatattcaatccctttgccgggcgctactttgtagacgatgtgtacggcgtgatccgcagtacgcccgaccgggacagcagataaatgatacggtgcatggggcaggtcacttcggcctgcccctatttgccggaaaggaggaagctgtgaagaaatacagcattatttacgcagacccgccttggcggtacaaagtctattctaaaaagggatttgggcgctccgccgaatcccactacccgacaatggaactggaagatatacgggcgctgccggtcggcacacttgccgcagacgactgcgtattgtttctatggacgacgatcccgctgctgcacgactgcttttcggtcatgcg

SEQ ID NO: 1804 - DNA, 19456 bp, Unknown
  gut microbiota DNA sequence
gaagctgctgataatcgttattgtatcacttataacggctccgactcaacactaactttagagaacaaacagtaaaatcactcatgcaaaaagaggagaaggatcaaatccctctcctcttcttttttagttattcagcggggtaaaaagcatcttttccgagaccgcaggtggggcagacccaatcttcggggacatcttcccatgccgtgccgggtgcaacgccgttttccggatcgccgagtgcggggtcatagacataaccgcagggacactcatatttcataagatacactcctattacttgtcaccgaaatatctcttaaggagacctgcgaacgccttgccgtggcgagcctcgtcgcgagccatttcgtgaacggtgtcgtggatggcgtcgaggtttgcggcctttgcacgctttgcaaggtcaaacttaccggcggttgcaccgttctcggcttcaacgcgcatctcaaggttcttcttcgtgctgtccgttacgacttcgccgagcaactctgcgaactttgcagcgtgctctgcttcttcgtaagcggccttctcccagtaaaggccgatttccgggtagccctcgcggtgtgcaactcttgccattgcgaggtacatgccgacttcgctgcactcgccctggaagtttgcgcggagatcagcaaggatatcctcgctgacgccctgtgcgacgccgacaacgtgctcagccgcccaagtcatgttctcttcctgcttcgtgaacttggaagccggtgccttacatacggggcagaactccggagctgcttcgccttcaaaaacgtaaccacatacggtgcatacaaactttgccataataagatcctcctaaaaatttaaattgattttggtttgcggcttttaagccgttttatttttgcttttttctttgcattcggcgcacacaccgccgaacagcaggtcttcttttgtgattgtaaacccgtgttccgcttcaatgcgctcgagtgtttctgtgtccacaagcggttcaaagatatcgagcacgcgcccgcagcagtcgcagacgaaatggctgtgtgccgaagtatcgccgtcgaaatgctcctgcccgttgatgacgccgacgcttctcgctttgccctctgcacagaattttttaagattgcggtaaactgtaccgagacttaaatcgggatattcgggccgcagcgcagcgtagagccactccgcggttgggtgcaccgttgtggcgcgcagtgcgttgtagagcgcctcacgctttcggctgaacttttccggcatcggcttcacctcctttaggtttgtgggatttctttctcacttgttggcactattatagcacgcctttttcgatttgtaaatagtaataattatcatttttattattattttgtaaacaaattgtgaacaagcctattgaaaagctgccaaaaccccgtttgcttgctttccgaaaacaagaggcaaaacggctctgcattttacccgcaaagccgttttcttcgtttctatttattctcctttggtctcatcgttttccggcggaaacattttcatgaagttaagtgctgcgccgacgaggtcgtcgtttttcatcatttcgggaacatcctgcggccggaaccaaatctgcgcaaacttctctatgacaggacgcaccatttctctttccgcatccgtatgcggtgtgccgatgccgcccgggttcatcatgtgtgcaatgaatgtcgcggcactctgcacgcgcgcttcaccctcggggttccacccgtcttttgccatacagttcacgccttgctttgcggcaatttcaattttcttttccgcgcggtgttcaaaatctgcgtaatcccccgcttcgttccacgcgatttcggatacggcatacaggcgcgggaacagcaattcttcgaggtgttccggcgtttccacctgctccgaccacaatgccgcttcgtaaccgagcatattcggactgtctgtgtagctcttgcccatgacgaccggctgataatggtagaccttattcaacgaattgatgccatgcggataatcgaaatacaaagcggacatattggagaagatcaccttgccgccacgctcgataaatgccggcaccggcgcttcatgctgcgccgtccaatactgtatgatgtttccggtatcgacatctttggattccagaacatcgttccagcagacggcgcgcttgccgtgctttttgaggatagcgacgacacgcttcgtgaagtagccctgcaaatcttcataatcggtaaggccaagcgcttccatgcgcgccttgcagtgcgggcattttttccattcggtcttcggcgcttcgtcaccgccgatgtggaagcggtcgtccgggaacagtgcgcagacttctgtcagaagcttttcgataaactcgaatgtttcgtccttaccggggcagagaattttctcaaaaatgccgccaaactggcacagctccgttttttcgccaaagcagctcaaatgcgggtatgccgcaatcatcgatctggtgtggcccggcatatcgatttccgggatgatctccatgccgcgcacgcgggcatactcgataacgctcctgatctcctcctgcgtgtaatacgtgccggtcgtttcgtgcagcagcggcagcgttttgcactcgatgcgccagccctggtcatctacaagatgccagtgcagaacattcagcttcacacgcgtcatctggtcgatgacctttttcacttcgtccgccgtaaagaaatgacgggagcagtcaagcgacaggccgcgatgaccgtagtgcggtgcgtcttcaatggtgacgattggcagcgcttcgccctctgctgtgagctccgtgacagtcgtcagcgcccatacggcgccgctttcgtccgccgcttccacggtgatgccgtcctttgtgacggtcagcttgtagccctcttttacgatatcggcctttttcagcgtgataaacccgttttcggcggtctccacgtggccgtccagtcttgcagcaaatgcctcaaggcaccacggtgcaaaatcaccgagcgaaacggtgacggtctccggcagcttcacactgccctcctgcatgtgcaccgatccgcgcggcgcgggaataagattcaacataagcaagattcctttcttcgggcaaacgaataacacgcttgtccttttacaacttctcctcggctgcaaccgaaccgcagcctttttgttctattaagaacattataccgcaatttgcttcttttgcaagaaaatcgtgctatatttctatataattttcaaaattttaataattataagcagatatgacaaagcagaattttgaatctccgtctggacttgtcgaaatagatatggtatacttcaagcgaaaagtttttgcatgacggaggagcaaacatgggcagattgatcttaattacgaatgacgatggcattgacgcaggcggcattcgccagctggcagagacagcaaaagcattcggcgaagtgtgggtcgtcgcgccggagagccagcgcagcggcaaatcgcacagcgtaacgtatttagagccgctttacgtgcgcgagcgtccgggttacatggacggcgtaaaggcatacgaatgcagcggcgtgccggtggactgtgtgcgcgtgggcatccatctgctcggccgcaagcctgacgttgtgctttccggcatcaatagcggttacaatatttccggcgatattcagtattccggcacggcgggcgccgcgctggaggccgctttctggggaatccacgccatcgcgctttctcaggccaacctcgattatcatcccgtgaccgaccgctacttgcgtgcgctcatcggtgaatatatcgataaacctctgccgcaaaacacggtttggaacatcaactttcccggctgcgcaccggaagattgcaagggtgtaaagcacggctgcgccgtttcgcaggatgatttttacacggacagcttcacctgcaaaacactcggggacggcacggtggaatacacggtcgtgcccggcagacactggcacggcagcgaaggcaccgaccttggcgcagtgtgcgacaactacgtcgccgtcggcactgtgacgaatgtgcgataataaaaacatacagattttgcacctgctctttgaaatcgcaaaagcaggtgcttttctatttttaaaaaccgtgttatactgaagaaaagcaaaacattgaaaggaaacagaacatggttatattaggtgtagacctcggcaaagcgcgtacgggcgttgccgtatgcgataaaagcgagctgctcgcaagccccgtggaggtcgtgaacgagcacaaccgcgagcgccttttggagcgtgtagcgcagcttgccaaagagcgccgcgccgagcagatcgttgtcggcctgccgcgcaacatggatggcagcgagggcgaaagcgcgcagaacgcgcgcgctttcggtgcggagcttgcggaaaagaccgggctgcccgttgatttctccgacgagcgcggcacgactatcacggcacacggctttttaaacgaaacaaatacgcgcggtaagcgccgcaaagcaaccgtggacgccgtggcggcgacgatcattttgcaggattatctcgattatcggcgaaaccgcaaagggtagtttacacaaaaaacgcatagacaaattcgcttcgcctgtgctataataacgatgtgtcgcgcagaaatgcgtttttaaggcacggaaaggaaagataactatgggttacaaaatcatcaccgattccaccatcgatatggatcataaaatgatcgaagagttgggcctcacagtgataccgctccgctttacaatcgacggtaaaacatataaagacaaggcagatctttcggatatgccgacggaaaccttctacgcaaagctgcgcgagggcaaaatgtccaccacatcgcagatcaatgccgacgaattcacacgggtctttgagcctgttctgcaaggcggcgaagacgttctgtacattgcgttttccagcggtttatccggcacctgccaaagcgccttcatcgcgcgcgatgaattgaaagaaaaatatcccgagcgcaaaatttatgtgttcgattcgctctgcgcgtccctcggcgaaggtttgctcgtataccatgcagccatgctgaagcgcgccggcacggacattgattcgctgtataagtggctcggtgaaaacgttttgaagctctgccactggttcacggtggacgacctcaaccacttaaagcgcggcggccgcgtttccgccacagcagcgctcgtcggcactttgctcggtgtaaaacccgttttgcatgtggatgacgagggccacctcatcccggtcagcaaggtgcgcggcagacggcagtcccttgatgcccttgtgcagaaaatggaagagaccgccattcagcccgcggaccagaccgtgttcatcagccacggcgattgcctggcagatgccgaatacgtcgcaaaccgcgtgcgcgaaaaattcggtgtgaagaacatttatatcaacttcatcggtcctgtcatcggcgcacactccggccccggcaccgtagcgctgttcttcatcggcgagcacagataaaggagcatatactatgttaaacggcaacacgatagagctcggcgtatgctactacccggagcactgggatacttcgttctggaaagaggatatgctgcgcatgaaatcctacggcatcggtgtcatccgcgtggcggaattcgcgtggaatctctttgagtcggaggaagggcgctttgacgacagcttttgggaccgctttttaaatgtggcaaaggactgcgagatgcaggtcatcttctgcacgcccaccgcaaccccacccgcctggctgacggaaaaatacccggaagtattaaactgtgatatttacggccacccggtctaccacggtatgcgcaagcaccacaacatgacatcccccgtgtacctcgattttgtaaagaagatcgttgagcacatcgcggcgcattacagcgcacaccctgcgatcatcggctggcagatcgacaatgaagtcaactgcgaaacaaacagctaccacgcgccgagcgaccacgaggcgttcagaaagtaccttaaagagaaatacggcacgctcgaaaacctgaaccgcgccatgggcacgacattctggaaccagacctacacggactgggagcaggttcacctttcgcgctacacgctcgcaaactccaacaatccgcacatgatgctggaggaaaagcgctttatttccgaagcggccataaactacatcggcatacaggcggatattatccggaaatatcgccgttcggagcagttcatcacgacaaacgggcttttcggcgtgctcgataaccacaagctcgtcaaggaaaagcttgactttatgacgtatgacagctacccgaacttcgcgtttgcgatggagggcagcaagctctctccgcgctccctgcgcgaccgcgaaacatcatttaaccttgcaaaaacgcgaagcgtctcaaaccgcttcggcatcatggagcagcaatccggccccggcggttggaacacccgccttctgcagcccgcgccgaagccgggtcagttaagactgtggactttccagtctatcgcgcacggtgcagattttgtcagctacttccgctggcgtacctgcacattcggcacagaaatgtactggcacggattattgaactatgataatttcccgaaccgccgcacggaagagcttttgcgcgtaagcgaggatattcagaagattcagcgcatcgcgggcacgaagcatacggcaaagttcgcaatcctctgcgactacgacaatgagtgggacggcatggaggacaaatggcacgggcccttgaaccgggagagcaccgacggatggttcaaagccttgcagcgcgcgcacatcccgttcgagttcgtcaacatcaacgatgagggcacgtcccagccgctcgggaacttcacggctgctgtgtacccgcacccaaccatcatgacgcccgcccgcgcggaaatattacgcgcttacgccgaaaacggcggcactcttttcttcggctgccgctccggctataaagatattgacgggcagtgccccatgatgccgatgccggggctcttagcgccgctgaccggctgcaccgtggaggatttcacgttcatcggcccggcggacgaaaaggaatacatgacgctcggcgaaaagaaaatccccgcgccgacgtttaacgatattctgcgcccggattttgaaagctgcgaggtgctggcgacgtatgacggtaactattacaacggcaaacccgcgctgaccaaaaacaccgtcggcaaaggcacggtctacgcctgcggctccgtttttgcggaggaaaccgctgcggcgctcttggagctgctgccgaaagcagagctttgccctgtgacgggctggctggagctgtccgaggagatcgagctcacggtgcgtacaaacgagaaaaacggccgcagctacgcgtttttgctgaactacaccgcacagccgcaaaccgtcaccgtgcaaaagccgacgaaggagctgcttacacgcgaaacgctcgacggcacgtataccatggagccttacggcgtgcttgtgctcgataaaccacaataaacgacaaaggccgttacgataaacattttgggaggaatttatatgaaagaggaagaaaaaatctttgccgggcagtttttctgccccggtcacccggacttgaaagccatcaagctgcgctgccacaacctttgcagcgcctataatgcaacgctcgaagacgagaccgaaaagcgtaatgcaatcgtgcaccagatcttcggcgatttcggcgagggctcgtttgtgcaggggccgatccagatccactatggcacgcacacgcacatcggcaagagctttttcggcaacttcaacctgaccattcaggatgacgcgcccgtgaccatcggtgaccgctgcaacttcggcccgaacgtgaccatcgtcacgccgatgcacccgatcatcgcagaggaacgccgcgtgctgaaaacaaaagacggccgtgaaattcgcgtttgctacgcaaaacccgtcaccatcggcaacgattgctggttcggcgcaaacgtcgtcgtatgcccgggcgtgaccatcggcgataactgtgtcatcggtgcaggcagcgtggtaacgaaggacattccgtcaaacagcgtagccgtcggcaacccctgccgtgtacagcgcaccattacggaagcagacagcatgaaatatcatccggaacgcttcggcgaagatgaattcgtgtttgacgaataaactgagcttataatacgcaaaaacagctccgagcttttcgcccggagctgttctcaattcactttaattcaaattagaagtaaacgacctgattcttctctgcgctctcgaagattgcttccatcagcttcatcagctggcgctgctggtcgtgcgtgacgatctgctctgcttcgccgttgacaactgctgcgatgttgcgataataatcgtgaatgtcgcagtcgattctcggcagcggaagctcgctgatcgtttccggcgttctcggcgccatggtcttcgtgaggcctgctgcggtgacgatcggcactgcatcgtgctcttcgtccgccgttgcgatgacaatcttgccgttgacctggaagtcatcgatgacagccgtgccgttcagaccttcgatataccaacgcggcaggttgatgaagttgcttgtgccgacttctacggtgaacacgagatcgttatcaaacttgaacgtagcggtgaagccgtcgtccacttcttcgttcgttacgttggacagcgttgcgtaaacggaaatcggcattttgcccatcatcatgttcatctggtcaaggaggtgcacgccccagtcaagaaccatgccgccgccctgtgccttcgtgtttctccagtcgcccgggataccgcgggaaccgtgaacacgggactgaatggcgaaaacacgaccgagctggccggactttgcaatcttctccgcaacgcggaaatcctcgtcccaacggcggttctgatgcaccgtgaagacggagcccgtgcgcttggaggctgcgatcatctcttcgagatcagcagtgcaaagcgtgaccggcttctcgctgatggcaaccttgcccgcttccataacctgaatgcaaaccttcttgtgctgatcgttcgggattgcgaccgttacaacatcaacggtcttgtcggcaagcaactcctcaaaagagctgtatgcgtgaataccgttttcctcagcaaccttgttgcgctccggcttaatatcgtatacgcctgcaagctctacaacacccgggatttcctgtaatctcttcgtgtgccagccgcccatgccgccatagcccacgactgctactcttactactttagacataataaattggactcctctcgatttaaaataaataacctgtctgcgctctctaaactacgcgctatacaccttattatactaaaagacacgtaagtttcaaggtgtttttatagatttttgcatcttgtccgcgatttcggcgaaagatacaaagaccgcctgcgcaaaactgtgtataaatcccacgtttgattggaaatcggcgcaaaagaaatttagccccttgagttttttcacccgatgtgctacgatgaacctgaataacacgtgaatacaccggaaaggttgattatatctatgaaaatgtcatttcgctggtatggcccggacgaccccgtaaccctccaaaatattcgtcagattccgaacatgcaggccattgtcaccgctgtatacgacgtgcccgtcggtgaagtttggagccgcaagagcattgccgcgctgaaaaaacaagtggaggataacggcctgcaatttgaggtcattgaaagtgtgccggtgcatgaggacatcaaactcggcaaacccacgcgcgaccgctatatcgaaaattactgcgagaacatccgccgccttgccgaggccggcatccgctgcatctgctacaatttcatgccggtgtttgactggacgcgcacacagcttgaccaccgcctgccggacggctctacaagccttgtctactataaagagcaggtggatgccgtggacccgctgaaaagcgacagcgacctcacgctgcccggttgggacgcaagctacacacgcgaggagctgagggccgtcgtggcggaatacaacaaaatgaccgaggaagacctttgggcaaacctcacttattttcttgcgcgcatcattcccgtcgctgcggaatgtgacgtaaacatggccatccatgaagacgacccgtgctggagcattttcggactgccacgcattatcacgtgcgaaaagaatctcgaccgcttcctgaaaatcgtcgatgacccgcacaacggcatcacgctgtgtaccggctcgctcggatgcagcgccgaaaacgatgtggtacacatggcggcaaaatacgccgcgatgggccgcatccatttcgttcacgcccgcaacgtcgccgtgctggaaaacggttttgaggagcgcgcacactactccgcatgcggctcgctcgatatgtatgccattttgaacgcgctctacaaaaacggtttcaacggttacatccgcccggatcacggcagaatgatctggggcgagaccggccgcgccggctatggcctttacgaccgtgccctcggcgccgcgtacttaaatggcctgtgggaagccatcacaaagcgcaactccaatatggagcgataaattaaagccaacaaaaaaccgatgcagtcgaaactctgcatcggttttttaatagataccgtaagcttcaccttctgttttaccgcagcgaacacaggtcttggggtagttgatcgtagcagctttccaatcatgcccaagcggctcgccttccgtcataccgcaatatacacaggttttcggctcggtgcaggtggcttccttccatttatgcgcacaggtgcaggtcgtaagaagaaagcataccaacagcatgaacaaaattacttgtccccagcgtttaagcattgctttttctctcctatctctcctcttttcccaattttagatgaaatatatctaaaagtcaatagataaaatccgtctacatatactttgagtggataccactcaaagcaggtgaaaaaattgacggaaaacagaatacgcgatctgcgggaggactctgatttaacgcagcagcaagtcgcagatgcaatcggcattacacagcgcaaatacagttatatcgaaacaggccagcagcagcttacggacgacattctaattaaactcgcaaacttctataacgtgagcattgattatctcttgcggcagacggcgaaccccaaacgaaatctctgacgtaaaattcccgaaaagtcgtttgttaggcttgacaattattcaaaaaaagggtaactttatagataagaacgccgacaaaaatgcggcgttttgtttccgtatgcaaaaacgcaaaagcactttgcgattatttgcaaatacactgacaaaaatactaaaacaaaggagtggagaaaatggacgctggcagtagtggcggtgcggttcctcgagaacggatgcagccgcccgcagaaaaacaggcgattttctccgcttgttttttgcgtgaccttacatttgtaaacggctgagctcaaaccgtatcgtccgattgccgatttttgcacgattgcagagaaaggacggacgaactatgttggatattttggacaaaattttagagctgctggagaataaagatttcccccagttgggcaatcttctgaaagacatgaacccggcagacgtggcagagctttttgaagacctgccgcgtgaaaagatggcgcttgtgtttcgcctgctcccaaaagagcttgcagcggacgcgttcgcttatatgaatccggacgaacagacggtacttgttgaagcattcagtgataaagagctgcacgacgtcgtgaacgagctgtatgtggacgacgctgcagacatgattgaagaaatgcccgcaaacctcgtcaagcgcattctgcgacacacggacgccgaaacgcgcgtactcattaaccagattttaaattaccccaaagacagcgcaggctccatcatgacgatggaatacgtcgatttgaagcgcggcatgacggtggaggaggcgtttgaccgcatccgtgccatcggcgtggaaaaagagacggtgtacacctgctatgtcacggacagccgccgcaagctgaaaggcattgtgaccgtgaaagacctgctgcttgccccgaaaaacgagctgatccgcaatatcatggaaacgaacattatttacgtttccacccataccgataaagaagaagtggcctccctgttcggcaagtacgattttcttgccgtgccggtcgtcgataacgaagagcgccttgtgggcattgtcaccgttgacgacgcgatcgatgttattcaggatgaggcaacggaagatatcgaaatgatggcggctatcacgccgaccgataagccatacatgaagacgggcgtttttgctacatggaaaaaacgtatcccgtggcttttgctcctcatgatctccgctacatttacgggcagcatcatcacctcgtttgaagatgcgctttccgcttccattgtgctgacgggttttatccccatgctgatggacacgggcggcaacgcgggcagtcaggcttcggtctccatcatccgcggtctttccctcggcgagatcgaatataaagacatcgggcgtatcctctggaaggaggcgcgcgtggcttttttgtgcggcgtttcgcttgccgccgcaaactttgtcaaattgctgctcattgatcgtgtgaccatcccggtcgccatcgttgtgtgcagcacgcttgttgtaacggtgctcgctgcaaagcttgtcggctgttcgctgccggtgcttgcaaagcgcatcggctttgacccggccgtcatggccagtccattcatcacgaccattgtagacgcgctttccttgctgatctacttccgcattgcatgcgcggtgctgcatatcggttaactttatccatcaaaggaggctgctgttatgaaccaaaaagatattgaaacgcttgcaatcgcgctgccggaagacattttaaaggcaaaatggtgcggcgattttgaacgcgcgttccaccttatcgacctataccttgcaaacgagaaagtcccggcatttatgaaaacacgccttgcactggagcgtgaagtcttgaaagcgctgccgacgggctacacatacagcgaagaagacgctttggcgctcgtgcagaaggaaattccggatttcacgaaggcagagcttgacgcattgcgtgaccgcggcgccatcgactggatctacatcaacggcaaaacgacgtattcccgcacgttctacgatacgcttttgggcgtttacccggatatcgccacgcgtgcaggcaagccgccgaaggacaaaagtgatcgcgtggaatttctgcgccaaaatgtacgcgacatgaaaaaagacggcgacgcgctgtggagcattcagctgcgcgcccagttccgtctgcatgacgatgttttccgtcccggcgaagaactgaccgtgcatcttcccgtaccgaagaacgcgatgaacatgcgcgacattgagatccttgcgacctcccaccccatttataagcttgcagatgaaaatgcacccgcgcgcacggtctcattccgcggcaaattcgagaaaaacgaaaccttctgggtcgaatacaaatatctttcctatgtgaaatacaacaacctcgaatccgcacaggtcagtgcagagcagccgacgttcgacaccgaggagctttacccgcacattcgcttcacgccgctcatccgtgcgctttgcaaagagctttccggcgatgagaagaacccgcttctgctcgcacgcagattttacgactactgcacgaaggtcggtacatattcgtatgtgcgcgaatacttcgcgctgccgggcagcattccggattattacggcgcggggctgcacggagactgcggcgtgcaggcgctgctgttcatcacgctgtgccgctgcgcaggtattcctgcccgttggcagagcggcctgttcgtcacgccggacgacaccggctgccacgactgggcgcagttctacattgctccctacggctggctgtttgcagacccgtccttcggcggcagtgcgcaccgcatgggcgacagcgagcgcaacgacttctacttcggcaatctcgacccgttccgcatggcggcaaacagcgagcttcaggcggattttgacccgccaaagacacagctgcgcatcgacccgttcgacaaccagcgcggcgaagccgaatatgcagatgtcggcatccgctggatggacaaggagtgcgactggaagaccatcgaaatgaagaagctctcttaatttaaaacgttaaatgcccgccgtgcttttgcacgcgcgggtatttttgaccgtaaaggaacagatctatggaaacgaaactcgatattctgcggcgctatttcggttacacgtcctttcgccgcggtcaggaggaaattgtagacgcactgctcacgggccgcgatgcgctgtgcgtcatgccgacgggcgcaggcaaatccgtgtgctatcaggtgccggcactcctgctgccgggcatcacgcttgtcatctccccgctcatttcgctgatgaaagatcaggtggaatcgctgacgcaggcgggcgtgcacgcggcatacctcaacagctcgctcaccccggcacagtacagccgcgcactgcacaatttatccgaggggttgtataagctcgtttacgtcgcgccggaacgcctttcgaccgagaacttccgcacggccgtagagaacctccatatttccctcatcgccgtggacgaagcgcactgcgtctctcagtgggggcaggacttccgcccggactatttaaagattgcggaatttgccgaaagtttgaaaaatcgcccgacgatcggcgcattcaccgccacggcaacaaaagccgtgcgcaaggacattgcggagcacctgcacctcattgaccccgtgcgtattacgacgggctttgaccgcccgaacttatatttcggcgtgcagatgccgcacagtaaggcgctggcgcttttgaagctcattgaggaacgcccgggcaaatgcggcattgtgtactgctccacgcgccgcaccgtggaagaagtggacgcgcttttaaacgacaagggcatcccttccacgcgctaccacgccggtctgccggaggaagaacgcaggcggaatcaggacgatttcgtctatgaccgcaagcccattatggtcgcgacgaacgcgttcggcatgggcatcgataaatccaacgtgtcgttcgtcatccactacaacatgccgaaaaacctcgagagctattatcaggaagccgggcgtgccgggcgcgacggcagccccgccgagtgtattttgctttacagcccgcaggacgtgcgcacgaaccgctatttaatcgaaaacagcgacccgaaccccgacctcgactttgaaacgcaagaaaagctcatccagcgcgaatacgaccgtctgcgaaaaatgacatattactgcacgatggccgattgcctgcgcgcattcatcttaaaatacttcggcgagcccgccgaggaatactgcggcaattgttccaactgtgcgggcggctccgttttggtagaagccaccgtggaagcacagcaggtgctctcctgcgtggcgcgcaccgggcagcggctcggcatcagcatgatctgcgacattctgcgcggcagcgaaaatgagcgtgttttgcaaatgaatctgcaaacacagtccacctacgggctcatgcgcgaaaagccgatttttgaaattaagcgtatcatcgacgcacttttgatgcaggaattgctcatccagaccgacgggcaatacccggttttaaagctgacgcagaacgcgcggccggttttgctcgaggaaaaaagctttgaaatgcgtattcccgtgccgcaggaaaaagcgaagaagccggacaaggccgcaggcgatgccgacccggagcttttcgcacggctgaaaaagctgcgtgccgcgcttgccgcaaaagcgagcgtgccggcctacgtcgttttcaccgacgccactttgcgcgatatgtgcgccaaaatgccaacggacgaacaggagcttttgcaggtctccggcgtgggcgagcgcaaggcgcatcgctacggcaaggcctttttggaagagatcaaccgcaaagcggaggaaaaataaatggaacaagcaaagcacaaattcaatcttgtcgaccacatcgaggtgcgcggtgcgcgcgtgcacaacctcaaaaacattgacatccatgtgccgctgcataagatcgttggcgtagcgggtgtttcgggctccggcaaatcgtcgcttgcgctcggtgttttgtatgcagagggctcgcggcggtatttggagtcgctttccacctacacgcgccgccgtatgacgcaggcggcacaggcgcaggtggacgaagttctatatgtcccggccgcgctcgcactgcaccagcgccccggcgtaccgggcatccgcagcacattcggcacgggcacggagttactcaacagcctgcgcctgatgtattcacgcctcgcaagccaccgctgtccgaacgggcactacattcagccgacattggccgtcgcggcgggtcagccgtgcgtgtgccccgtttgcggtgcggagtttttcgcgccgtccgcggaggagctcgcgttcaacagccaaggcgcgtgccgcaaatgtgacggcaccggcatcgtgcgcattgtggacgaaagcacccttgtaccggacgacaccctcacgattgacgaaggcgccgtgcgcccgtggcagacgctgatgtggtctttgatgaaggacatcgcccgcgacctcggcgtacgcaccgacgtgccgttccgcgagctgacggaaaaagaaaaggacatcgtgtttcacggccctgccattaaaaagcacatgatctaccagaataaaacgagcggcgcagcaggcgaaatggatttcacctacttcaacgccgtgtataccgtggaaaacgcactctccaaagtcaaagatgaaaacggcatgaagcgcgtggaaaagtttctcaagaccgaaccgtgcccggactgcggcggctcacggctatcggagaaagctcgcgctccgaagcttcgcggcatttctttagatgaagtctgccgtatgacgctcgccggcctcaccgattgggtcgcggacgtgccgggttcgctgcccgaagaaatgcgtcccatggcgcagagcatctgcgattcgtttacattgaatgccaagcgccttttggagttagggctcggctacttgacgctcgaccgcgccgcctccacgctttccacaggcgagcgccagcgtatgcagcttgcccgtgccgtgcgcaaccgcaccaccggcgttttatatgtgctcgatgagccttccatcggcttgcacccggcgaacatcgtcggcctcaccggcgtgatgcacgatctcatcgacgacggcaactccgttctgctcgtcgaccacgacacgcagattttgagcgaggccgattggctcattgaaatgggcccggaagccggtgcaaaaggcggccatgtcatcgcggagggcacaacaaacgacattaagataaacgaaaactcgcagattggcccgtttttggcgggaaagcagggcatctcgcgacagaaagcacccgaaagtgagcttttccaaaacggcgctatccacctttccaccgaccgcatccatacggtgaagccgctcgaagcggatattccgaaaggccgcctgaccgttgttacgggcgtttccggctccggcaaaacgacgctcattctggaaagccttatcccggcgctttcggcgcatattcgtggtgaaaagctaccggcgcacgtgaagtcggtcagcgccgagggtatcgaccaagtgaagctcatcgacgctacgcctatcggtatcaacgtgcgctccaccgttgcgacatacgccaatgtgcacgatgagctgcgtaaaattttcgcccgcacgccggacgccaaaaaaagcaaatacaaagccggcgacttctcctacaacaccggcaagctgcgctgccccacctgcgacggtaccggcagtatcagcctggacgtgcagtttttgcccgatgtgaatatcccctgcccggactgccgcggcagccgttacggcaaagacgcatcgaagatccgctgcgtgacgaaaagcggcgaagcgtacaccctgcccgaaatcatggacatggacgtgcgcacggcgctttcggcctgcaaggactggaagttcgtctcgcagagactaaacgtcttaaacagcctcggcctcggctacctcacgctcggtgaggaaacgcccggactttcgggcggcgaagcgcagcgcttaaagcttgcgagtgaaatgggcaaggcacaaagcggctccgtgttcgtgttcgacgagccgaccatcggcctacacccgctcgacgtgcagacactgctcaccgtgttccaaacgctcatcgaaagcggcgcgaccgtcatcgttattgagcacgacctcgacgtcatccgcagcgctgattatattctcgatatgggccccggcggcggtgaagcgggcgggcggcttgtcgcctgcggaactccggaacagatcaaaaacgccgcggacagcgtgaccggaaaatttatttaaaccaagcgcgtgtacccacaactccgtgtgatgcacgcgccttttttattcgtcgaatgcttttcgcagcttttgcagcgcttttttctcaaggcgcgagacatagctgcgggaaatgttcagcttttttgcgacttctctctgcacgagtggccgctggcccgtaagcccgtaacgcagcaaaatgatctcgcgctcgcgcggcgaaagacgggtcttcaccgcgtcgtacaactgccgcaccttcatgcgcaagtcgatgtcctccaaaatgtggtcgtccgtcgcgatggtgtcgagcagcgtcagcgtgttgccgtccttgtctgtatcgatagggtcattcagcgatacgtcctgcgctgtctttttcgcgctgcggaagaacatcagaatctcatttgctatcctctccccaaggcgtttttgatgctctg

SEQ ID NO: 1805 - DNA, 1684 bp, Unknown
  gut microbiota DNA sequence
aggcggattcccgtgtcaggacatttctgtatctggccggcaacgagggcttgcaggcgagcgaagctctctcttttttgaaatcgttagactcctcaaaggcacgcctgccgaagatcgacccgaatggcttgtccttgaaaatgttaaaaatttgctctccgttaatcgaggatgggactttgcgaccgttctccattcgttggccgaaatcggctatcatatcgaatacggactgcttaattcacgcttccacggcgttccgcaaaaccgggaacgcatctaccttgtcgcttatcgacattttagagccgagggtggacgaaaagtatttcctgtcaccgcaggcgacggcaaggctcttatacagttgatcggcggcacgcagggcaagcgggtctatgatcccgcaggcgtgagctgtacgctgatgagcgagggcggcggctttggcgggcgcacgggcatgtacttcatcgacctgtgcaaaggtgaaccgaggctgaccgagcacgcccgctgtatcaaggcaaggtatgacagcggcatcaccaaccacagcggtgacaaaagcggcgttctctgcatgagcggcgagtgcccggaccgcaccgaagaaacggcgctcatccaactaaaacggggtacgccgaaaatcttggagcaggagcacaccaaatgcctgatcgcaggctatgacaagatcggggtcagcaaccggggcgaaagctccggcattttttatggctgccgtgccgtcctcactcccgaccgggagaacaaacggcagaacggacggcgcttcaaggcgtgcggcgaacccgccttttgtctgaacacgcaggacaagcacggcgtttatctctgcgcctgcgattcctgcgaatacgctttgcccgtcaagcgagcaaaggaggcggatcagagcaaacctgaaaacggctctgcgcttccgctcggctgcggacgcatccgcaagctgacaccccgtgagtgctggcggctgcaaggcttttccgacgacatgtttgaccgggccgccgccgtcaattccgatgcccagctatataagcaggcgggcaacggcgtgacaatccccgttgtgtatgctgtcggcaaacggattgtggaaattcaaaacgaactcaattcggaggtgaaaatatgagaaaacgcaatgttcacattcaattctggttggacaaaaaggaagccgagacgtttcagaagaaggtcaaaaagagcggactttcccgtgaagcgtatcttcggcacttggcaaacggccttgaaccacaggacgccccgccgcccgactattacgccatgatgcgggagctgcacgggatcggcaacaacctcaatcagatcgccgcaaaagcccataccctgaacgcgctgaatgtgcagcggtacgacgagaactgccgcaagctggacgaggctatcaagacgatcaccgcagcggtcattctgccccaccaaatgaagtgatgcgcctatggcaacgacatcaatatggcgggtaaaaggctggctcggcaaggtagtgatctatgcggaaaatcccgaaaagacggcaaacccgaaattctacacgcaggaagatatgactgaacaggacgggcagcagctttccgatgttatccgctatgcggtcaattcccgaaaaacgcagaaagcg

SEQ ID NO: 1806 - DNA, 8954 bp, Unknown
  gut microbiota DNA sequence
aaggtcctgtgctctctttcaagcggctttccttttaagcttttcgctttcagttttttgccgtctctctcgagcgcttgactataataccacgtacaaccccttttgtcaacacttttttgaaagtttttttaagtttttttcgaaaaactacatctatatgttgtactttgatttaagcacaatatatagtgtatcttcgaatgggcatttttgcatttacatgcccatatacatggcttacgcaaactattttacgaaatttttttgaaaaaatcaagaaaaaatttttgaaaaggtggtcttaaagttgcaaaagcccctctctgtaccccaaagcttcaagcacatcttcttatatatctggcgcatcagtgtcctttcacttctgaatctcctcataatctttctgattttatccgaaaaaagtttttaaagcacttaaaatcgccgtgaagttaaaaatgaaaaacgcgctgcggtcatcccacaacgcgtttcttcttatatataagtatactttatgcttttgccgcctcggcctgctccgctttcgccttttccatcatcttacggtgcacgataaggtagcacacaaaatgcgcggccgccgtcacggtccacgtcaccgggtacgagaggaacagcataaacagcgtgcggtgcatctggaagaccgtcaggatccacaccacacgcagcgcacatgcacctgtaagtgatacaatcatcggcatgatcgaataccccataccgcgcaaaacacccacgtgcgtgtccataatgccgcaaaggaagtacggtacgcacacaatgagcatacgctccaaaccgtactggataacctccgggtcagacgtatatatagaaagtaaaggtgtgcccagcaaatacgcgccgcagccgagcacaacgcccgtcacggtcacacacaaaatgcagatgcgcagaattttcgccacgcggtcgtatttcttcgcgcccatgttctgcccggtaaaggacagtgccgtctggtaaaacgcgttcatcgcaacgtacacaaagccctcaatgttggccgcagccgtgctgcccgccataacggtagagccgaacgagttgatagaggactgaatgagcacgttcgaaatggagaacaccgcgccctgcatgcccgccggcaggccgacacgcatcatgccgaaaaacttatctttatagatatgcagcttatacagctccaaacggtaagaagcgttcgttttcatcaggcagatggtcacaagtcccgcagaaatcacctgcgaaatgaccgtcgcaatggcaacacccgccacgccgagatggaacacaatgacgaggaacagattcaaaatgacgtttacaacgcccgcaatggtcaaaaagtacagcgggcgctttgtgtcgcccacagagcgcaaaatcgccgcgccgaagttgtacagcatcatcgccggcatgcccacaaagtatatgcgcatgtaaagcgccgcctgacccaaaacgtcctccggggtgcccatcagggtcagcagcggctccgcaaacgcaacgcccacggcaatcaatataacaccgctcacaaggcttgtcagcacagaggtatgtacggtctcgctcagctgctttgcatcctgtgcgccgtaataacgcgccacaagcacatttgtgccgatggaaaggccgatgaacacgttgatgagcaaattgataagcgcgccggtagagcccaccgccgccagcgccgtgtggccggtaaagcggccgaccaccacaatatccgccgcgttaaagaacagctgcaaaacgctggaaagcatcagcggcaccgcaaagcgcagaattttgcccagcagcgggccgttgcacatgtcgatctcgtaggaccgctttccttttgcctgccgtttcgccataaaagcctgtatcttttctttcatatcagtaaccgacctcctcaccgatgagaatgacatgaattctgcccttcacgcgctggcgtgccaaaaccgtgtacatcgcgcagatgcgattttccgagcggcatcccgcgcacagctcgccgtccgtgccgggacacgccccgtgcgtgcacggcgtgtccaaattcagccgcatggcatttgcgggcgtcgcacagcttttcacgcgctttgcggcgtcgtttatatcgcgcacaatcttgttacaccccgcaaaaaccagcacttttttcgggccgaacagcatcgccgccacgcggttgccgttgccgtctacattatagagttctccgtgctccgtaacggcgtttgtgcccgtcaaaagcacatcagaggaaaacacctcgcggtacagcttctcgcgctcctcgggcgttttcgcggctgttctgtccaaaaattcatagtccccgcagcgcattaaatccatcacgccggtctcatccagcgtcacgctgccgccgcaggaaatcacatcgcccggctgcagcagctcttttgcgatttttacggcgtccgcacacgtgggcgcataatacgcctgcatgttgtttttctccagtgcgtccatcacgcgccgtatgcgcagctctgcggcgcttttgcggtgcacggtatcttgtgtgttcatggtgtacaactcccctctcggtgcgtttcatgcccatttatgcctaaccgccgccgattttttaaaataagaaagcactaaggacggaaaagcacatgcctttccgccccccctataatttttattttgcctttgcgtccgcaaacgtattgaagcactccagaacatgctccttgtgtgttttattcgcgtcttccttttccgacttcgcatcggtgtagatcaaaagaaagcggccgtcgttggaaagataacccggcacggtgttatccagcaccttaaacgtgccgtctgcgcgcacagcgtcctgaagcgccttagcggtctcggaaagctccgccgggaactcatacacttcaagctgcacagcggaatctgcgtagcggtatacatatttatagccgttttcggcgccgatgacgtcgtaagacatctgcaccttttcgcccgctgccaccttgcagtcttcaagatacttgcaaaggccctgaatgtcatcgtcatagcccgcagggtccttgtctgtgctctctatggtctcgccctcgctcgccgtagaagacgtctccagcgttgcgaccgccgtgcttgaagagctgttgtttgcacaggccgtcacagatacgcacagcagcgcggccagcagaacagccagcagcttttttatatttttcatgatttgaaccaatcctctctttttcctcgttcttcttattatagaacgggtcatacagcttgattttaccataccccacggcagatagcaacacccatttgcaagaaaaaccgttttgcccgctgcaacggaatattttgtcccgctgtaaaataaaaacgaatgaattctaagcatattctaattgacgttcacaccatgtcatggtataatgaacacaacaaataccgttcaaatttatgaggaggtaatgccgtgaaaaacaagggtataaaaatcggagtcgtgttcattctgctgttcgctctgctctcagtggcaggctgtcaacaagaggacgtggtgatcgtaggcgcagcatcgggacagccgggacccaccagcgggcagctgcgcatttcattcgcgccagtgtcgtcttcggcaagcatcgaactatcaccaaacataaccattaacgacctttcgttgtcaacggataagtccttcaccgttacgaatacggataccaatgctacgaccgtgctgacgaatgtagtgatcgacacggatcctgcgttcacacatgcagaatttgatgcgaatggtaaagcactgtcaactacacgtgtaagccttttggtttcttacgcgttagaaccgggaaactatgaggtaacagacgcaacgggctatgtaaattatctttcacgcgaaggcgcaaccagcgacaaaataagactgtccggcaatgtaagtaacaccttcaccatcgccgcgcccgagctgaccccgaccccggagccgactgcaacacctaccgttgaacccacagcaacacctaccgttgaacccacagcaacgcctactgcggaaccaacagctacgccaacggcagagcccaccgcaacgcccacggcggaaccgacggccacgccgacagcggagcccacggcaaccccaaccgcagaaccgacggccacgcccacagcggaaccaacggcgacacctacggcagctcccacagccgtaccgactgccgtgccgaccgcaaccccaagcccgacgaaccaccccaaaacgggcgacgattttgcccccgcactttggctgacgctctgcgcaggcagcctcgcggcactcgccctgctccttaaaaaacgacacatttaatcgcaggtaaaaagccgaccacaccggcggctgtccataccggcacactgaaaaactcatgctttcaccgtttgaaagcatgagttttttttgacagcctatatattctccggccacggattgtgcaggcaggcttcttcgtgttgtcgaccaagctgccgaaggattaaatatcttcaaagcggcatcggtgtccgcgcaatcagaaggactgccagaattgcaccggcaaatgcggccacccctatgactgccagcatttttttgttgggccgcctcttcgttgctttgcaaatcagtgcggcacaagtcacgcagacagctgcagcagcaagcgcgatgcccaacatttcccataaccaagacagctcatacaagattctcatgtgttcatcactttcccttctgttcatcgcaaaaccgctgctttttctaaatctgttcgtattccgcgaacggcgcaccggaaatttcgagtgccttatccctgtaccggcagctccaccgcaatcgtggtgcccttcttcgagctctcctccacccggacgcagccaccgtggagattggcgatctcccacaccaaagaaagccccagcccaacgccgccgtactcccggctgcgggacttatccacccggaagaagggctgaaagatgctctgttggtattcctccgggacgccgcagccggtgtcggaaacgcggatcagaagcttttccggctcctgcgtaacagaaaccttcaccgagccgcccgaacggttgtacttgactgcattttccgtcaggttaaaaagcagtcggtaaatcagtgcatcgctgccgatgaggaagccgtctccctccatttccagcgtaatattgcgcttttctgccaaaagcgcgagatctgtgaagacctcctcaaccatcggggcaagctgaatctgctcgtttcgcgccacctgctgcaaattgctcatttcaagcagcgttttggtcatctgtgtcagtcgctccgtctgttcccgcaaaagcgcgagaaacttcgccgtttccggcagcatatcgggatgctccgcggagaacagctccagctgcgcctgcatcagtgccagcggcgtgcgcagttcgtgggcagcattgccggtgaactgccgttgggcggcaaaggcgttgtccaaccgctctagcatctgattgaaagagcaactcagctgccggaactccggcagaacattctcgttaatccgcatatccgccaggttgttcagctgcaccttctccacctgagacacaaagctgcgcagcggcttgagggcgcgtccgctgacaaaataggccagaacgccgctaagcagtgtcaccacagccgtaatataccagttggtcatgcgaaagcgcccctgcgctccgttgacaacaatggtcagatcctcatcgggcgttacgagctgcggattaaagctttctgcgccttcactgttcatcataaccgtgtcgcctccctgtaaggtgtccgcgattgtgtccatatagtacacaccggaggaacagagcagcagattcatgacaacacaggtgacaccgatgagcaggacagtcatcagggtgatgcgccactgcaaggaaagtcgcttcatgtttcctctcctcccatcaaatagccttcgccgatgcgattacggatgggatcaaaccccaacgcagcgcggagcttcttgcgcagggcggagatatgaacccggatagaattactgaagctgtctacgctgttatcccagacgtgctccatcagctcttcctgactcacaggccgtccctgatgcaccatcagatattccagaatgcccgtctccttacgtgtgagtgtcaggggctgcccgctgacggcagcggtgcgggagcgtgtgtcgaacgtcagctccccgcaggtcagcaacacggcttgctgggtgaactgtcgcaaagtcaggctgcggatgcgggcctccagttcagccaagtgaaagggttttgcaagatagtcgttggccccggcatccaacccctcaaccttgtcctccacctcgccgcgtgcggagagaatcagcacacgcgtctcgcggtctgtctgccgcaaggtgcgcagcacggtcatgccgtcctttcccggcaggttcagatcaagaagcaccaaatcgtagcgctccacacccagaagttccagcgccttttccccgtcgtagcagtagtccacactgtatgccaagcgccgcaaactgcggacaatcgtctcgcatagggcgcgttcatcttcaattaccaaaaggtgcataagagtcccccttttcatttcctttttctttattatagcaaaagcagataagatctgcattaaattttcgttcttaacagggattttatcttccctgtgctatgatgatggcagaaaaagtgaaagggtgataaaattgagctgtgcaaaaaaagcagtggcgcaagccatgttgctggttgtgggtatcgccatgctgtgcttcggcgcatggcgcggcgaggccgcgacggtactgagcaaagcgattaaattatgtctggagtgtgtaggcattgggtaagaaattttcgggcgcgtcacagattatgtcccgcttccgcggctggatacaggcgggggcagctttattgaccaacctgcacctgccgaactttctcaagggcaaactgtaccaaggcgcagggaaaaccgtctgtgtgcccgggctgaattgctactcctgcccggcagcctccggcgcttgtcccatcggggcgtttcaggcggtagtgggttcttccaagttcagtttttcctattatatcacaggctttctcattttgctcggcgtcctgcttggacgctttatctgcggttttttgtgccccttcggctggtttcaggaactgctgcataaaattcccacgaagaagttctccacaaagaaactcaagcccctgcgatacctcaagtacgccgtactgctggtgatggttttcctgctgccggcgttccttgtaaacgatgtaggcatgggcaacccgttcttctgtaaatacctctgtccgcaaggcgtactggagggggccatcccgctgtcccttgccaattccggtatccggtcggcgctgggaagcctgtttacatggaaattcggcgtcctgcttacagtaatcgtactgagcgtaatattctaccgtcccttctgcaagtggctttgcccgttgggggcgttttacgcgctgttcaaccgggtatctctctttcagataaaggtggacaaaaacaagtgtgtatcctgcggaaaatgcgccaaagcctgcaagatggatgtggacgtaacgaaggcgcccaaccataccgagtgcatccgctgcggaatgtgcatacgcacctgtccgacgggcgccgtgcgcttccgttacggcttcggagacggtaaagataaaacaaaggcggcaaaaaaggccgcagaaaataataaacaataataacaaggagaaaaaaacagatgaaaacaaatagaacgaatacggccggccgattgctggcactgctgcttctcgccctgatgatgctgtctttgacagcctgcggcacaaagaacggagacaaaacggacggaatgagcagcgaaccgaagaatgccgaggaagcggttgccatgcacaaagatctgatggagcaggaaaataccattctctcagagaacaaatccctttgggaaaaggtattcatggcagccgacaagggcatgaccatgcaggaggacggcaaaaactacggtgatttcctgctcagtacaatcgaatccgctaaggatcagtttacggaggatgagctgaagctgctcaaagagggggcggagaagatccgcgacattgaaacccagctgaccatgattgaggaaaagtaccccgaagcggcacaggaatctacggatggcgctatgagcgtgcccgcaggcaacgacatgaccacgccgcccgatgacggcagtatgcagaaatccgatgacggcagcatgcagaaattccccacctttgagggcaaggacctggatggcaacacggtgaaaagtgacgagctgttctccggcaacgccgtcaccgtggtgaatttctggttcacaacctgcaatccctgcgtgggcgagctttccgagctggacgcactgaacaaggagcttgcggagaaaggcggctccctcatcggcgtcaacaccttcacgctggacggcgacgaagcggcaatttccgaagcaaaggatgtactggccaagaagggcgcgacctaccagaatgtgtattttaactccgatggtgaggcgggaaagtttaccaccaacatctttgcctatcctaccacttatgtggttgaccgcaacggcaacatcgtgggcgaccccatcgtaggtgccatcacggaaaaaaatcaagcggaggcgctgcaagcccagattgacaaggcccttgccgccgacgcaggctgacccgagatttaaaaagtgcct

SEQ ID NO: 1807 - DNA, 18298 bp, Unknown
  gut microbiota DNA sequence
gcgtatacattagaacaaaatatggtgggcgctaacggacttgaaccgctgaccccctgcacgtcaagcaggtgctctagccagctgagctaagcgcccaattttctgttgctcgattattatatagcaagtccccgaaaaatgcaagtcttttttgcgaaaaagttaaaattaattttcctttcgtgaatatcacgaaaaagtgcgtaaaatttggtgcactgttcgcagaaatttaaggtttcttacaaaactcataagaattgcacatttctattgtttattccttttctatgccgtataatgaaaatactgaaaactgtgaatagaatgtgaatgaaagcggatggcggttgcgcgttgcgctttgaatacggagatttagatagaattggaaatctgaaaacagacgatgacgttggtcctgcaccaaggccagaaaaggagaaaccatgaaaacactgtcatatgtgaactttatcatttctattttatttatggcttgctacgcgtaccaggcggtctaccttgtggcggcgcttttaaaaaagcagaaagtcttcaaagcgaagaagctgcaccgctacggtgtgctgattgccgcgcgcaatgaggaagccgtcattgcgcagctcatccgcagtgtgcgcgcacagaagtatcccgaggagcttatcgatatttttgttgtggcggataactgcacggataacaccgcgcaggcggcgcgcgaagccggggcggtcgtttacgagcgccacaatacgtatgccgtgggcaagggctatgcgctgcgtttcttattagaaaacatttttaagaattttggcgaatatgcctacgacggttttttcgtctttgacgcggacaatattctggatgagaattttatctccgagatgaataatgtttttgacaacggctacaaggttgtcacgtcctaccgcaactcgaaaaactttggcgacaactggatcagcgcgggctactccattttcttcctgcgcgaagcgacgcagctcaatcgcgcccgtatgatgttcggtaccagcagctgcgtttccggcaccggctttttgttcagcagcgagattgcacgcgaaaacggcggttggaagcatttcctgctgacggaggactttgagttcaccgtggaccgcattttaaaggacgacacggtcggttactgcgaaaacgccattatttatgacgagcagcccacgcggcttgggcagtcctttacgcaacgtgcccgctggattaagggctatttgcaggttttcagccgatacggctttaaaatgctgaaaaaaaccgttgtggatggcagttttgcctgcttcgatatgattatgaacaacattccgtgccttgtcttgacctgcgcttcaatcgtgtttaacgcgattatggtcgcggcgggcgttgtgacgcgcacgccggatatgggcgtttgcgtgctttccgtgtgcagcggcattttcggttctatactgacgctgtggttcgtcggcggcatcacgtgcatcacacagagaaagcgcatccgtgcgtcgaaaaaagcgatgttcttcggttggctgttgttcccgctgtttattttcacctatgcgattgcaatggtttacgcggtgtttacgaacattgaatggaagcccattcagcacaaagtggcgcttagtgtggaagacctgaacgacactaccaaaaaatagcacaaaattgcactcaaaaacagggcgtgatttgctataatctatatttgcttataaacggcacctgtgataaaatagtaagagattactttgtcacaagtgccgttttttgcggcagtacaaatcctgatttttccccagaagaaaggaatggtcacaaacatggtcacacgcgtatttgtggagaaaagaaagggattcgatgttgaagcacgccacatgatggcggatcttcgtcagaatctcggcctcaaggctattgaggacctgcgtattttgaaccgctatgatgtttccggtctttccggcgaggagttcgaggcggcagcccgcacgatcctttccgagccgaatgtggacaacgtgtacgacgaaaactacaagatcagcagcgaatatcacgtcttcgcaacggagtttttgcccggtcagtacgaccagcgtgcggattccgcttcccagtgcgtacagctcttgacgcagggcgagcgcccgcaggttgcttatgcaaaagtgatcgccgttaagggcgacctttccgaagaggaaatggacaagattaagaactatatcgtgaacccggtcgaatcccgtttggcatcgatggaaaagccggagacgcttgacatgaagatcgacgtgccggcagacgttaagcgcgtcacgggtatgatctcctggagcgacgaggagcttagagaatattacggcaccatgggctttgccatgacgtttgaagacctcgcgttctgccgcgattatttccgcgacgaagagcaccgtgacccgagcgtgacggagctgcgcgtgattgatacctactggagcgaccactgccgccacaccaccttccttacgcgtctcaacaacatcgagatcgaaaagggaaagctgagcggcgccatcgaaaaggcactcggcgagtattttgcagcccgcgaagagctgtataagggcaaggacaagcccgtttctctcatggacatggcggtcatcggcgcgaaatacctcaaaaagcacggcatggtagacgatctggacgaaagcgacgagatcaacgcctgttccattgaagtgccggtcacgatcgacggcaagaccgagcagtggctcgtgcagttcaagaatgagacccacaaccacccgacggagatcgagccgttcggcggcgcggcaacatgccttggcggcgcgattcgcgatccgctctccggcagagcgtatgtttatcaggcgatgcgcgttaccggcagcggcgacccgactattccgtttaaggatacgatgaagggtaagctgcccacaagaaagattaccaccggcgctgcggcgggctattcctcctacggcaaccagatcggccttgcgaccggtcaggtcacggagctttatgaccccggttatgttgcaaagcgcatggagatcggcgcggtcatcggcgcatctccgaaggcgaacgtcaagcgcttcgagccgaagcccggcgatatcattgtgctgctcggcggcgcaacgggccgtgacggctgcggcggcgcaacgggttcctccaaggcgcatacgctcgaatccatcgaggtttgcggcgcagaggtgcagaagggcaacccgccgaccgaacgcaaaattcagcgtctgttccgtgacccggaggtttccacgctcatcaagcgctgcaacgacttcggcgcgggcggcgtgtgcgtcgccatcggcgagcttgcaccgggccttgagattgatttgaacaaagtcccgaagaagtacgagggcctcgacggcaccgagcttgcgatttccgaatcgcaggagcgtatggcggtcgtgctcgacccgaaggatgtggagaaattccgcgccaaggcgcaggaggaaaacctcgacgcgcaggtcgtggccatcgttaccgaagagccgagactcaagatggagtggcgcggcgaccgcgtagtcgacctgagccgtgcattcctcgatacgaacggtgtgacgcagaacgcagacgcgttcatcaccgcaccggatgaaacaaaaaattaccgcaacgccgtaccggcttgtcttgagaataaatcgctggacgaggcgttcgcagagaacctctcccgcctcgaggtctgcggccagaagggcctttccgagcgtttcgatgcttccatcggcgcaggcaccgttttgatgccgtttgccggtaaatatcagctgacgccggaagacgccatggttgcgaagattccgctgctcacgggtgagaccgatgacgccactgctatggcttacggctatattccgggtattgcacgcttctcgccgttccacggcgcagcgtacgccgttgtggagagcctctcgaagctcgcagctgtcggcgcagatccgatgaagtcccgcttgacgttccaggagtacttcgagcgcctgcacgataagccggagcgctggggcaagcctgccgcagctctgctcggtgcacttaccgcgcagctgaaccttggtctgccgtccatcggcggcaaggacagtatgtccggctcctttgaagacctcgatgtcccgccgacgcttgtcagctttgcggtgacaatgacgaaggccagcaagacgatctccggcgcgttcaagaacgccggcagctacgccgtgctgctgccgattccggaggacaaggagactgaactcccgaactgggaagctttgaaggtgtactacaagaatgtgctcgcaaaaatcgcggacggctctgttctttccgcacacgtcgtcaaggaaggcggcgcggctgctgccgttgcgaagatggcgttcggcaacaagctcggcttcaagttcgagaagactgccgaaaacgcagagctgctttttgccccgaaggctggcgcactcgtcgtggaagttccggcagatgcgcttgagagcgtcaagaatatattcgacgctgttgtgctcggcaccgttaccgatacggcaaagattgagctgaacggcaaagcgctcgacttggacgacctcattgagacctggaacggcaagctcgaaaaaatcttcgcgaataaagcggagaccgtcgccgtagaatatgatgtgccgctcgataaccacaagtacaccggctccccggtcatccgcgtcgcaaagccgaaggtattcatcccggtattcccgggcaccaactgcgagatcgacacgaagcgtgcgtttgaaaaggcgggtgcagagaccgagattcttgttgtgcagaacctctgcgcaaaggacatcgaatacaccatcgaccgcatggaaaaggcaatccgttcctcccagatcatcatgatcccgggcggattctccggcggcgacgagccggagggctccggcaagttcatcgcgacaacgttccgcaatccgaaaatcgcacaggcggtcacggacttgctcgatacgcgcgacggtcttgtgctcggcatctgcaacggcttccaggcgctcatcaagctcggtcttgtcacctacggcaagatcgtggacctcaaggacgacgatccgaccctgacgtttaacacgctcggccgccacgtttcccgcatggtctacactcgcgtgacaaacacgaagtctccgtggctctccggcgtcaacgcaggtgatgtcttcgccatcccggtctcccacggtgagggtcgctttgtagcggatgacgcagcgctgaaaaagctcatcgaaaacggccagattgccacgcagtacaccacgccgtgtggcaaggtgagcggcgacatcacatggaacccgaacggctccgtgtgcggcattgagggcatcacaagcccggacggccgcgtcttcggcaagatgggccacagcgaacgcaagggcgaaaacctctactttaacgtgccgggcgaaaaggatcagcagatctttgagagcggcgtgcggtacttcaagtaataaaaggcagaaacgccttataaaattccggtatgcgcgggcaaaatgctgcccgcgcagccgcgtataaggacaatttggttatggacattttacagaaaagaacatgggcgcagatcgacctcgacgcggcggcgcacaattttaaggaaattcgccgctatgttggcaaccagtcgatggtctgctgtgtaattaaggcagatgcctacgggcacggcgcggtgcgcatggcagaggaatacgaagccctcggcgcagactggctggcgctttccaacattgaggaagccttgcaggtgcgtcgtgcgggcatcaagctgccgctgctcgtgctgggctataccccggcggaagccgcagacgtgcttgccgaaaacgacattgcgcagtgcgcgtattctgcagaatactgcgcggcgctctccgaaaacgccgtaaaaagcggcgttaaggtgaagattcacgtcaaggtcgataccggcatgagccgcctcggattctattttcaggacattgagcgcgacaaagaggccgtaagcgttgtggcagaagcgtgccgccgcccggggcttatcccggagggcatcttcacgcattttgccgtggcagatggtggcgagaatggcaaagcatttaccttgaagcagttctcgtgctttatggcgctcatcgcggagcttgaaaagcagggcatcacgtttaaaattcaccactgcgcgaacagcggtgcgatcctcgattaccccgagatgcacctcgatatggtgcgtgcgggcgtgattttatacggcatggaaccgtcgctcagcgtggagcatcacgcggatttccgtccggtgctcagcctgcactccgtcatttcgcacgtgaaggagattgagcccggatcggacatcagttacgaccgcacattcaccgcgaaggaacgcatgcgcgtcgcgaccattccggtcggctacgcggacggctactcccgcaggctctcgaaccgcggcagtgtgctcattcacggcacgcgctgcccgattttgggtaaagtctgcatggaccagtgcatggtggatgtttccgccgtgccgcaggcgaaggtaggggacaccgtaacgctcatcggtcgcgacggtgaggatgagatcaccgcggcggaaattgccggcatcatggagacaatccactacgaagtggtgtgcgacatctcaaagcgcgtcacacgcgtctacctgaaaaacggcaaagaagtcagtgttctggactgtattttggacaaatattgattttaaagcagcgacttttggctccgttcagccaggtcgctgctttaaatttatagtgatttggaagggtgaaagtgatggaaaagcttttaaaactgcgcgatgaaatgaaagaggatttgctgcacggttctattttcccgttctgggagcaatataccatcgatcacgaaaacggcggcttttacggcgccgtgacggttgataaggttattcacaaggacgcgtccaagggcctcgtgctgaatgcacgtttgctgtggacatttgcgggcgcgtaccgcattttcggcgacgagaagtataaggagctcgccgaccgcgcgtttaactacatcgttgagcgcttctgggaccacaaaaacggcggcggtttctggatgctgcatgcagacggctctgtggaagacgacacgaaaatgacctacggtcagggctttttgctgtatgcgttctccgagtacgtccgcgcaacgggcagcgaggaagcacgcagatatgccgatatgacgtatgattacatcgaaaacgagtgcaaagagggcaactattaccttgaaaacgcacgcggcacgggcagcagcaacggcgccattacagaggcgggcaacctttccatgaacacgcacatccacattctggagccgatgacgtgctacttccgtattcgccacgatgcctgcgtagaggagagccttgtgaacctcatcgagatcaccgcacgtagaatttatgacaccgagcaccaccattttgtcatgttcttcaacgataaaatggagccgctgccgggcgaggtttcgttcggtcatgacattgagggctcctggctgttgacggaagctgccgaagtgctcgaaaagtacggcgcagataaagcccgtgcggaaaagctccttgaggaagcgaaagaggtcgccatcaatatggtgaacttcacactgagccacggcatggatacggacggaggtctgtttgacgagggtcacgaagaaggcggcatcgctgtgccgaataaggtctggtgggtgcaggcggaagccgttgtcggcagcgtgaacgcatggcagattacgggcgacgagaagtacctcgattccgcgctgaagagctgggcatacatcaaagccgaaatcatcaacggcccggcgggcgagtggtttgcaagcggtaaaaattccccggacgaagaaaattcgcacctgctgtgcggcccgtggaagtgcccgtaccacaacgccagagccgcgtttgaaatttacgagcgctgcgaggcactggaaaagtaaacagcaacagcaaagccctgccgagaaaattcccggtagggcttttgtcatgttaacgcaagcttacaatgcaaaacggccgctctccgaatactcgaaaagcggtcgcttgcttatttattcagtaattcgtcaacctcgacgggttccagctcttttaatgccgggtggtcggttagcgttttcagcatgcgccaaccgaaatgatcttcttccaaattctccggcacgggacggaagccgaaatcaaggtacagctttgcggcgacccacgtggtggtctgggtgggcacgaacagctctttgtagccgagcgcctgcaaacggtgcagcgtgtgcgcgatgagcgggcgggaaagtcccttgccttgcgcgtcgcggcttacggaaacccaatgcagccagccaccgggcagcttttcatcgaaaaacgccgttgcggtcgcaaccttcttgccgttcgggtcgacgatgaagaacattctgtcgggcagaacgtcttcgtgcttgccgtagtagcgctgccacgcgtctacgccttcttcaaaagccgaaaactctttcgccgatttttcaatctcaatccacgtatcgcggtcgccgggggtgtaggttgtgaacgaataccccgcgggcagatcgtaatgcggtatttccgttttcgccggcatggtcatgaacagatggtagtacttcaaacggctgtcgtgattatctaaatgtaaagaagctaagtctttcatagatttgatcatgaattaggattcatttctgccgcagcatttcttgtatttcttgccgctgccgcacgggcacgggtcgttcctgccgggctttttgccgtttttgcgcaccggctgcttgacggccggcgtatcggaggatgttgtgccggtctccttggcgacggcttcacgcttcggtgcttccggcgtcttcaggcgcacagtcagaatcatgcgggcggtgttttcgcggatcgtgtcgatcattgcgtcaaacatgtcaaagccctcttcgcggtatgcaatgaccgggtcttgctggccgtaggcgcgcaggcggatacccttctggagctcatccatcgcatcaatgtgatccatccattgcgtatcgacgttcttcagcagcaccacgcgctccacttcacgcatgatcggcggggtgaacgccttctcacgcaggtcataaagcttgtgcgcacgctccttgagaaaatcgatgaccgtttgctgctcgagatcctcaaacgcctgaccttcatagtgcagttcatccggattgaccatccagccgaggtagtggtcgcgcagaccgcggagatcccagtcgtcgtgcagggtgttctccggcaagaagcgcttgacgttcgcttcgatggcctgatcgatcatggacataatctgcggcttcacgttgtcgccgttcagcacacggtcgcgctgctcatagatgatctcacgctggcggttcatcacgtcgtcatactgcagaacgttcttacgaatggcaaagtttctgccctcgaccttcttctgtgcgttttcgatggtgttggagaggatagacgcttcgatcggcatgtcctcgtccacattcaggcggtccataatggtctggatgcggtcgccgccgaatagacgcatgaggtcgtcttcaagagagatgtagaagcggctcttaccgggatcgccctgacggcccgcacggccgcgcagctggttatcgatacggcgagattcgtggcgctccgtgccgatgatgtacaggccgccgagcttgcgaacttcctctgcctccggcgcaatctccgctttgtattttttgttgagctccgcaaatgtcttgcgggcattcaaaatctcttcatcgtccgtgtagccgtaggcggaagcctcgccgatgagctcctcagagaactgcatgcggcgcatttcggcacgcgccatgaactctgcgttaccgccgagcagaatatccgtaccacggccggccatgttcgttgcgatggtcacggcgcccttacggcctgcctgtgcgacgatttcggcttctttttcatggtactttgcgttcagcacttcgtgcttgatgccgcggcgcttcagcatggcgctgagctgctcggatttttcaatcgtgatggtaccgaccagcaccggctggcctttttcgtggtgctcgatgatgtcgttgataacggcattgaacttgcccttttcggttttgtaaacaacgtccgggcagtcttcacgaatcatcggcttgtttgtcggaatctctacaacgtccagtttgtaaatttcgctgaactcggattcctcggtcatggccgtgcctgtcatgccggagagcttgttgtaaaggcggaagaaattctggaacgtgatggttgcaagcgttttgctttcgcgcgcgattttcacgccttccttcgcttcaatggcctggtgcagaccttcgttgtagcgtctgccgtacatcagacggccggtgaattcatcaacgatgatgacttcgccgtcgcgcacgacgtaatcaatatcgcgctgcatgatgccgttcgccttgatcgcctgattgatgtggtgctgaatggtgatgttgtccgggtccgtgaggttttccaagctgaagaactgctcggctttttttacgccgcgtttggtgagcgttgcggtcttctgcttttcattgatgatataatcgtaatcctcgtagatctcgtcattgtcttccttttcgttcgtctccgccacgcggatggggcgcagcgttttggcaaagcggtcggcgacgttgtaaagctctgtggactgctcgccctgaccggaaatgatgagcggggtacgcgcctcatcgatgaggatggagtccacctcgtccacgatggcgaagttatggccgcgctgcaccttgcgctccttgtaggtgaccatgttgtcacgcaggtagtcaaagccgatctcattgttcgttgcgtatgtgatgtcgcaggcgtaggcttttttcttttcgtccggctccatgccgggaatggcaaggcctacggtgaggccgaggtagttgaacacacgcgccatcatttcgccctgatattttgcaaggtaatcgttgacggtgacgatgtgtacacctttgccgcttaaagcgttgaggtacgccgggagggcagcggtgaacgtcttgccttcgccggtcttcatctcggcgatgcgaccctgatgcaaaatgatgccgccgataatctgcaccgggaacggcttgatggagagcacgcgccacatggcttcgcggcacgttgcaaacgcttcgggcaggatgtcgtcaagggaagagccgagggagaggcgctctttcaacacggcggtctggcccttcagctcctcatctgtcatttttgtgtatttgtcatcgagcgcgagcaccgcttgcttaagcggttcaatgcgctttaattctttcttgctgtagctgccgaacagctttgtgagtaggttcatggttcgggaacactttcctttctttcgcgcggattccccgcgcgcggcatataaatcagtatagcatggaacggcataaaaaagcaagcgataggggcatattcatgaaaactttataggtgatcaaaaagaagcgcattttaaaacgcaaaaacggcagtgcaattcgagaaaaacagcaaaatacaggatagccttagccgaaatgcacaaaaaactcttttttcccaaatcataaacagcttatgaacaaaatgtgactttttattcggttttctcttgattttcgcaaaattagaggctatactataggtaacaattcctgtttttccgatgtgtgcaaaccataactggtcaaaaaaacgaagaacaggaaattctttaatttataggagagtgaacatccttggacaaattcttcaaaatttccgagcgtggctcgaacgtccgcacagagatcattgccggtctcacgacgttcttcgcgatggcttacatcgtagtcacgaacccgaaccagattgttagcttcaaccatctggctccggatgccgaccctgccttccagcagatttggaacgctgtgtatgtcgcatccattctggcagcaatcatcggtacgctgctgatggctctgtatgcgaagatgccgtttgcacaggcttgcggcatgggtctgaactccttcttcttcgtatccttcattctgccggaaatcatttccggcggcgacgtcatcaagggctaccatgcaggcctcgtcatcattctggtttccggtattgtcttcctgctgttctctgtcacgggtctccgtgtcaaggttgcaaaggctcttccggactgcctcaagaaagcaatcccggccggtatcggtctgttcatcgctttcctcggcttccagaatgtcggcatcatccagactaaccagtacacgctcgttcagttcgtcgatatccacggcgcactgaaggcaggcgcattcttcaacgaagttgacggcgtaaagccgtttgtgccggctctgctcgccttcctcggcctgcttatcatcgcgattctcgagaagcacaatgtcaagggcggcgtgctcatcagcatcgcaggcatttccgttctgtactatctcctttccggcacgaccccgaccttcgacatgagccagatcggccagacctttaaggatttcggctccatcggcatcaccggtgtgttccaggctgacgcttggcagcgtgcgttcacaggctctgagctcggcggcatcttctccgcaatcatgctcgtcgttacgttctgcctcgtcgatatgttcgacaccatcggcaccctgtacggcaccgcttctcaggcaaacatgctggataagaacggcgatccgatcaacgttaaccagtgcatgaccagcgactccgttgcaacggttgcgggcgctgtttgcggtacttccacctgcactacgttcgttgagtccgctgctggcgttggcgccggcggcagaaccggccttacgagccttgttgttgcaatttgcttcgcggtttgcctgttcctcagcccggtcgcttctcttgttccgacctgcgctacggctccggcactcatctatgtcggcgttctgatgatgaagggcttcgcaaaggtcgatatgtccgacctgcgcagcgctgttccggcgttcctcgctctcatcatgatgccgctgacctactccatctccaacggtatcggtatcggcgcgattgcttatgtgctcatcacgctcttcaccggtaagtacaagaagaacgacatcggtatcaccattatcgctgcgctcttcgtcattaagttcatctttgttacgatgtaattcgtacataaaacgaactttagcttgagataacataagaggcgctcgcttgtgatttttcacggcgggcgccttttttctttttattgcgcggttttgtcctgctatactttgggcatatcggagagtaaaaggagcaggcgatgaaacaggcggatagtttgcttttaaacgcgttgaaagcagcgatacataacgaaaaagcggcgctcggtgtgctgccgcaggaaacacagacggagcttttgcgccaggcggtgcgccacggcgtgctgccgcttgttcttgatgcgtgcggcaatgcactgaaagctgcgcggcaaatggcgttttgccaaacggcagagcagattttgaaaacgcaggtatttttacagctttacagcaagctgcgcgaaatggaattgcatccgctcgtgctgaaaggcccggtgtgcgctgcgctgtacccgaagccggagctgcggctgttctcggatgtcgatttactggcggtttcgggtgaatttgaccgcacacgcaatgctttattgcggctcgactgccgcacagcaggggagagtgtcgatccgcttgagcagacattttacctgcccggcagtccgctcgttttagaactgcacggcgcggcgttcccggaaaacgatgcgtatgggcacatgaacgccttttttgcgtatgaaaagctgcgcacagaaaccgtttccgtgcagggcgaagaaatttatacgctcggcgcgaacgagacgtttttgtaccttttgtgccacagcttaaagcactttctgcacggcgggtgcggcatccgcgcggtgtgtgatttgctgttgtttgccgaaaagcatgaaaaggagcttgacaaactgtatttgcgccgctgctgcgaaaagctttcggcactcgaatttttgacggcgctctttgaaatcggcgagaaatatctcggctttgaggaaacggaaagcttggcgctgcttcgtgtgcaccccgcgcaggatgagactgcgcttttggaggatattttggcaggcggcgtgcacggtgcggcagaaaaaagccgcttgcacagtgcgaacatgacgctgcacgcggcggctgtgcagaatgcaggaaaacgcgagcgcttttccgtgctgcgtgcggcgttcccctctgcaaaagcgctgcattgcgcgccgcatagcttgcctgccgcatggggaaggcggcttatacgctacggtaaggaaaacattcaaaaccgtacgagtcttagaaaaagtgtcgagatcggcaagcggcgcatggcgcttctcaaaacatatcacctcataaaataagccggcggctgcgcccaactcgggtacagccgccgatgctttatttttgattaacggatgcagaacgtcttgatctcatacggcttgatggtgaatttgaatgtaccgccttcgaccgggacatccgtgagcgcattctcctgcaagtcacactccgtaacggaagcgatggggcggttccaatgcagttttgtcgttgtgcgggcgttttcacattcgtacagacgcacgatcacgccgtcgccgtcttccgcctgcttgacggtttccaaaatgacgtttttggcgtctacgcttgcgagcgagtacgcttcgcctgctgtgccgcctgcggtggcgcgcacaggctgattcaggaagtacgcctgcgctacggtttcggcgctgcgccatgtttcggcgtgcgggtagagcgcgtaggtgaatacgtgcatctcctgatcggcgacagggttcggctctgtgccggatttgatgagcgtcagcgccatttcgccgttgtgcacggagtgaccgtatttgcagtcgtttaacaggctgatgccgtagtgaccctcggaaacatcgatccacttttggccgcagctctcaaagcgtgcctgatcccagctcgtgttctgatgtgttttgcgcgtcacgttgccgaactgaatctcaaatgttgcttcgtccgtgtgtacgtccatcgggaagtgggctttcaggaggtgctggtgctctttccagtcgaccgtcgtctcaaagtcgatgcgcgggcacgcggcgtagaagtgaattctctgacagatgaccgaacggctgaccttgcgctcaatcttgagagttgcgcgcacggggccgcgttccgtccattccatgcgctgcacgtcggtgacatcccagaatttctccgtatagtagcagtcgatgtcccagttgtcgtagtgcatcggcttgtcctcgtacatgcgcatcaggttcgcatatttgccgggctgcacggtctcgcggtcgtttttgcggtcataaaggcgcgtgatgagcccgttttcatcaaattcaaccgtgtagagcggcgtcgtgatcgtgctgccgtcaatgtgcagcgggttttcaaagctgcctgcttcgaccggcgcaaagcacttgtagcccttcggcggcaagtcgggcaggaacgccacagcaccgttttcggtctgctgcacgggataagtatttttgccgtcggaaagtgcatttgcggtgcaattttcaagtagaacgatatcattgcgcgttttacccgtcgtgttgaacaccgtgatgccttctccctgcggcgcaagcgcttgcatgcggtcggcagaaagcgcagagatcgtctccgccatcgcatcgtattcctttttcgtctgctcgtagacctcgtgaatggcggtgccgggcagaatatcatggaattgattcaaaagcgtatttttccacaggctgtcgagcgcttccgcggggtaggggagctgcggtgctgccagtacgctcaaaagctccaagtccatgagtcccagctctgttttgcggttgccgcgcttgttgcgcgccatggaggtgtacgtgccgcggtgatactcaaagtagagctcaccctcccacgtgggcagacgtttgctgtcttttacgcgctcgtttaattcgtcaaaatactgccgagcgaagacctgccgcaccttcgggatgcccaaaacgcctttttccatgcgcttgctcgtctccagcatatcgcgggtcgggccgccgccgccgtcaccgtagccgtaagcgatgagaatatcgttgttgatgtctttgttttggtagcgctcccagccgcccataatggcatccgggtgcagcatgccgttgtaggtggtgaagaagttctgcacgttctggccgatgctgagcgtggtgatgaaatgcgtcagcacttcgctgccgtcaatgccgcgccactcgaatgtatcgaacggcacttcgttgaactggttccacgaaagcttcgtcgtcataaagtaatcgatgccgctctttttcatgatctgcggcagcgcgccggagtagccgaacacgtccggcagccacaaaatgcggttatccacgccgaattcctcgcggaagaagcgcttgccgtgaatgaactggcgcacaaggctttcgccgctcgtcaggttgcaatcggcttccagccacatgccgccctccggctcccaacgcttttccttcacgcgctctttcaggcgcgcatacagctccggataacgctcttttaagaaataataaagctgcggctgactggacatgaagtgataattcgggtattcgtccataagcttcaaaaccgtcgcaaagctgcgcgcggtcttttcacgcgtctgggcgaccgtccacagccacgccacgtcgatgtgcgtgtggccgatgcagcttgcaatcacgtcgtcgtgtcccgcaaggtcgctgtagaccgcttttttcagatatgcggaagccgcgcgcacggaagcgtaaaattcctcgctgtatggcgtgcgcaggtcgagcaggtttatgccttcgttcagcgcgttttccagcagcatgcggtttcggtcttccttttccatgcgcgaaaacgcctcgaccggcactttcaagtcataatacagcgcttcaatctccgggtcaatctcctgaatttccataaagagattgaattcgttgtggatggtgccggtgtacgcttgcaagtcgaacacaagcttttcgccggaaatcgctttcggggaaagcagcacgtcacggtgattcatgtccatgccctgcacgggcacgttgttcacaaacagcaaaaactgcgggtttttgccgtcgtccccttcgatctgcgtgcgcacattcagccacattgccttgccgttaagcgctttcggtacggtgaattccgtgcggaaccaatagtgctcgtccgggccgtaccagtgcatggtgcggctgtcaaacggcgtccacggcggcgcagcggcatctgctgcttcggggcggatatacgtgccctttttgcagataaggttggtcagcggaatgcgctgcacgatgcgcagacggtaaagctcatcgcaaatgcgctccacacgtttatcgagatacctcatagttgcagctccttttctatatcggtttgggtttttgtaaagacttgtgcttttgccttgattttagcataataaggtacagaaaacaagataaaatgcacagatttttccggatttttacacattagaattgtctttacgtatacgtcgcgtcgaaaatgcagaaaaacaagttatttatgcacagaacataaaaaataattgaaaatcagcggaaagtacgctatactgaatatacaacgcggacggtatttttcggaaaagcaccggtggctcagtccc

SEQ ID NO: 1808 - DNA, 3527 bp, Unknown
  gut microbiota DNA sequence
aaatcacatcacataggaaaacagaggaaaaatatgcgaaaaaagacttggatcctcttgctttttgccacgcttattgcgctgctttgcgcatgcagcgatacgacacagcaaccggagacggaaaaaccgaaaatacgtatcggcggcacaacgtatgcgccgtatttttaccgcaatatcggaggcaactataccggcgtcgatgtggagatcgccgaggaagcctgcgcgcgtatcgggtatgagccgatcttcgaggagctcaatatcgacagacgcttcgagcttttgaatgaagactatgtggattgcctttggagctgcctgacgatggaaggcagagaagatgagtttatttgggcaggaccgtatatgtacacgcagcgcgtggtcgtggtgccgtcggacagcgagattgaaacgcttgaagaccttgccgaaaagtgcgtggcggtgcaggccggctctacgagcgaggaaatcattttaaaagggctgaacccgaatttgccggagattacggacctttccacattcagcacggtgggcgaggtgtttacttcgctgcgcaagggctatgcggatgcggccatcgggcatgaaagctcgctgagattatatacggacgaatacccgaacggctaccgctacctcaacatgaacatgtacagcgacgccgtgggtgtggcatttaaaccggacggcgatgcagtactggcggaaaagctgacgcaggcgctgcttgaaatgcgcgaagacggcacaacggccgctattgtgaaaaaatatgggttggatgccgaaaaaagcgtgaacggaggtaccgaatgatgccgaagttcaagggaaaaacaaaaccgaagctccataagccgagcatggaaacggtcatgcggtggattgtcacgcttcttctcggccttattgtgctgctgccggtatttgcaggcgtaacacagtatgaacagaacaaggcgaaagcggatgttgaggacgtactcgcttttatgcagacgagctgccgcaagtacgacaactaccgcttggccaataccaccgaagcgctgcaggatgttttgaccaaagtcaaaacactgacggcgtaccgttacgaagaggaagatgcgcttttaaacgaaaatcgcttacagcgctatgcgaaatttcagtatttgaccggcatttttgttttggatgaaaatttctccgtgctggctcattacgacaaagcgggcaaggatgaaagtctgctgctcagccagataataggggacaaaaatgcggcggatattttgaactatccgcagaaaacctatgccgaccagatctgtttaaacggcaatacgtataactacgccatttccgcacggcaggataaaccgggactcgttatttgctatacggatgtcacgcgctttcaaaacgataaaaatgagctttctctctccactatgctggatgctaaaatgttccggcaggatgtgaccgtcgtcatcacggacggcacgcgcgttatcagcacgaattgcgagcagctggagaacacgcttgtgcagtattatcctattgctgacgtgctcgttggaggggagcagcttacaccggacacattgctgcaattaaaaaacggcagcggcacatggtacggtatgttcacccagtacagagattattatttgtatgcctttttcccgagtcgcgtagtctacgcaagtcgccgcggttggatgctgctgtttacggcaatctacctgttttgcggcatggggtaccttatttggcggcagtacagtaaaaagcgccgcttactgcgtatggaaaaggaataccaccttatcagcgccatttcgagcatctacctgtcaaacctgctcattcacccgcaggacgatacatgggagcccattgtgcagagtgagcgcatgaaagcaatcacaaacggcgttttaagcgcaaaagccatgctggaaaagtttaacaccgagtgcgtagccgaggcgtaccgggaggaattccgtgcgtttacggacctcgacaccgcacagcagcgcttagagggcaaggcttttgacggcttcacaatagaagatgtgcagggcaagtggtaccagctgcttcttgtgccgcagcgccgctttacgcaccgggaaaagccgagttcgcttatgcttttgttccgcgatgtttcggagcaaaaggagcgtgatatggaatatcaggaaaacctgcgccgcgcggcagaggaagctacccttgcaaacgccgccaaaacggattttctgcgccgcatgagccatgatatccgcacgccgatcaatggcatccgcggcatggtgcagatcgccgatcgtttcccgaacgacgtgaaaaagcaggcggaatgccgcgcaaagattatgcagtcttcggattttcttttagatcttgtaaacgatgtgctcgatatgagcaagctggaatccggcgaaatgcagcttgaggaagtaccgttcgatttgaacgagctgctgcacgatgtgggtgtgctgctctccacacaagcgcaggcgcgcggtattacgtataccgtcacaatggaagataagggcgaaaagcatgtcatcggcagcccgctgcatttaagacaggtcttccaaaacatcggcggcaacgccatcaagtatggcagagccggcggctatgtacatgttacgtgcagcatcgtttcacaaacgaaggacaccgttcgctgccgctttatctgtgaagataacggcaacggcatgagcgaggaattccaaaagcacatgtttgaaccgttctcgcaggaaaaatccggtgcacgcactacgtatcagggtacggggctcggcctttccatcgtgaaaaaactcgtggatgccatgggcggcaccgtcaccgtggtcagcgaaaagggcgtgggcaccacattcatcacggagattccgctgaagctcgaccccgcgccgtttgatgccgaaaagccggaggaagagatcgataccaccgtgttccgcgggctgcatgtgctgcttgtggaggataacgaagtgaacatggagattgcggcgttcctgcttgaggacagcggcgccgaggtcacaaaagcatggaacggcgcagagggcctggagaaattcaaagcctcggccccgggtacgtatgatctcgtcttaatggacatcatgatgcccgtgatgaacggtttggaggcggcagagaaaatccgcgcgctcgaccgcccggattcggagaccgtgccgatcttcgccatgacggcaaacgcgttttccgacgacgccgcccgcagccgcaaagccggtatgaacgagcacctcacaaagccgctcgaccttgaaaagatcacaaaagcggtgcgcaaatattgcaagaaaaacagccgataaaagccataaaacggcggcgtgcctttaaaagcggttgcgccgccgtctttttatgggctgcagtgtgcctgctcctgccaaaaacgccaatgtgcagaaactcacaaaatgattctt

SEQ ID NO: 1809 - DNA, 4631 bp, Unknown
  gut microbiota DNA sequence
tgataaaataatagcgcgaatattgcaattctggcgttttatgcagaaaaagagaattttggacgcggctttcgcattttaagcctataaaactgctcgattatgcgaaaagcagcataaatatacgaaatacgaagctcggtttagaaagggaggacgttccatggcttatatgcgacttggcgatctgctgattgcggcaggtgccattacgcaggagcagcttgaagaagcgctgaccattcaaaagcagaagaaagaacgtctcggcgacgttctgattgaaagtaatatcatcacggaacggcagctcattgaagcactgcaaatgcagctcggcgtcgatttcatcgatttaacggcgatctccattccgttggagctcgccaaatttgtgccgcgcgccatcgcgaaaaaatacaacgtggtgccggtaaagcttgtaaaagacgagctctttgtcgccatgagcgacccgctgaacttcgttgcgcaggaagagattaaggccgcttcgcataagcgcgttgtgccgatgatctccacgcgccgcgcgaccgagcaggccatcggcacattgtacggcagcgaaggcacggcccgcgccattgaagaaatgaagcgagaggtcggcacatccacaccggatatcgtgccggtgcagatgaaccagacggacgccggcaacgcgtctgccgcgccgacgatccgctttgtaaactccgtcattgagcgcgcctttttggagcgcgcgagcgacatccaccttgagccgcaggagggcgaaatggtggtgcgcatgcgtatcgacggcattttgagaaagattttgaccgtgcccgcgaatttgcagagcaacgttatttcccgcctgaaaatcatgggtggcatgaatatttccgagcgtaagatcccgcaggacggccgtgccatggtgcaggtgcgtcaccacgagatcgacctgcgtatctcctccatgccgacgatctacggcgaaaagattgttttgcgtttgctcgataaatccgggcatacgatcacgaagcagtccattggccttgagggcacagacctgcaaaagtatgatgcgctgctgaaaaacagcagcggcgtgattttgattgtgggcccgaccggttccggtaaatccacgacgatgtgcgccatgctgcaggagcttgcaagtgaggaaacgaacctcatgacgctggaagacccggtggaatacaacattccgggggttaaccagtgccagatcaacgaaaagaccggcatgacgtttgcgacaggactgcgcgccatcttgcgacaggacccggatgtcatttccgtcggtgagattcgcgacggagagacgggcgccattgccattcgtgctgctattacgggccatttggtgctttccaccttgcatacgaacgacgccgtttccgccatcgaccgcctgatcgatatcggcgtggagccgtacctcatttccagcgcgctgcgcggcgttatttcccagcgccttgtgcgcaagatctgtccgcactgcaagaaggcgtataggccggaggcggaggagcttgccatgctcggcctgccggagaacgccaacgtgcagttctaccgcggcgagggctgtcaggagtgctaccacaccggctacaagggtcgccgtgccgtctttgaaatcttcatgctcaacgggcgcattcgccgcatggttacagaaggcgcaaagtacgatgcgcttttaagggcagcagcggagacgaactttgtcacgatgcgcgaaaattgccgtaaccttgttttgcgcggcgagattagcgcagcggaagccgcgcgcgccatcaattccacagcggattgacattctgctgaaaatctgttgaaaacttgctcataactttcggaaaggacgcagtcgccgcgtttcggcgatggttttaatatgcttgaaatcagcgaaatcatcgcgcaggcgcagcaaaaaggcgcttccgatattcatattgtcaccggcctgccggtgaaatgccgcatagacggcaaggtgcagaacctcacggagaaagtcctcacgtgggaagactgcgaatactacgcaaaatgccttgcgggcgaccttttccacgagattgaatgcatcggcgagcttgatttggcgcggacgtttccgtgcggagcgcgaaccagaattaacctgttccgccagcagggggcggtttcggcggcgatccgtattttggcggataccatcccggagatcgaggcgctgaatttgccgccggtcgtttccgagttcccggagtaccgcagcggcatcattttagtcacgggtgaaacgggttccggcaaatccacgacgttggcggcgattttaaatcgcatcaaccatacgcggcgcagccacatcatcacgctggaagacccgatcgagtacatctacgagccggatcagtgcatcatcaaccagcgcgagatcggcaaagacaccagaagctacgcagacggcctgcggtctatcctgcgtgaggacccggacgttatcctcatcggcgagatgcgcgacctcaataccattgagaccgcattgacggcggcggaaacgggccacttggtcttcgccaccctgcacacaaactccgcagcagattccgttgaccgcatggtgaacgtgttcccggaggggcagcagcgtcagattcgattgcagctttccactacgttgcgtgcggtgctttcgcagcagttgttgccgaagcgcgcgggcggccgggcggcggcgtgcgaagtcatgatggtgaacagtgccatcaaaaatttaatccgcgagggcaagaccccgcagattgacagcttcattaccatgaacgcgcaggacggcagcattacgatggataatgccctgctgaaaatggtgcgcgagggcaccgtaacgtatgaaacggcgctcggctacgccagagaccgagaagcgttttccaagggaagacgcggctaaattcaggaagaaagcgagggagcgggcttgacgacctataaatacaaagggctttccccggatggcgcaaagctttccggcgtcatcaaagcgtataacgagtttgaagcggtcgcgcagctgcgcgagacctgctccgtcattaccaaaatagaagaagtcaaagagacgcagagctggaacaaacagatcggcacgaagaaaatcaaagacaaggagcttgccatcatttgctcgcagttcgccatcattttgacttccggtctgcccattgtgcgctgtgtggagatggttgcggcacaggcgcgcaccaaagaattgcaaaaaatgctgaaaaaggtcgcggaggacgtctccggcggttacagccttgcgcaaagctttgaaaacaacgctacgggctttccgaccacgtttattgagaccgtacgcgcgggcgaacagtccggcacactggaagaatgctttgaaaaactacataaatactacgataaaaccgctaaaatgaaagcgaagatcatcagcacgctcacgtatccggcaattgtcatttgcgtcgccgtcatcgtgttcatcatcattatggtggtagccgtgccggcgtttacaagtgtgtttctggagctcgataccgagctgccgggcatcacaaaggcgcttatcgcaacgtcggattttctcacgaactactggtggtcgcttattttgattgtgctcgcgttcttcatcggcaggcttctgctgaaaaagaacgaaaaggggcgtgcgttccttgcggaaaacaagctaaagcgctcaccgctcaaaaaaatgcacagtctgaacgccgcttcgcagtttgcaagcaccatgagcaccatgctcacggcgggcttgccgattacaaaggcgttggaggtcacggcaaatgtggcagataactacatgttcgcggtgtccatccgcaaagtgcggcagggcgtggagcagggccgcagcctggtggactgcatgaacgagattccgtattttccaaagctgctcaccgaaatggtgggcgtgggcgaacgctccggcaacatggaagaaacgctcaccgtcatcggtgattacttcgataacgaggtctcggtgttcacgcagcggctgctctctatgttagagccggccatcaccgttgttttggcggtcgtcaccgtcattttgctgctggccgtttacctgccgatgtttaccatgtatggcagcatcgtttgatttatttcgctgtaccccgtcggcgatccaacccgaaccggcggaatgcataaatttcgatggtgaaccccgaaaagcacgtttttggggcgagcaaaatttcaatgaattggagaatggttcttatgatgaacaaaatgcgtaagatgaagaataagaagggctttacgctcatggaaatgctgattgttgttgcaatcatcgcgatcctcatcgctattgctatcccgacctttgcttcttctctgaataaggcaagagttgcaaccgacgaagcgaatatccgtgcaggttatgcttccgttatggctgatgttttgacaaacgagggtgaaaactccggtgaaaccggtcagccagccaaagaatatactctgaaggttgatggtagtgttgattctgg

SEQ ID NO: 1810 - DNA, 889 bp, Unknown
  gut microbiota DNA sequence
ccggtggaggttgctgtccaccacggcgatggcggcagcatcccggtcgaaggtataaattaaggcagggacttctgaaatccctgccttttgtgctgcgtgtaaacggcggtgaccgcttattacctcatattcatctgtatcctctatcggtcggacgattaacggcgaaagaataccctgcgtttgtatgctttcgatcagcgtgttcatctcgtcatcgtccttgaccttaaacgggtgtccggcaaagggacgcaatttttctaccggaattgccaccggctttttcatcgtatttttcatttcatctacctctttctttgtatcttgcacgagcttttttctccagctcgtactcttgtttaacagttcatacaggtgcggagatttctctaaaatccgctccgcacggcgcagatgctcccttacaggcttcatctgcccggatactgccttgcggtgttccttgttttgcgcctgttcctccggcgacttggggcggcgtatgcggttgctgattccgctgcgctcacgctccaaggcggacagttctgccttggattgctcaatgttcgcttgcaggtcggtgaccgtatggataccgcgctcctgcaagaagtgatagtcggtaaccagctccttcaaatccctttccgccgcccgcagatccggcgacagcagcattacatcggcaagctcggatacgatttggattaccgttatgacaagataaaacaccgcatccaccaaaacggcggcggtgtcatagctgtgctcaatggagaaacccagctttcgcagctcgtcctccagcgggaatttcttcggtttatacggcggtcggtattccaaggtgaacagccgatagcgattttcggcattctgc

SEQ ID NO: 1811 - DNA, 1086 bp, Unknown
  gut microbiota DNA sequence
agatcgtttgcaaagcccacaccctcaacggtgtgcacgagcccgatgccgaccgacgcaaggtactccgcgcctccggagagaccgcgtataatatccatcgtggggatatacgccgtcgcctcgttcacgccgttataaaacgccgactggtacagccatccggtctcggtattgcagccgggatcggattttaccttgtccgacagcagtgccagcattgcgctgttgcacacggcagcatgaccgtcgtacttcatgaccatgagcggacgctccgtccagtcgtcaagatcgcgcttttcgggcagccgatgctcggcaacggtgttcgcggtgcagccgtagcccatgagcaccttgtttttccggtgactgtcgccatagcgcctgaccgccgcctttgcttcggcaaaatctttgacatccatgagatagaatgtgttctcaaaaacgcacagcgagccgaaatgcatatgcgtgtcgccgaacgcgggcgttaccgtcgcgccgccgagatcgacccgttttgccttgccgtagcgcggagggatgctgctttcatcgccgagccacacgatgtgaccgccctttaccgccatcgcggtgtaaatgcggttttccttttcgcaggagatgaatctggcgttcgtataaagctccataacctcattcctttcacttctaaaatgggctccatgcagacatggagcattcccctttccgatgcgcgcggccgcagccgcggcggatgcttttgtccaccttaatccttccgtgcgccgatgtcaagcttgggcgctgcgcggtcattttttgccgcctgcttgcaacattcttgtttctggtatacaataacggtatcttccatgactttttctgcaaatccggacaaggagtcaaaccgatgcttcaacttgcagtgtgtgatgatgaggccgtctgcctgaggcagaccgtggatatcctgcgcgcggcgctgggggacacgccgcatcagctcaaaacgtttcaaaatgcgcccgccgtgctggctatgcttgccgaggacggctaccggccggacatcgccgtgctggacatctg

SEQ ID NO: 1812 - DNA, 492 bp, Unknown
  gut microbiota DNA sequence
atgggcttgtagctcagctgggagagcgttcggttcgcatccgagaggtcgagggttcgaatcccttcaggtccaccaaacaggtattggacgaacacctatttcttcagcggcggtttcgccgtgaaatgttcgctctgatccacaacagaaaatcgccgtcttgggagtgatcccgagacggcgattttttgctgtccacacattcgatttctgctattcctactgctacaatgattgcagaaaggaacaggaggttatacgaatggaaagatttgtcacggatgaacacactgggctgaagtatgagctggttggcgactattatctgattgccggagaagatgagccggaagaacgcgagccggtcggtatatggggacagcggcatctccgctatctcaagaggtaccaccgtggacgatatgccaatttgctgaccagcggtgaattgaatgcctatgattacttcctattaggaacactgtaaat

SEQ ID NO: 1813 - DNA, 529 bp, Unknown
  gut microbiota DNA sequence
ctatcctgcccagcgaaaaggcatttgcctacaagatgaagctggatgcactgaatcatcagggtataacttctggacaagttggccagaagtggtcgagagagaaaatggctgatgaagccatagacagcggacggcagattcagcgatacgtccgcctgacctatctgattcccgaactgctttcgatggtggacgacggcaagatcgccttcaacccggcggtggagctttcctacttagactcgtatcagcagcgggcggtgctggacgcgatggcgctgaacgactgcaccccgtcccacgcccagagcatccgcctgaaaaagctggcgcaggagggcttactggatgaccagacgatctacgccgtgctggcggagacgaagcccaaccagcaggagcagctgaaattcaagcgggaggagctgcggaaatactttccttccggctacaccgaggagcagatgcgccgggacatcatcaaggggctggaattgctgaagcggcagagagaacggaaccggga

SEQ ID NO: 1814 - DNA, 994 bp, Unknown
  gut microbiota DNA sequence
ggcgaatctccgtaaaacccatttatatgaggtcgtgcaatggcttccactcccatgaatccccacacccgccgtccggctgagttggtgatgttgttgcaatgctccagattgaatttcttggcattggcaatcatggcgtcgctgaagctgcggactttcagcggagcaagagaattttcctcgcaccacatccgatagatttcatagaaatccttggagctgatggacgcatccgctttacgccggatgtatccctcggaatccatgaaatcaaagatattgttgttgtcacgtttgaccgcttcccggttttcccggatacggtcactctccgtaaacttaaagttgttggcaacaagccgctgcaagccttcaaatgcccacaggaagataccctcggattcggctttcatcttctccgcaaggtcgggatcgtcagctctgtccactggcttttccttggtggtcagcacaagctgtctgcggtaaaaaccatcgctgcgatcataaagagcttgcaaatcgccgttgctgaacgcaagcagccgggcgaacatccagccctgataactctgcttgcctttgcgttccaaatccatcttgccctgtgctgtcacgatggattttacatagttggtctggcgcagagcttccatccgcatatcatcatcaacgcacagcaggatgtgttccagatcagcacgggcgaagcggttttcagaaatcttgccgatgctgccgtctttcatattcgtgccaaagatagccgaaagcacagctccgatttgggatttgccctcgccgccattgcccttaatcaccatcatacgctgtcccttgttggagggaatcaggcagtagccgatgaactcctgcaaggtgggaatgtcctccgcatggagcagtccgtccagaaagttcagccagatcaccggcgcagtagcatcgggattgtaggcaaccggcagacggcttcgcacgatagtcggcc

SEQ ID NO: 1815 - DNA, 330 bp, Unknown
  gut microbiota DNA sequence
atttgcatcgggtacatcacattttcgagtatgtttaatgtcgggaataagttgaaagactggtagatcaccgtcacgttctcgcgtcggtgccgctcgctgccgatttctttcagcgtctttccgttcgcgatgatctcgccctcgctcggcgtgccgaggccagccagcatggaaagcagcgtcgttttgccgctgccggactgcccgatgatcgcgtagaatttccccgcttcaaacgtgcaggaaacgtttttcagcgcctgcaccttctggtatttgctctggtaggtatagctcacattttccgctgccaatacgttcatacat

SEQ ID NO: 1816 - DNA, 662 bp, Unknown
  gut microbiota DNA sequence
gcacgatgaacacactgtatatgatcaacggcaagccgcagcagggcaagatgttcaccgaaaaattcggaacataccaatgtacccttgctgtccgtgaggcttttatgcagaaaacacagcgggagatcaacgatgccatcatcgacgaggtgctgatcaccggcacggcaattattgcgcctgccgacctgaaaatcatcaagggcgtcgccgccgagtatgtgcgggacatcttccgcaggctacgcgagcacggctacgatgagaatacgatgaccttgtatgtgaccggcggaggcggctgccttgtaaagaacttctataagttcagcaccgaccgggtgaaattcgttgaggacatctgcgccgctgcaaaggggtatgaatatctggcggaaacgcagatgaaggctgaggcgaaggaatgagcaaatatcggatcaatgtgcggtttgatttggacaagccaaaagaggcgaaagccgcacagtatttacaggcgctggataaatcccgcaacgcttttatggtaacggcggtcttaaacgaaatgcagcgccagtcatccgtaaacggttttttgctggaggacattcggcaggtcatacgggaggaattgcaggaggtgtcgtttgctgcggcacctcctgtttttgagc

SEQ ID NO: 1817 - DNA, 600 bp, Unknown
  gut microbiota DNA sequence
atgccggttttatggaccggctttatttgcgtttggttccctgtgtaatgcggcggaacagacttgggggagaatcggtcgcgcgctgcggcggcagcttacaatagaggaaaaaaggagaatgccgcatgaatatgttcacaaaacttttggagacgctcggaaataatttctggcttatcatttgaccgcagaattccgcatgcagaacggcgagtggatcactgtgcacgttatgcaaagcagcacaaaagaatacgaccttttcgcttttcacaaaacgactgaaatgcagcgccgcatacagggctatgaagagcgtctgatgcaggcggaagaagccaaccagtcgaaaactatgttcctttcccgcatgtcgcatgagattcgcacgccgatgaacggcatcatcggcatgcttacgctggcagagagcaagcttgaaaaagataaccctgcgatgcagtatcttgagaaagtcgacgagctttccgaccacctgctttcgctcatcaacgatattttggatatgtcccgtattgaagcgggccgcgtgcagcttgaaagcaagccgttaaaaagctgcttgccgcgcaggag

SEQ ID NO: 1818 - DNA, 486 bp, Unknown
  gut microbiota DNA sequence
gcagttcgtgcacatcgcgggcacgaacggcaagggcagcacggcggcgatgctcgcggccgttttgcaggcggcgggctatacgacggggctgttcacgtccccgtttctcgagcaattcgccgagcgcatgcaggtcaacggccagccgatcccggacgcggagcttgctgccgcgtgcgagacgctgcagccgtgcattgcggccatggacgaccagccgacggagtttgaactcgtgacggcggcggccatgctctggtttcagcgccgcggctgcgacatcgtggtgctcgaggtcgggctcggcggccgtctggacgcgacgaatgtcatcggcgcgccagcgtgcgccgtcatcacgaacatcgggctggaccacacggagatccttggcgacacgcttgcgcagatcgcgcgcgagaaggcgggcatcctcaagcccggcacgtgcgccgtcagctatccgcagacggcggaggtgcg

SEQ ID NO: 1819 - DNA, 780 bp, Unknown
  gut microbiota DNA sequence
aaagaagtgggcgacctgagcagtgatatgctgttcgccgactatctgctggaatggctggagatcgccaagggaaggctggcccacgcaacctacggtgcctatcaaggactgctgaaaagcaccatcgtcccttattttcgcaagaagaaattgacactgcgggaactggaagcccgacatttgcagatgttttattctgaaatgctcaggcgggtcacgcccaataccgttatccattatcacgccgtcattcactcggcactgaaatatgcagtcaagaccgatatgctgatccagaatgtggcggacaaggtggaccggcccagaaagaacagctttcagccggtctttctctcggcggacgagatgcagaagatgtttgaagcccttcggggaaccaagctggagctgccggtgttggtggctgccttttacggacttcgccgtggcgaggtggtgggcttgaaatgggatgccatcgactttgagcagggcaccatttccgtaaagcgcaccgtgacctcaacgatcatcgacggcaagtatcaggagttcgagcagcaatccgccaagaccaagtccagtctgcgcaccctgccgctcatcggcagcttccgggaatactttatgcaggtgaaagaggcacaggagctgaacaagcaggtctgcggcaactgctacaactatgaatacgatggctttgtattcgtggatgagttgggcgagcggatgcgggtggaatacctgaccaacgcatttccgaaatttctggagagt

SEQ ID NO: 1820 - DNA, 483 bp, Unknown
  gut microbiota DNA sequence
cttatattcaggaaaatatatattgaaccaacgactaatcctgttttgaattcttgtaagttccgcctgtaactggaatcttatgtttgaagctgttctaagatcagcgtaaacaccatccggcaggtatgggatcatgtaacgtccctctctaaccaatcctgctataactttcggatccttacggtcatttttagttggattattgtcgtcgagttcttttgattttttcacatggtgaggatttacaagaactggtttcatttcattatcctgtagaaaccttccaagattgaaccagtagtgccctgtcggttccatacctggaaccaccttatccttctcatgtctttctttgaggtccaggatccattccttaaatgtcgcaaatccagcctctgtattgctaaacttaaatggcttcttcgaatactcgattcctctgtaatcaaaagctctggcatagtgcatttcacttccgac

SEQ ID NO: 1821 - DNA, 335 bp, Unknown
  gut microbiota DNA sequence
tgtttcctataatgggagaaaacaggggtaaatgctgcgtacatacgtacagagcatgactggcaaaatcaatcccgccattcctccggtacgtacgtacatgacgaaacatcgtaaaacccatttatatgaggccttgccacagcttccacacccataaatccccacacccgccgtccggcagagttggtgatgttgttgcaatgttccagattgaatctcccggcattggcaatcatggcgtcgctgaagctgcgggctttcagcggtgcaagggaattttcttcgcaccacatccggtagatttcatagaaatccttggagctgatggacgc

SEQ ID NO: 1822 - DNA, 431 bp, Unknown
  gut microbiota DNA sequence
ccatgctgccggcatccttgttttagggcagctctttctgtataatgaaatcaaaaaggacggaaaacgactatgaaattcattttgaagctgctgcttgcgccccttatgctggttttgtggatcgtggaatgggcgctcacgctggcgctcaaggcttccgccgtggtctgtgtcatcgcctccgccctgtttctgctttcaggtgttttttactttgtggacggcaacgtgcagaacggctgcatctgtctgggcattgcgtttctgctctccccctacggactgcactatttggcggtgaagctcacagcgcggtttatcggcatgagaatgctgctcagggagcgaatctacggataaacggaatatgcggaatgtgaaaaggcgcaggctctctcctgcgtctttttccatggagggaatatggc

SEQ ID NO: 1823 - DNA, 319 bp, Unknown
  gut microbiota DNA sequence
accaacgagtttggacactactttgagcagaaaaccttcaaggattactacgaccgcctgttgaaggatgccgacatcgggcactttaccttccacgccctgcggcatacctttgccacccgtgcgctggaacgaggcatggactacaagaccctgtcagccatcctcggtcactactcggtggcgttcacgatggacacctacgttcacagcatggacgaacataagcggcacgaaatggacaagatggatgatatgttcgggatgcagtacagtatctctgtagagaaccggccctaccctgtgctttgcacactat

SEQ ID NO: 1824 - DNA, 259 bp, Unknown
  gut microbiota DNA sequence
aagacaagttggaagtgaaatccatgggctcaacccatgaactgctttcaaaactgtttttcttgagtagtgcagaggtaggcggaattcccggtgtagcggtggaatgcgtagatatcgggaggaacaccagtggcgaaggcggcctactgggcaccaactgacgctgaggctcgaaagtgtgggtagcaaacaggattagataccctggtagtccacaccgtaaacgatgattactaggtgttggaggattgacccc

SEQ ID NO: 1825 - DNA, 414 bp, Unknown
  gut microbiota DNA sequence
ctccgactattcgggggtgcgtggttttgagggtttacgaaaggggacatttcaaaactctaccgctttcgcggctgcgaaagggggtgagaacatgaacgagcctattcgtacccaatggcaaatccgttgcgcttttaacggcttttgcaaacaggcgttgaagcgggaagctatgaacgccagcagggacattaagcggcagcaattacgcgaggttactttttccgacctgtcgccacaggaagaaaatcagctttttgtctacgaccagtattttgtagatgatgaagcggaacagtcttttgttgttggtggcaaggaaattactgcgaagctgcttgccgaagctctgcacagtttgccggaagaaaagcgcgaagctgtcctgttgtattacttttttgatatgag

SEQ ID NO: 1826 - DNA, 513 bp, Unknown
  gut microbiota DNA sequence
actacggttgaccagacagcatcaaattccattgaagatgcaatggcaccaggcgcagaaaaactgatgtgcagtacccgacaggaaatgatggaggctgtccgtaagggaaaagccgatgctgccttcgtctactattacatggcacaggcgtttgtgaatagtgacaccacaggcaccctgacatatactttgctggaacagcctacatacacctaccgcatggtaatatcatcaacagagaatcatgcactggctggcatcctgacgaaagcaatgtatgccatgccccaaaatcttgtcgaagatatagcagcacggtataccacatacaaagcagcagatctgacatttgttgactggatccgtctgcatcctgttgttactgtttgggttcttcttattttcggatggctgctgactactatggctgtgatagcaatgcgtctcagtgcaagaaaaaaagctcagaaggcagcccaggagacggctgaggaaatggcggaactggca

SEQ ID NO: 1827 - DNA, 703 bp, Unknown
  gut microbiota DNA sequence
ttgcaatgctccagattgaatctcccggcattggcaatcatggcatcgctgaagctacgggctttcagcggtgcaagggagttttcctcacaccacatccggtagatttcatagaaatccttagagctgatggaagcatccgctttcaatcggatgtatccctccgactccatgaaatcaaagatattgttgttgtcacgcttgaccgcttcccggttttcccggatacggtcactctccgtaaacttaaagttgttggcaacaagccgctgtaagccttcaaatgcccacaggaagataccctcggcttcagctttcatcttctctgcaaggtcaggatcatcggctctgtccatgggcttttctttggtggtcagcacaagctgtctgcggtaaaaaccatcgctgcgatcatatagggcttgcagatcaccattgctgaatgccagcaaccgggcaaacatccagccctgataactctgcttgcccttgcgttccaagtccattttgccctgtgcagtcacgatggattttacatagttggtctgacgcagagcttccatccgcatatcatcatccacgcacagcaggatgtgttccagatcggcacgggcaaaacggttttcagaaatcttcccgatgctgccgtctttcatattcgtgccgaagatggtggacagcaccgcaccgatttgagatttac

SEQ ID NO: 1828 - DNA, 8084 bp, Unknown
  gut microbiota DNA sequence
tttcgatttgtattcattcttgcaacgtgattttctaattttgcttttggatgttccaaagctcaaccttttttcgtctactgcaaggcatgaataatccgctcccgctctccgctgccgttggtcgcaagtcgcaaaaatggaatattgtattttgtcaagatggcgtctttcaatgcatcacggcgaagctgctccggcctgttttcgtggaaagagaagccatccacctctaccaccagtttacaagttttgtcctgcttataaaatacgacaaagtccagtgaagcacgattattgatataggtgatttcttcatcgctgaggttttccaaagagttcaataggttacgcagcagcatgccctgtacgtaactaaaacggttatactccggctgtgcaagaatttcctccagcaatacgcgtagcgcttcttccgactgaaaacgtgcttttgggttcatttttactttcagaggaagaagctttcgggaatactgcttgtacagcagatcaaagacggataccacctgactttcaataatgttttcgtcaagcgtgctatattgcatataccgaatcaagtcgccaatgttctttccttttttgaaaaacaaatagtgatctgtgacgagcacaaattgccttactgcccgggacactgccacatttaccatgtggggatcgtctacaaattccaaaccgcgctgtcccatcccggaattgtccagtacagtagataatatcatcaagtctttttcgcgtccctgatatttatgtactgtgtcgctttcgattcctttcggcaattgacggccggctgtatcagcttgcttccgataaggcgttacaaaacctattttgctgctgtctgctgcaaggtccgggttgttcaggacttcttccacaattacatccaactcgcgctgattatatgttcctttctctttccctcgtgtaactttgcgcatatggttgccctccaccgtcttatacagcaccaatggcatttgcgataaagttggactggtgtaaggaatcaaatcgccgttataatatttttgattgcaaaactcaatgatttgaggatgacagcgataatgctcgcggagaactacacggggcaaggtttttccatacaaactgattatggaggataagatgctatgctcaaaatagtcgtatacaggggcaggcggagcactttttaatgtctcttttatttttggattggttatctgcggaagctgttttatatcgccaacaacaatagcgtttcgacaacaggaaaaagccagcacaccggttattaagtctacctgtgatgcttcatctatgataacatagtcaagtaaatagtcctttggaatagaatggcgtatagcatgggtcgtgctgagaataataggatacgctctgatgaactcctgaaatctagatttaaaattcttcttggtaaaaccgccagccgatagtttgctgtggctttggtacaggcacttgcgaaacagcttttcagaatagttttgatgttcttccagaagcttgtcaaaagacgcatgttccagcttgctttccgtctcagcaatctcatccttaattttttggatttgcttttgataaaacgcccgttcaagctgcagtaacacagaagcctcatgacgctttagacttcgaaaagaaccacggtatttgatgagcattttcactttatatatcaacttttctgagtattcctgttccttggccaaagaggtttctgctaaaaatgaaatgattctatcggaatttgctcttaatagagggagtttttcgacttcagcgacattctggcgaatatagtattcgttgaaatgctcctgctccaattgccaggcttgcagttgctgcttcaactgtgctctttttctatctatctccagcagcgtggccagacgcacattgaggttttcaatgatctgaatgagttcatcttcgttttcatcgcaattccaatccgccacttcggctacaggtgaattggcaaaaaaagcatcctgattggctttgtttccaagcaaggctgtgagaaagccatatccatcttttgtcattttttcaataacattcttaacagcctcgttgttattggaaaccaccgctacgcttttcccttgaatggcgacaagatttgcaaggatgtttaaaatggtctgtgtttttccagtacccggcggcccttcgatcaccgacaaagagtgtgtaagggcattttccagagctgctttttggctaagattaaaacggaacgggaaaatgataccgtttacaggcagtgtaagatcttcaattggctggccgttcaaatatcgtcccaaaacactttctgggtggataaaagtcagctgttgcatttcttgttctaaaaatacctcttgagtcggatcggcagccgtatactttgaaatttcgcgtaaataggacaaggtttgtctggcactctcactagagcagctatctttcaaaaatgatagttcccgaaacagtacggttttggaactgccattcttatatattattcgtctgcggcattccagattgcggttctggaatttaaattcagagcttagttttttaaagttaagaatgagtcgaggttcataaacgggcattccgtttacataagcgacccttccgtccagatcttcactttcggggtctaccaaaactgtcacgttgctcgcattatatgaataagaagagccgccgttatattccacaattattatttggggagaaggaccacaggaaatggacgtaataaactttgttttatcctcgcctttaataagaaccatcgttttttctatgtccatatgccaattccttttccgagttacctgataactgtttggacgaacttttcttccagtttaccattgttttgaacatttttcaatctttctcggcgcctaaggcaaaaagaaatatccgcaaattggaaaaacgattagactgctaattattccatctcatacgctttctgcaactatattctccacagcaagaaaagcgatacgcttcagcaaggcgacgaaaggcgttgaaagcgcagatccacaagttgtgacgacaacggacaaatttatggtacgaataagaccattgttaccctccaaaatcaaaggggaaaagccggaaaaatatatggttctcagcttgtgaaagaattgtatgtcagcagtgtctgcactacggcaaaggaggaataaaaaagcagagaaagagcagagcagaaatttctcgcggcaacagtttcaagcggagctccattgcaatatgagacgcagagcaagcagaattggaatactggataaaagaaaaggaattctcaatcatgtgagaatttcgggttccgattggagtaattttacactgcgatttttcggttttcattttgggtgtcccatttctataaaagagggaaccctgaacaggtggtttagatcctaggttttcggcatagaaaacagattgaaatttggaactcaaaaatgagacattcaaatttcgatttatattcaaatttgtacctatgttcaggaaatttaattgcgtacaatggacagcgatgctaaaatataattgaattttacaaaacgatggctatgaccattttgtttgtgggggacaacaatgtcgaagctaacagatatcaaaaatcgaattgatcagatggatggcggggcttttcaaaatctttgtgatgcctacttgagctataaagggtataaaaatatttattcgttggggatgcatacaggaacagataaaacagcaaaaggaaacccagatacttattttttgacagcagaaaataagtatgtatttgtgatgtataccacacaaaaaacagatttcttaaagaaagcaattgaagatattgacaaatgctttgattcagaaaagactggtatttcttcagaagatatagcggagattatatactgccatacatatggccgtttaggaccaggtgatgatcaataccttagacaatactgtgaagagcacggtgtcgtactgaccttaattggcttggataaattggggaatgacattttccacgagtgcccaatcttagcccaagatttctttggaattagtattgactcaggtcaaattctgccggtggatatgtttgtggcaagacatgatgccaacaaaatctcggctccgttaggaacagaatttctttttcgagaaaaagagttgaaaaagcaaagtctactttgcgtgatagtgatgttttgctgattgcagggcctgccggggttgggaaaaccagatttgcactggaattatgccggcagttggcagaagaaaaggactacactgtacttgtcataaaaaacaataacttgcaactatatgaggatctggtctttgcaattgaagaaggaaaagaatacctggtgcttgtagatgatgcaaatgagctttctggactgcactatgtgttggattaccttccaagagcagctgtcaagtcgccatacatttcaaaattgatcctgaccgtacgcgactatgcccgtaagcaagtgatgcaaagtgttatggatgttattaaaccggaaataattaagattactccgtttaaagatgacgatatccgaaaacttatgaaaacatgctacggaatcacagatcgggtatatacagatcgcattgttgcaattgcggaaggaaatgctcggttagctatgcttgccggaaaacttgtagtagattccgaaagcattgctgcaattcaggatgcctcagagctctatcataactattatagcaaacagctgaggatctttattgaaagtgagacaagtgtaagctctgccggaattattgcatttgttcaggcaatccatttagagcatctcgaaaagtttactcccatttttgaagcagtgagaataaccagcagtgattttacatcagatttgaaactgctccataaagcagaaattgtagacttgtgtaatgacaaagcggcaagaatttcggatcaaagtttcagtaacttcttgattaagtacgtttttatcgaggaaaagattattcccctcagcacgatgattgaaacttgttttcagatcaacaaaaggagaactattgaggcatgcaatattctcttaaatgtgttctctgatcaaaatgtgagagaatatgttgaagcccagattaaccttgtgtgggataagctggaaagtgatgtggaggcgtttctcccgttttttaaagcattccatatggtgcgaccgacacaaactcttttgttgctgcaggagtatattgagcaagaatcatatcatccttttgatgcgcagacattgccgtttaaagatgatggaccggataagaatatttcggatgatattctccaaattctagggaattttggagaccatcctgagttgccaactgcactggatctgctattgctgtattatcaaaaacgcccggatttgtttgaacaattctatagcacatatgctggacggtttgaagttaacttggattccccgcgtttcggatattttacgcagaggatgatggtcaaaagcctctgcgaagcggtggaaacagccccagaggatacgaatcttttaatcttattcatttgtgttgcagcccattttctgaaaattgatgtttcaaaggcagagggcggtcggcaccatacaatgtcgatttacacattatcgcttccgccagataagcctgttttagaataccgaaagatgctttgggcacaactttatacaatctaccaacaggagaatatacagactgaaattgagcgtattctctataggtacggtatacctcattatgacgtcgatacagagctaaatgtggtgggagctgagcttgaggaaattctaaaattcttctctttattccggccggagaatttgttccactgcataattgcggcacacattaaacaagttgcaaagcatattgattattgtactcgggatatactggttccgtttcttaactcaaaaaactatagaatatattctgcgctctcgtcctatcgccatgaagactattcagaaggatatgagaaaggtgtgcggcgacataaggacagggtttgcaaacttgtggagaaatacacgcctgtagatatagattgtttgatacaggtatgtttggaaagcaaccagacttttgataaggaagagaggaaattgggctcaggacttgaatatgtgtttgaagcgcttccaagtcagcaacaactatacctgtatttggtagatgcttacatgagagcggatactccgtatagaataaatgctgaacaaatcttagacaggctatttgagctgatgtcagcgacagaagtcaaaaaattcattacaaaatataagtatggtcagcaaaatgtgtggttgtggtacttttatgctttgataccggaacaacaacgatctgctgaatgggcaaccgatctgctgaactatttggaagaacctgatgtaggcttagaaaaatctccgtaccgcaagctggatctactacgtaagtatgaaaggatcgaacctaaaattatatgtaaggcgttgcgcattgtttcaaaccattatgaagaatctccttttgtttttagtctatatgttttttggatgctcaatcatagcaaccagcaaggtgcatataagatattacatgagttttcaaatgaacttgctctgttggaagaagtatatttgaaaggagtttcttattccaatcacgaagattatgatgggactttgctgtgtgtgattatttccgtcgatatcgctttcttgtacagatatcttgattgcataatttctgttcagcgggatcgcgtcagactttatgacaattatgctgctatacgccttttaaggatatgggatacagaacaattcatagatttggctgatgatgtgtttgattatgttcatgagaatagagaaaggtcgatacattggctatatcgatcccaaatacacatgatgttgtccaatgaaacagatcatcaggaaattattgcaaagcaagatatctggatcaatcatacgatagagcgttattgtgatgatggggaacgaatgtatgaactattttcagcaatcgaggaattttcttgtgagcggcggaaaaaggcagtggagaaattcttgtctctaaatactgatccagatgtttttgaacaactacccttagagccgtcccactggggcggaagcggcagcatgattccgtatatgcaggaacgaattaattatttgagctctcttcttcctcttgtatctggcatgaagtatttgaaacaaaagcaacgcattgagcgggagatagaaggctggaaagagggagtccgttctgaagagattcgtgaattgttggaattataatcttcacaaacatttcaattcctcatgcttacaaagtaagttgaattcaaagttggaccatttctaaactaagaaaatatgcacaaaatgacaccgttagtttccaaactgccggtgtcgttttgtgcctgcttcttagtgtatggcaagttggtcgcaaatctctgcatttcccgtgttgctatgtcacaaaaaccacatgaggaggtaaccccatgaaattcaccaaagaaaagaagatagcattcgtgaaacgctgccatttcaatttgcaataagaatcaaattctccgcaattccttctgctgtgggacacatgactatcgacaaacggttacccaaatacaggcaatgtcgccaccacgcaagaattcctgcgcatgaaaagagaaatcagcaaacctgaggatatgatttaggttttaaagacggtcagttgtactcttgctttgcaggataaactcaagactatagagctgctttaggcaattcaacgtgcatattggtcctatgtcaagatttagtacaagttaaaatgagaaacttctcccaaattcaacctgcccgcagctccgccttagtgtgtgctcttttatatactcgctcgaattcatctggtgacataaagtcgcaatgactgtgaat

SEQ ID NO: 1829 - DNA, 261 bp, Unknown
  gut microbiota DNA sequence
gcgattgagccattcacgcttgacaatagaatgaaaggattccatgcacgcattatcccacggaaaagctttcttcgaataactgcgctgcatgttttcggttgcttttttatattcctttgcaacatactggctcccacgatctgagtgaatgattaatggctgatcgatatttcggcgggttttagctttgtttataattaccagaaccacgaacaggaatatcacctgattcacggaagtctttcagccactttgtta

SEQ ID NO: 1830 - DNA, 488 bp, Unknown
  gut microbiota DNA sequence
acgattgagccattcacgcttgggaatagaatgaaaggattccatgcacgcattatcccacggaaatgctttcttcgagtagctacgctgcatgttttcggttgcttttttatattcctttgcaacatactggctcccacgatctgagtgaatgattaatggttgatcgatatttcggcgagttttagctttgtttataattaccagaaccacgaacaggaatatcacctgattcacggaagtctttcagccactttgttaatgtgctgtatccgatgccaagattttctgcacatccacgtactccgagatctttgtgatcctgatagtactggaccgcatcaagtttaaattgtttgtcgtgttgctttgccatatgagatcctccttcagcttgtctctatgtaccatgcttattgtgtatttggaatttctcattttggcttgtattatttatattctagtaccattatccgcgcggccgcgtt

SEQ ID NO: 1831 - DNA, 333 bp, Unknown
  gut microbiota DNA sequence
tcaatctcctgcccggcatagacaagctctgcggtatgggcgtccttgttaatgaccatgccgtcgggggctttcatctcagtgatttcgtattttcccagatacagcggcttgctctccgccatgccatctgcgccggtggtcaccgtatccaccacctcgccggcactacagcgcagcgcaccatccggggtgtagatgtcctccgctgccttgatctcataggttgctcctgcaagaccctgcaccgtatagaccggctgatagaccccgtccgccgccgcaacagaggcaaacacctcgccggttttggaaatcttgatgatgcccttc

SEQ ID NO: 1832 - DNA, 592 bp, Unknown
  gut microbiota DNA sequence
agacctgcagccgaagcgaaagcgagtcttaacagggcgttcagtcggaaggagtagacgcgaaaccaagtgatctacccttgggcaggttgaaggatgggtaacaccatctggaggaccgaaccaataagcgttgaaaagcttctggatgacctgagggtgggggtgaaaggctaatcaaacttggagatagctcgtactccccgaaatgcatttaggtgcagccttgacttatactggcatgaggtagagcgactgataagatgcgagggcttcaccgcctatcaagtcttgacaaactccgaatgcgtgtcagttctatgtcaggagtgagggcatgggtgctaaggtccatgtcctaaaggagaacaatccggaccaacagctaaggtcccgaaatgaatactaagttgaactaacgaagtcagattgctaagacagctaggatgttggcttggaagcagccattcatttaaagagtgcgtaacagctcactagtcgaggagtttggcgtggataataatcgggcataagtattctaccgaagctttgggatgagaaatcatcggtaggggagcattccactcggcgt

SEQ ID NO: 1833 - DNA, 539 bp, Unknown
  gut microbiota DNA sequence
ccagaccgcatttctgcttgacctgcgagatatacagggaagacaccttcagtccagtttgttccaacacgcgggctttgatttcaggataagtcgcacccttttgcaatcctgaagtgtctatgccctccaaggagaactctacacggacttttttggagtcgatctcacccttggaaaatgcaatgacacattccacatgtgtcgtcgctagaatcggaacacatggattcagcctcgttagaagcatgggaacacaaaacagcaggggagtggttctccttgctattcttgcgaagcggcttgaaattcttgccgtccacactgtttttgaacccggtcttgtaaacaaagacaatcatgtaggggtctttgttcccattactatcataaccgcccacgattactttttcaactatactttcaaaaatatgtcggtcaaaggtgtccagaacctcgttctgttcaagggtctgccgaaacgtggcaacacgcttgcgcattgtagattcggtttcggctgcatcttgcaggctttc

SEQ ID NO: 1834 - DNA, 20742 bp, Unknown
  gut microbiota DNA sequence
catttatttttacctactatgcattgaatttttgaaaaaagtaggtaatgatatttttatcatatgtgtttacgggattttttgtataatgcctgctgataactttgattacgacgatattaaagccgtaattcatgattaacaaaagagccgctaagaaacaggggagtttcttagcggctctttctcataccagggggggtcctgataattttgacaatggattgcgcgactttttattatggggaggattggttgaatgcagctgtccactcacagctatcacaggggttgtcaaccaatcgtcgcgttgttgtctgcatcagcaggcaatcgttccatgcccaaaccagacgaggtgcgttcgtcatgatttatgtttgcattatatcacactgacttcagaatgccatagttaggtctcaaaatcgtcaataaatacccatatcgagttggattattaatgtttttaatcccgtttcaatcgtttgccaccaattcccaacatggcagctaatgcagaaagtcctaaaccgagcagagccgaattcttattaccggtctgtggcagctgctgattagtggtggcttggttagctggccggtttgaggtgctggcttcggatgtttgatcaatagcaacggttgggttagttgaattgtccgcaataaccaatggggatggcgtatcggcgactgaactgctggaatcaggcacgcttggcttgtcagcggccgaaccgtttgaatcagccggagtatcgccagggagagcagcactttgcgaaccagaatcgctcggggtattggagccaggatcagcaggcgtatcagatgccttcaccgcggtctttagatgtacggtgtaggtagtcggctgcttattaaaggtcagtaagccgtccgtcggcagatcgcttccgaccagttcatagttttctggaatgctgatcgtgtaggactgcgtagtacccatatcaccagttaaggtttggctggcaacttgagtctcgttttgatcatcagcaacataattgattgtaatttgagtcttaactgcttcaaccgtgacgatggtcgtgaccggctcactgattgcaccatcgctgtcggtaacggtataggtaatggagtaggtgccaggcgtattgacgtctaccgtgccggctacgttggcagcagtcagcgtaatcgtaccatcatcagcatcggttgccataacgtctgccaacgggtcaaacgtgcccccttgtttgatagtgactgtagctggagcggtgatgatcggttgggaattggtaccggccagccgcagatgcagattcttggtaacctcatagacgaatttgcgcgaattgctgcctttaagactttccggcgcgaccagctgcatgccgtcatgagtgtcaaacgttaagatatcgccggcattaagcttgattgcagtcgtaccggcagtttcagcaacgttgccatagaagatcttttggtaggtttgattgccattggcgtcagtcacggtcaccgtaacgtaggtattagcgccatagttggtatttggctggcgattggtaaaggttgccaaaagcgtgccatcgttattcaaatagcgataggaggcaaatgagccgccgtagccgttaaactcccattgaccgatcaggccgtccgcgcgctccaaaagctgctcgttggcgtttttgatcgtctcgttttgcagatcgtcaagcatgctgcgcgcattgttgatcagctcaaccgtggcagtatcggccagcttttggtaggtatcatcggtaaacagactggcaatgcttggcagaatctggctggatgatgcaacggtttcattgaccgtcgcatcttctttaacgtagaggtactgatcagtcagcttgacgtttggattgtcagtagtcagtgtatagattccgttggccagcgttcccagatcaaccgtatttgaagtgactggaatcgtcgcgatcgtctgcgtaccgttcatcagcttgacggaagagccaatcagcttgtcggcattgctcagatttaagataatgtggctggtcaggccggtttgtgcgagctgctcattggtaatcagggcgatcttagactttagaaaatcctgatcccagcccagcttttgcatgaccgtcgtcaattgatcgtccggtacgacttgagtaagcatggctacggcggggtagttcaatgaattgagcgccgttacgtcatcaacgcttacgcccatcgttgcaaagaaaggcgtcacgttaagctgatagtgctgagcatagacgctgatccagtccttgccgatctggttaaccgtctttccggcaacggcattggcgcgatgatcaatgttgaagtacttgaacgcgtccgtgccttctaggttgtaggctagattcatccacagtacgagtcgttctcgatagccaagatccgcccagctttgctttttggtcaggactgaatccaccacgctttgcacgatgctgtctttggaagtcccgaagatccagctgccagtagtgaagttgctgttgaattgactttgataaagcgtaccgtaaatgttgttgaatgagtcgatgatgtacatatcactagctgggacttcatagccgtggccgatttcatgcagcggcagccagttgatcgtcagataagaagcaattgaactgctgttggcggccgtgtagttgaccgaccagtaggcagcaccgattccatcttgatcggcaaaggcaaaatagcgtcccttgactggctgatcacgaacggtattggttgggatgccggtcagttcatcataaagcttgaagacctgattgtcgtactgatcaatcagactgttcatatcggtatttttaaccgttttgatatcttgataaggaatcagaatctcaatgttgttggcatccatcaaggcaaaagcggctttgctctggtcccattgctttaagacggcagcctggtcactgtcagcagtaaagacgggcagttccttggccgttccggaaaccggctcatattccaacagcggtccggtcgtctgcgcgttttcaggtgtacgcaggaaaaccgcggcatcgccattggccgtaatctcgacccagtcggtacctatcgattgcgtcacgatctttttagaagaatcgccaatcagctgaattgaaacgctgcccgagtagccgttgttaatgcgccggatcttgagcgtagcgccatccgacagtaccatgcctaatgactgccgatcatggtaggttcccatatagcggccttccttgttggtctgcgtaatgctggcatcaggcgacaatacgaagccttggtaggtcatggtctggccaacgttaatgctgttggtggtgttggcaagcagtgctttagcttgatccaggcgtgtctgcagcagtgctctttgttcggtcgtcaaatcagcctgctggttatcaagctgattctgcagggtcgcaacatcgctggccgatgcgccaaaagccagcgcgccattatcaatcagctgtttggttttgacatccagataggcatagtcgctgatgttttttaacgaaagattattagccacgacgaaaacgaagcggctcaaatcacccaaagctgaggtcttcatcgtggcatcgttattggtagtgtagcgcgtcttggcttcggcatgctcaatgcttaagatatcgccggcctgaagctgcagtgtctgcttgaatcgatagttctgatcgccgataaaggtttgatcaaaaagcgtttctgagccgcgactgaccgtaatgcgagcatattgagagtttggaaagtagctgtgcggctgaccgctggcattgattgataattgaccagccggctgggcagtctgattggaattgtagtaatcgacctgagcaaaagtgtagttgccaagcccctttaacgtccagctggcatcggactgggttacgttgccggtatccggtgtcgtgacctcagtcaagacgtcggctgaagaactggcgcgctgctcgccggctgctgacgaggcggagtcgctgaggctagcggtatcatcggcgatcgcgctgcttgcgatgtccgtttgtgcagtgctgtttaagacaacggtattgctgacggttgtgctcacggcggtagctgccgtattttcagcagtatcagccttgatttcatgatcgttgaaaatcagactggtggttgccgttaaaagtgcaaaactggacagcattaagtattttggcaatcttggtgtctgcattgaatttttccccttaatattattagaatactgaattttgaatgaggcactgagcattaggaaaccctaatgaattcagcattgattatacattacaaaaggagccgattcccaacgaaatggccaaaaccaagaagttgcattagaaggttattaaacgaacacttagttggctaatgatcatttgccgccagtctgctgatagttgatacaaaaaaacagcagtgccgcttcagacactgctgttttgattactccggcagtcagactcgaactgacgacaacctgattaacagtcaggtgctctaccaactgagctatgccggaatgacttaacaaataagtacttaattatattaacacataatttagaaaatgccagtaaaaatcagaaaaaagtcaaaaatttttttaaaggctaattaaatccgactaaccagcgctgttaacattgcttgacagtgcagcaaccgcaaacgtttcaactgacaggcacgcaccaatgtcaaggatgttaagcagaccgcatgactaatgcaggcagctatcatgctagataccaggataaaaaccggatcatagagctgtaggtcggtgtcagcatcaaaagtaatcattcttcacaagctttgtcaacttgaattattagtaaaaaatcaacaatgtcaatcgattatcaacattttgtatcgtttgaaacgctttcaaaaattcacaagtaggtttataataaaaatacattttgaactatcaaaagaaggcgaggttgttaattatgtcaattaaaaacgtaacgattgccggtgccggaacgctgggcagtcagattgcctatcaaagtgcgctgtgcggctatcaggttcgcatctggaatccgcatccagaacgggccgaaaaacgaattgcggcgctgcggccattttacaagcatgacctaaagctgaccgacgaacagtttgacgccggcttgaaaaatatcgtttcgattaccaatgattgggaaacgtcatttaaggatgccgatctggtaattgaagccgtaccagaaaatctggacatgaaaaaggatttctacgcgcagctctgctcggtcctgccaaaagaagcaatcattgccagcaactcatcgacctatgtaccaagtcagctggtcaaactggtcgatcgtcctgaaaagttcctccatctgcactttgctaaccatatctgggtcttcaacacggctgagatcgtcggtacgcctcagactgagccggccatcattcaagaagtcgtggcttttgccaaaggaatcaagatgctgccgatcgttttgaaaaaagaacagcatggctacattatgaacgcgctgtccgtaccatttctgaatgcggcattgggtctttggggaaagggcgtagctgacccgatcacaattgacaaggattggatgaattcaactggtgcgccgatgggaccatttatgtcaatggacgtgattggtctgcggacggtttgggcaattttcagctcccatgctgatacgccagagcaaaaggtaattgccgacaagcttaaggccatgatcgatgctggtcactatggcgttgaggccggtgaaggattctatacttacccgcacccagcctatgaagatcccaactttttaaaagaataaacctgcaaaaaacagcgcgataccaggtcttttaaagcttgatgccgcgctgttttaattatttctagccggaaatcccgtgactttagtcgatggtggttggctcggagctctgattggtaagtgggtggtagctgtcagaaaatttaatcaaaagtggcacgaattgataaatagatgacgcgtttcgatgtttattatgacagagtaggcgtgtatcatatagtcattcactaaacgttaagcaaaggcgggaatttaaatgaactattttttgattgatggccgctatgatgatctcttgcggcactatggcttggatcctcaggctgttttgcgccaggcagagctgccggcagacactttgaatcatgaccggatcaccatgaaagaggaacagtactatcgctttatgcaggcaattgatgaattaaagacgatggacgatctggcggtaaagatggcgacggcagaccagatcgagactttttcaccaccgatttttgccgcctactgcagtcataatggcgagcagtgcattaatcgactggctgaatataaaaaattgatcggtccgatgacttatcagattacgtcatcagccgatcaagttgcagttgagctgctgcccggggacgccagcttaaaaattcccgcgtttttggcggtcgcggaatgggcctttttaatcggtcttttaaggcgcgcgacaaagcaggaagtaacgccggtcaaagtggtcttgaatgccgctaaacctgatcctgccttggctgagttggcaggaatcaagcttgaatcaggcagcatcaatcagatcagtttttccaaagcagacctgcagtggccgtttgtcagctataatgcggcgatgtggaactattttgagccggagctgaccaaacgcctggccgaccttgaaattgatgactctacctcggcacgggtgcgcagtgctttagctgaactgctgccaagcggcgaaacgacgattgatgacgttgcccgtgagctgggaatctccaaaagaactttgcagcgcaagctcaaagaagaaaagacgactttccaaaaacagcttaacagtacgcgagaaaatttagccgttcattatttaattaatactgacattaccacgaacgagattgcgtttctgcttggctatcaagaactgaactcatttttaagagcctttttactgtggaccggcaaaagcgtctcagagtatcgtcgtcagcaccagaatcagtcgaaagcaaatcgcagctagcagtcgtgagcaccattaaatgctgattcagtacgaaagccttcctgcagatctaaaaattccaggttgtccgtcatcgtacgctgttcactaaccaaaggcattgtgaaatacgttggattgaaacggacctccattttctcatccagctgcggcgccgtgtagtccttataccagactggtcccagatttgaagcgagctgggcgttaaaatcaggcagtttggcgtctttttttacaatgatcaacttgaaattagcgtccaaagagcagttgcccagttttgaaaacggtccgacgccatcatcaaagtccagaatcagtttggaatcaggctgcaggtatttttgcaggcgctgctgagcttgaggagtaaaggtaagtttcatgattagaacctcgcttttgattttttatcagtttatgcttatttttagtaagtgtaaattttaatgctcagcgacagtaaaaagtccccgtcccaaaataacggaacgaggacttttttaaaatgagctgcgaatcgtaattaagatcgtggtcattaatgccagaatcataaaaccttctgaaaaaacgttggccaacagtgcgcaggtataattgataaaaaacaggcccaagctggcagcaaaggccacaaatcccatcgtgagcagtgctcgctcatgatcgaccagcttttgacagtgctttagactgcgggcaggcagctggcggcggacaaaaaagataatggcactcgctaagacaagcgtcgcgatgcaaaggacgtaagacaaaataatagtagatgacgacttcatttaaaaataggtttgagccacgcctgagcatggtggtcctttccttgaaagattttgccgctatcttagcagaaaatgccctaaaccacaaatttgaagaaatcatgaagttcgggtctgacaaagatcactaatcgataattagcagaatcgacaaaagataatggctgactagggcaaaatgacagttgacaaggattgttgacgggaataaatagacagtgccgagctgaaaaaacaatgatatctgaaaaaaacttcataagtaaattgattgctgaaacgaaaagcggctgggacaggtgataataaaatagtcaatttttaaatgacttagccagaaacgctcattatctaaaacttggatacggatccaaaaatatcagccgcagctggtttgattaaagcaatcaaaatcgaatttgcacaacgtgtttgcttatgatattttcatgaaaactcgccaaccggctgcaattgatctgacagcgacgtttgttcagcaggtggcagcaaaagagggatatcgtgagtaagcgtcaatttaggctgattaattcaatcagtcatcgttatttgactattgatgaccatattttaagaacagttgatcaaaagcaggcactgatcgttagtgaagcagttggacggcagctgttaaaaaaggtcaaccggattgctgaggctttggcacaggccaatgggacggcgtttaacgaatatcggctggaagaagcaccgctggccacgatcagactgggcagcgaggatctggatgccttaatcgaaaccgttcagctgctgggctgctcttatgaagaagcggcgacgcgaatcaagcatcaaaaaatcaagcaggctgatcaaatggcgatgcatcagtattatggcctgtcaattccgcataagattcggtagaaaacaaacttgaaagcgtttctttgaaaagatatacttggcttatcgaacgcattgcattatttggaaagaaggaatgatcatgctatttgataaggcaattgtcagaacgccaggcaagtcagtcgtggatggaattgacgactatgctgatgctggcaagccaagctatgaaaaggcagtggctgaacaccatgcctatgttgagctgctcaaaaagctggggatcgcggtcacggttctcgagccattagagcagtttccggactcatgtttcgttgaggatccggccgttgtctttgatgattttgcggtcgttaccaatccagcccgcagtacgcgacaaaaagaacgtgaattcatccgcccagtccttgatcagttctttgagcatgaccagatttttgagattactgctccaggaactctggaaggcggggatgtcatgccagttgacgatgatctgatctatgtggggctttcggcacggaccaatcaagccggcattgatcagtttgctaagattgccgcgcgttttggcaagacggtcaaggcggtaccggttgaacaggttctgcatctaaagaccggcacgacttatatgggtgacaacaagctgctggtagctggtgaatatattgatagtccctactttaaggattttgatcagcttaaggtaccggctggtgaagactacgcggtcaactgtatcaacactggcaatggcgtgatgatgccggctggtttccctggcgtccaccaattgttggttgaaaacggctttaaggtttacgagaccgacatgtcagaatttgccaagatcgatggcggcttgacctgtttatcactgcggtttcgctaaccgttaaaggccgccgcggttcctgccacgacgaccgagaatttattgactataaaaaaacagcgcgtgatcactgattcggcgctgttttatttttgaaatgacttattgggatacaagttcagccagccgcttgatccccacggcaatatcggcttctttaactggagccaaggacaggcgaatccggttatgcggggcggcatgaatgtagtagcggtcgccattttcgatcaagacgcctgaattttgcgcggccttgcagaattcagctgccgtcatgggcagattgagctgcagccagaaccacacggcaccatcagccggctgccagcttaagcgatcaccaaatgattcagacaagagtttgccggctgcctgatactgctgatgataggccagttttaggctggtaaggtgcttgcgccagagtcggtttcgcaggtaatagtcaaagatgcgctgggacagtcccgaagttgagatatcggcaatccgcttaacgccggcaaagctttcgatcagtcgagtcggcgataccagatagcccagccgcatccccgaggcgaaaatctgtgaaagactgcggacatagatgatgcggtcatcgggatcgtgttctttcatggtatgaagcgtattactgtcatacgccaagccagagccataatcgtcttcaataatccaaaaatcatgacgatgagccagtccgatgatgcgagctttttctaagcggctcaacgagtttgtggtggggttttgcaggttgggcatgagatagagaatcttaggctggatgattttaagcattttttccagttcgtcaatcagcgtgccatgatcaaaattcagaccaattactttggcgccgcaagccttaaaagcatccacggccccgggataggtaggattttgaaccatcacgcagtcgccctgtctgatcagcgcgcgcgcacagatatcaatcgcctgctgtgatcctgaggtaatctgaatattttggggcttcgttttaatccagcgctgggccagttcggcagccagcgattcgcgcaggggataatagcccatctcgtcttcgattacaaaagcgtgaccaccatcccgatctaagatatggttgacggcttgtttaaaagttgaggttgaaaagcggtctggattgagcgaatagctagcaaaatcgataaagtgctgattggcgtcagtcgcatctaagcgaggcaagtaaggtatctgcgcttgatcagttgccaatgaatccgccatgccttcctgaacaaagctgccagaaccacgccggctgatgatatagccatttttctccagttcacgataggcactaacgaccgtcccagggttgattcccagtgccttagccaaaacccgaaccgccggaagccgccgatcgggagccagctgaccattggcgatccggctgcgcagtgcatcataaagctgagcatagagcggttctttggcctgacgattcagtctgatgttattagccgcgcttaattgatctgcattcaataaggatcctcttttccgtgtcgttgtttcagtcccgtcaaaagtattcatggcttactgtcatcgctggctagcctggctggatagcggaatttgacattaagcgccgtttaagcaatacgtgcctcgtttttaatggcaaattcccgaaagtatggcagcgcaaacgcgacctggcctggctggggaagactgacgatctggttttcaatcagatgctgcaggcagactggtgcggctgtgctggtatcgtcaatctgctcttttaaaaagccttcatcaacgacgctgctgatctcatgggccagaatctcgattacctcacgatcaccggttgtcagttcatcaacgatcggcaggtaggcattgctgaatagctgttgttgatagtcgggcataattttttcaaacgcagccggattgatttttttaacaccagacccccacagcagcgagccaagaatctgaaacgcgtaggcatagccgccagttgctgccgctatgtttggcaggacttcaggttcaatgacgcgatgggccttggtaaaaatctgctgatattgattggccaccgtatccagatcaagcatgggcaaggtcagccgcctgcttttttgaaccagcgcggcaaagttgtcatcgcctaaaaactgcggcattcggctggtgattccggccagcacgaccatgatcgaattaccgtgattgcccagctgctggcatagctgaagcagagtgagcagtgattcggttggctgattggcttcatcaacggtgataaaaaggcgctgctgatacttggtaagcgtttcaacgtattgaatgaacatctcgctaggagtatcgtagtccaggacggtaatggcagcactggcttgataatagattgccccgaccagtgtgcttaaaaaatcatcgtgcagctctagatcaaccgtgatccagccatcacgatccagcattgcatcgccaagatcatttaaaaaaacggttttaccacagccacgcggaccatcgatgaagattgagcgaaatccttgctgcagctgatcggcttgatcaagcagtttttgctgcatggctggccgtttgatacagctgggtgagatattgccaaagcctgggttaaatggattgatcatgtttatccctcatttcgactgaagtttgcctttattttagcgtgctggccagggtaagacaaggtacggttggcctaatcagttgcagattgtcaaagatttagaaagcgcatacaatgagagcgtgtattttaaatctttggaaggaataccgattatgaaaacaaaaatcattccagtagcagccgacaatgaaaaagacgtgatcacgcttcaaaaaattgccaccaaatcatttactgccatgtttggaccataccatgaaccccaagccgttaaagcatatactgatgaggcatatgccttaacgattttgcgcaccgagctcagtaatcccgacagtcggacctattttttgaaacttgatggcagaccgattggctatatgaagctgaattggcgtgcggcacaaaccgatcagctctttgacaatgcgatgcagcttcagcgaatctacctgcttcctgaatactgggatcagcacctgggcagtcagcttatggaaaaagcattggatgaggcgcgtcaaactggcgtcgcaacggtctggctaggtgtttgggaacataatgagcgagcgcggcatttttatgaacggtatggctttaaaaaggcgggcacgcatacgtttacgattggaccagatcaacagactgacttttggtatgctcgatcaatgatgcctgctgactaacttgataacacccatgcatcagcaggatgattcattggctgatgcttttttagttgtttgatccgggcagcgaggactgttagcgctaacggtgcagacggccttttttgatcaattttttgagtttttttgaagttgggcgaatcaacgttgagaataggacaacggagcgattggctttaaactgttttaaaacgcgaaataatttctttgctgaagattcttgattaagcttgaagattgttgaaacagcctggtatgctctagatgtttattgaaatcgtttacaaaggggcgtgatgagataatatcgacgcgacagtggaaaatttatcttaaaaactgtcaaatcgggctgcttgataaaatttatgtattcggggggataagaatggacacagcagcaacaccaaaaaagaaaaaatttaaattgaagatgccgggagcatttacgatcctgtttttcttgacggtaatttccgtaatgctcacctggtgcgtaccagccggcagttattctaagctgcagtatactggcggacatcttcaagaaacgacctcattgggacagaaaaaaacgctgccggctacgcaaaaaacgcttgatagattaaacgttaagattgatattaagcagtttacatcgggcgccatcagcaagccggtttcgattcccaatacctatcgacgtcttaagcaacacccagccaagctttacacgatcttcaccagcatggttgaaggaacaatgcaggcaactgatattatgatttttatttttgtgctgggtggcctgattggtgtcgttaaagaaagcggggcctttgaatcggggttgatgtccctaaccaagaaaaccaagggacatgaatttattctggtcttcttggttgccattttgctggttctggggggtacgctttgcggaatcgaagaagaagccgtggcgttttatccaattctggtgccgatctttattgctatggggtatgactcgattgtctgtgtcggggcaattttcttagccagttcggtaggtacgactttctcaacgatcaatccgttttcagtcgtaattgcctcgaatgctgccggaacaacgtttactcaaggtctgctgggccgggtaatcggtctgattgtggcggcagtttgtttggtcgggtacctgtattggtattcaagcaaggttaaggctaatccagaattttcatactcatatgaagacaagcagaagtttgacaagatgtggtcagtggtatctgacgaggaaaaggacctgacttttacctttaagaaaaagattaccctgacgatgtttgcctgcgcctttccaattatgatctggggcgttatggctaagggatggggtttccctcagatggcttcttctttcttggcaattgccattacgttaatgtttattaactgttttggtaaagatggtcttggcgagactgggattgttgatgcctttgttaaaggatcatccggcttggtcggcgtttccctgattattgggttggcgcgcgggatcaatatggtactaaacaatggctatatttctgatacgattctctatgtatcttccgagctggtatcgcacatgaacggggtcttctttatcttaatgatgatgatgatcttctttgtgctgggctttatcgtaccatcttcatccggtctggctgtattagcaatgccgatcatggctccgttggctgatacggtacacattccacgctatattgtcgtaactgcctaccaatttggtcagtacgcaatgctgttcttagcgccaactggtttggtaatggcaaccctacagatgcttgacatgaagtactcgcactggctccggtttgtctggccagtcgtcgtcttcgtgctggtctttggtggcgcgctgctggttactgaagtcttgattgccggctgattgattttgcatttgcttgaaaaagtctgacgatttcgtcgggctttttttggtgcacaggtattaaactggtctaaaaaaagttaaaatagcattgtcgatatattaacgaaatgggagaggattttatgagcagtaacgcaaaaaaacgcgatcaaaaaatcctgattaaaattgccgtggcgctatgttatggagtgctttcggcaatggcaatcaatatgtttttgtcgcatgccaactcatattcggctggtttgttgggggtttcacagctgctgcaggctttatttttacaaagtggtctgcatgtcagtatgagtctactggtcgcggttttgaacgtgccactgtttgtgtttgcttggtatgaattcggctttagctatatcttattttcaatgctggcggttggctttaacgttgtctttttaaagtttattccaacggccaccttggtaaacgacccgctgaccaatacgattatcggtgcggcaatcttgggaatcgggattgggctgtgttttaaccagggctttacgactggtggttccgatatcgtcgtaacttattgtcaaaaaaagctgcataaaaaagtcgggatgctgaacaacctgatcaatggcgcgattctggtggtaaccgtcctgtgctttggtcccagccggatcgtctatagtctgatcgggatgctggtgaccagcctgatgatggatcataccttcgtcctgcaagaagacgtctcggttacgatctataccaagaaatcagctgccgtcgcggaacagctgcgcaatttcgtgcatggggcaacgcttttgcatggaactggcgtctataccaatgaacccacggatattattttggtatgtacgcccaaggctcagttaaacgagctgcgcaagatggttcataacgttgatccggacagctttatcagtatttcacgagctgatgtcgaatttggcaactatcagcactattcgttttagcagctgactgaatagccgtcaaaaaactgcatgccgtgatggctgcagcgtgctgactgaatattaaaagtccttaccccattgttgaagtcatgggataaggacttggcataactaaaagcaccgtgcttgactgatgtcggcacggtgctttttgtatatcaaaaaatacttaatggtgagtggcactgtatttggcaatgctgtaggcgtcaacgccgcgcatggcattaacgacgtccagcggcgtaacctcaaacggcatgcgattcatggtgtcgtttggcgcgcaggctgccttgccgactttcagcaggtttgcttcgcttggatcctcgattcccagctcgacaaagttggttggcagatgcagcttctttaagaagtggaagtatttttcgaaacgttcggttgccgcgccctccagcatcaattgcgtcagcagaccgaatgtaactttttcaccatgcagccgttcatgaaccggcccattcaaaacgctaagagcatcattaatggcatgagccgcagccagaccaccagattcgaagccaacaccgctcatcagcgtattggcttcaacgatccggtcaaatgctttggtatcggcatgggcaatggcagcggcataagcctcgtcgccatatgcaaacagcgtgttctcgcattcctgggcaactgccaggccaaccagcgtctgatgctcgcctagcatgttgagcccatgcgattttttgacggcctgggcttcaatgttggttgccaaagcgtcagccatgccgcatgccaaaagcttggccggtgccgtggcgatgactttggtatcaaccatgaccaggtcggggttctgattatagaaacgataatggtcaaactcgccattgtcttgatagataactgacagtcgcgaacaaggcgcatcagttgaggccacggtcggcaaaataacggttttgacactcagattgtcggcgatggccttggcggcgtcaatcgttttgccacctcccagaccgatcaccatttcgacatggttgtcatggccgattttagagacgcgcttgatctcattttcggatgattcgccattgaactgaaccttggtaacggtaaagtcgttgttgatcaaataatcgccaaactcattgccaacgatgcgcaatgaggtaggtccagccagcagcaggattcgattgccaagtcgtgccagatattcagcactcttaaataaaacatcgcttccttgaatgtaggaagcaggactgccaaacatattgagactcattttcatcagctcctttcagatgcaaaagctcgcttagctaagttaaatataccatgaaagcgatacctcggcaggcagattttaacaattcagtcaaaaaagatgacaatcttggcttcaattgtctgataagctttgcatacgatttgcattgtttcaatttgttcagcttaggcataaaaattctggcaagagcatcatggttttagagacacagcagagcagtgatacgacctatcgcttctatgactgggatcgtgttgaccaaacgactggccaaaagcggccgctgcagattaaggaatcgatgtacgacggtgtctttccacgatccagtgctgagtacagaagcatatgaggttggcgatgctaaagtaacgtgttttgtatcaaccaactactttgccgtctatcgttggctgcttaagaatggcacggccacattcaaacgcgtccagagtccctacgcgctggtcgcggttctggacgatcaaaggcgatatgatgattatcgcttctgagccaggatcggactcgctaaaggcatagattacaaaaaagaccgtcctgacgctgcacaactttgagatatcatggtatttggaatgggtgcctacgataagggtcaagctaccccccgaataaaattcgggggcttgtagacttcacctatcagttcatcgctgaatgagttactagctacaatttgcctagataaagccagcgtagcaacatctcagataataaattatcttcggatggcactatgtcttacagccaataactaggccatttaagatcaagctaacgcttaatctaggggcgcaagtttccaaacgtccctttctaaaactaataaattgcttctagattttggtcggatctggttagcaagcgttgacccttcgctaagatattcaaagcagcattgtgatcacgaatgtgatgaacatggcagttaggacaagtccattcacgatcatgaagagtcaatcgtttggtacctttgctgcccatcacgaagccgcaatcataacaagtttgggttgtgtaagctggattaacttcgacaaacgtgcgcccatacagcggggccttatactccagcatacccaaaaaggtccgccaaccaacatcggaaatactcattgccagggcatgatttttaagcatatttttactcttcaagttttccgcaactaccaaatcgtggctcttgattagtgcagtcgaggtttcatgaaggaagtttaggcgtcgattacgaatccgttgatggattttggcaacgaccagcttctcctgctggtaattcttgcttgcccacaaaggacgatgctcttttttggcacgccttgcccggcgagaaagaatccgttggtgttttgccaagtgctttttgagggcacgataatagtggggattagcaacctgcttctgatcactggtagtaagaaagttttcggtgtttagatcaataccaactgcttgattggtattgggtaaagcttggtggaacggctcatcacttttaagcagtaatgaaacggtccattgcccggtcgcgtagtgcttaattgtaacagtggcaatccgtaccaaccgattagttggtaatgaacggtgtaatttcaccttaataggacctaacttcggtagctggatatggttatgatctaaaaatttgattgacccattataaagcgaaggagcgcccccgtgtttctttacggttgcactcgaataatgattggaagtcgaatatgactgaacaggacggctttttcgcttaaactttggttttccggcagtgtgtactttccgaaacatattccaagcggccttataattaacttcggtattggtgaacatatcactatcaagatcatcatcaccaagccaaggatatcgttgagcagtgatacgagctaaaccagtcggccgtttttggctcttcttaattaccttaccgttcttgtcataacgccaatatgcttctggaattgggtatcgcttatcaagtttgtttttgataattctactatcagtccaactattagctaacaattggttataaatgaaccgtgaagcattcagattcttccacaaaatcttttcttgtttccaatttgggtataagcgtaactttagccccatcatatatggcaaatcatcttttttcggcatgtcatttcaccccctttactaatttcaattgtactactaaatatcggaatgccacatttacaacgccagcactagtcaacgagacgaaagatattctaggcgcattgccgatcttcatgatattacgatagaaaaaatggaagtggtgccagatcatgttcatatgttgatcagttttaagcccaagtattcagcaactaatatcgttaaggcactgaaggggggcagcgcgcgaatattcctacgtaatcatccagaaatcaagcaaaggcaatactgggtgaggcggccatttgtggtcacgtagctattacatggggacactgggaaacatgagtaaagaggttgtagagcgttatattgccaaccagaggacgactaaaagtaacgctggcagaccacctctcaaaagaaaatagcgccttactgcactaataaaggggcattcctcccccgattaaaatcgtgggattcctgcccaagttttaattgaatccaacggtgccgttttgcaggctgactaaaatcattggagcctgattctaagcagtaatcgaaatttataagatcaatcaacgacttgataaaaatgatgtgacatttaaactttcgccaagctgaatgctgcatcatttttcatttttgtcagccactatcagctcagcatggcagactatctgctaatcgggctttgacgcgccgctggaatgctgacgtaaaaaatccaactggagacggcgttaaaagcctgtcggcagcttgaaatggtaatcaatcttgtagtaattattgactggctgaattcggctgcggtatcgacagttttcttgcgtttcaagacgagctgtcgataaaaatccggtttagctaaaaataatgtaaaaaagctattgacttaagcaagtttagtcggtatagtaatatatcgttgtcgcgttgatgaacgcttaaaatttttaaagtcattttgcttgaatttgtttgaattatctttaatgacttcaaataaaaaaagctcttgactttgaaatgacaacctgttaaaataataaagttgcttgcttgaaataagcgagcaacggtagacctttgaaaactgaatacagtttcgacgaacacaaatgtgcagggtcatcgatcattacgattgatgcaaaaacatttgcgaagtc

SEQ ID NO: 1835 - DNA, 168770 bp, Unknown
  gut microbiota DNA sequence
cataatgtgctatctttcttatcattcacccctcaatgaggttaggtttacaacatgcaataccggtctcattgaggggtattccggcgaccacgccggatcagacgctatttttattgtcgaaagttaccaagttgaaattaggttactttctttagattcagttaccattaatggcaaatagtctccaacgctgatataccaacgttttgacactacattctcttactacttcattgcttttttcagttacctatacatacataaaataaattggtaacttggtaactttgcttactaatgccgatataacggcatctatcggttaccaaattttagtaacggttaccaattcattcttatttgaaaataaaaaggtaaccgttaccgattattggtaaccttttcaagcgcttacaagcgttgatttaatgcggttttatgctaaaggttaccaagttaccaacttctgcattatataggcgatagaaaatcgaaaaaataactaatcacctccaaaccgtgatataaaggcatttttagcactctcttattcaatgttagactaataatcttcgattgaattttagcttggtaacctttttggtaaccttatctaatataaatcggacgggtatttaacaatccgtctaatccctgcataacacttggtcgagtgaccgttaattttgatgttcttgttgtgttcaatcccacgcttttccatttcaacattaaatttaggttttccaagaaattgagcaccactttctttgcaatacctaacataattgttgtatagcgttgccgttggctcacgatatatcttttggtcttttccaagctcacaattttcagtcagccaatttccaattacatcatttgcttcaatccattctctaagtttttgccccatgtactctgtcactggtagatgaggttctttcatgtttttagcctcaatcagcgtcttgcgataagcgactaagcattcgcgtacaaaagcaggccgagcagtgataaaatcagccattttatatttttctttaaaccctttgatgcgtcgccattcaataatcattggccgtcgttccataccgtgtgaactgtcatgaaaagatggtagagcgttgcaggtaaagattaattttgcctcattaataaactcaaaaggatctttacccttgtattcggcagtcaagcggttgccgccagtcaatcgcttaagaatattagtttcttttataaatccatttccgatgtcatctgagtagttcaactcttttcggttaagcttcgctaaattaaatcgtgccttatcgctgtcccccaatgtgtctaagtcaacattagctacgttaaattggccaaataaattttcaattatgttaagcatggttgacttaccttccccgccgttaccatagatgattaaaaagtgttgaaattccttataactgccagccatggcccaaccaatatatgatttaaacacttctaccacttttagatccccttcgcttttccaacgtccttgatcatcacgtttggcgttaggatcaaccattgattctttcaaccatcgatcccatactgtctcctcttcaggttcaggaagctcccccaaatcatattcgtggttttgcaaaatgtaattatcaaatttattcggcacgatcttatcttggtcaagatcgtatgtgccgttattaaaaacaaccaggtgtttatttctattttcaagcgcaaatttatctgttaggctttcatcaacgcccttgctcgtggtgatattcgacacgatcgctgaaaccacgctacccgacataataccgatttcattttcaaggatttccggaatgacttttttcagatgacgatcagcatatgtgtgccattgctttttgtctgaattccaccaaaatccgtgtggatcgaaaaggttaaaagtaaaatgatatttgttcatcaaataatttgctagattgagtgatttaaccttgatttttccgtcttcatccttggtgaacaaccaattgttaattacaattactttattattcttctttttctccattgttttttcctccatttttgttaaaatgaaggtaatatgtgtttggtgtcgagtgcttgcgcaactcggcttttttattaccttcttttacttacttttcgtcagtaacgacttcttcatgagccttcatgaaggcatcaatcgctgtcttgctaatacgcatcgtcttacccaccttaattaccggcatacctgccttaatcaggtcatagacaacatgttttgagccatagcccaggtattttgccgcatcactcaagctcatgtattcttgttcttgcatatgcatatcttcacacctcctttctagcaaatttcgtttccacaaacgatcttttacccagaataaacatttttttcgttagtttaagtttcgccacgttcgttttcgtttaacctcgttccaaggttgaaacgaggttacggcaaaagtagtatcattagattaaatcgttagaattttgattgatcctttagctatgcgcgtgcccggcagccgtaaattcatagaaagaaggatcaatcatgtggactgaacccacgaaaaccggcaaagtcaagtttgtcgaacaattcaaaaaccccctaacgctcaagtacacgcgcgtatcaatcacgatggacaaggaaaccaataccacgcgcaagctggcgcaacagaccctgaataagcggattgaagagaagcttcgtcgtcttgaagacggtcagatcaaagaaggtgttacattcagcgaattaattgaagaatttgatggttactatcggcaaactgtcaagccttcatcatttgcagcatggaaaaatctcaaagcttgtattctgaaaaactttaattccgatatcctagtatctaaaatcaccaataaatatctgaccaacacgctagaagctatgatctatcagcgcggatataacaatgcttatgttggcctgatcaagtctaagatcaatcagctgatgcgctatgcgtaccggcacgactatatcgcagccccagttggtcagcttgaaatcaattggaaacgcaataactcagctaagagcattgaagataagtaccttgatgatgaggttaaacaggtcctagaagccgttagagcgatcaattcagtacatgctgacgtcttgatgtggcaatatcttactggtatgcggatcggtgaggttctcgccctgcaaatcaaaaaagtttttcaagaagcaggcaagtggtttgttaagattgactgtacgttggagtattctaaaaaacgcaaaagcgagtttacgattagcagcacgcccaaaactcaaagcagcaaccgtactattcttctgccagataaggcagtcaaaatttatcgccagtattctctaaacaagcagcctgatgacgttttgtttagcattgaaaccaaaaccggtgcttttcttcaccccctttcaatggacaatcagcttaaaaaagttcaaaaagcattagatttgcccaaaccgttatcaacccatatttttcgccatacccacgcttctaaattagctgagctaggtgttccaattgagctgatctcaaagcggttgggtcataaagattccgccattacgcgccagatttatctccatgtcacaaaaaagaccgctgaacgatacagcggtctgattaatagttttgacgtatgattttccccttcaatgtctctcgcagttttttaacaggtctgtaaccgctgaaagcattgatattacagcacttatgaaacaaaaattagagttttataagaaagttaatcgtcagtttttaaaatgagtgttaaaatatcaaaaagccgtaacccaattgcttggattacgacctttgaatggtttatttaattaagcttatttcttcttagcgtccttttcgtcagctggtacctcgttgtttaagtcggtccgcactaccaaaacgtcaacgggagcattccgcttaacaaaggacgtaactgaaccaaccattgcccgctgcagacgagtcagcccgcaggcacccatcatgatcagatcgttttggtgatcgcgtgggaaatcaaaggaaataaccgtcttcgggttccccagccggatgtgaatgtcaatgttgtcaaagccctgcttttgcttagcgttgtcgtacagttcatccagatagtcctttgacttgtcgaccaactggtaagcaatactgctgtctgacataccggcaaagttgtaagccattgctcgcgtgtcgataacattaaggatgtcaatgtgtgcatcgttacgcttagcaacggcaattgccttgttcagtgcccgttctgcctgcttggaaccatcaacagggacgagaatgttttgatattcttgattcatagttatgacctccaattcacacgacttaattgttattcttattgtaccataatgacagcggaatcatttgatttttatgggtgaaaaagcaataattagttaaattattttgacaataaaccatttacattgtattttttcacaatttaaagacattattttgtgattagttaaaaggagtggatttcattggacaagatcgatcgtcaaattatcaacatgctgcaggaaaacgctcgggtatcattaaaggagctttcagcagcctgctacatctcttcaccagctattgccgctcggatcaacaaactggaaaagtctggcatcatcaccggcttccacaccagcgtaaatctagaaaaactggattatcacgttaaggccttcgttcagctgcaactggaaccacgccaaaagaaggaattttatccttacattgcccaggttcccaacgtcattgaatgcaattgcgtcaccggcgatttttccgaggtcatggaagttgttttcccttccacttcagatctcgatgattttatcaatgaaattcagcagcgctttggcaaaaccagtactcagattgtcttttcaaccagtgtcgatcaccgaggcgtcaaactgccacagcccgaagaagttaaagactaagaaaacgcctgcggtcatagacgatcgcaggcgtttttcaaaaccgataatgataattaaagcagcttttcgatctgattcagacgcttttcaaacagtgcaaaagctcgttccagatattggctgtcggtaacgtcaactcccgcatgctttaacagtgttaccggatcatcactgccccctgcccgcaatagatccaggtagcgttccagagcacctggctcatgctgccagactgcctcagaaagcgccgtcgagaccgcccaggaagtcgcgtactgatagacatagtagttcatgtaaaaatgcggtacataggcccagctctgcgttcgcgtgccagttttctcaactgcgggaccatagtatttattaaccagctcaccgcttaattgatccagatagtcggccgtcagcgtctgtcctttttgctctgctttgtaggcggcatcttcaaattcagcaaattgcgtctgccgatagatcgtaccaatgaagccggtaatatattgttccaggataaagatcagctttttaggatcatcctggtatttttccagcagatagtcggttaagatgttttcattaaacgttgatgccacttctgccaaaaaaatcggtgcatcagcatattccgatggctgagcctgttgagcaaaccaactgtgcatggcatgaccagattcatgtgccaaaacaaacgtactgtaaagtttatcagtccagttaagtagaatgaatggatttgccgtatagacgcctacttgatagccaccagagcgtttaccgagattttcagccgcgtcgatccagcgatgctcaaattcgcttttcaggcctttcagatactctggacccatcacctgcaatgcatcccacgtcagctgcttaccttgttcaaaagtcgtcttcagcatatcctcgccagccaatgggacattaacatcatatttatacatcttgtccaggcccagaacccgtttcttcagctcataccagcgataaaccagatcaagatgctgattgacggttgccaccagcgtatcatagacgctttctggaatattattggctcctaaagcggccgcgcgcgcacttggatagtgacgaatcctagccagtgcattttctgtgccgataaagctgttcagcgtttgagcaaaggtattgcgcagctcatggtacggtttttcatatgccaaaacggcttccttgcgcacggaacgattttgcgattcattgaactggctgcgattgccatgcgtcagttcaactaactgccccttttcatcatgaaccttgccgaatttcagatccgcatcgttaagcgtattgtagatttcttcagcactgtccagcgacttgttcaaatggcccagcagcgtttcttcggctttagagagcacgtgctttttttgccgccgcagcttggtcatctcatattgatactcggccagtcccggctcgctttgcatcagcttggcaaagtccgcatcgtcaatggctgtcagttctggttgaataaaggccagctcagcttcaatcgtcgtcgcggcattgacgacttgaccatagagcgtgactgccgtcgaatccgtcgtatcactgtctcgccgcagcatgccatagacaaattcgcgttccagctcttcatcaatcgccttgttttcgttgagattccttaaaaaggtctgaccatcactggcaaaatgccctgccgtcttggcaagttcagaggccttctgctgcgttttggcaagtgcttgttccattgcctcatctgattcatacagcagcgtcagatcccatttgagcgcttcaggtacttcgctgcgtttaagctgtttttccattgtcttccgtcctttcctcatttaacttaattatacaaaaaaagcatcgctaagtttctcagcgatgctttatttttagccttgatagctatccaggtattggttgtatttttcgtgatccaatgatttttcggattgaccgattaccaaagttgcaatcgtgttgccgaccacgttgaccgctgtccggcccatgtcgacaaaccgatcaattccggcaataaacgtcagcccggcaaccggtacgccaatcgttgagaccgaagccagcagcacgacaaacgaagcccctggcaccccagccatccctttggaagtaatcatcaagaccaccagcagcgtaatctggtgagcaatcgtcagatgaatgccataagcctgcgccaagaacaaggcagccagtgcttggtagattgccgagccatccaggttgaacgtgtagccggttggaataacgaatgaggcaatccctttgtcgacccccatcttctgcgttttagccatcagacgcggcaatgttgcttcagagctggccgttgaaaaggcaatcgcaatttcttccattactacgtgcatcgtcttccaatagcgcagatggaaaatcttggcgacgattcccaagacgaccaccacgaaaataatcatcgttgcgtaggcgatcaccacaaacagtcccaatggcagcaaggctttcagacccatttcggcaatcgtcatcccaatcaggccaaagaccccaattggcgagaacttcattacccagttggttaccttgaacatggtttccgaaacggcattcataaagtcgatgatgatcttgccgctttcacccagcgaggcaacccccagcccaaagaagactgagaagaagattaccggcagcatgtcgccgtctgcaatcgacttaaagatgttggtcggcacgattgcgatcagcaggtcccagataccgctgtgcttggaagccgattttgccgtggtcagatattgagagatgtctgaggcatgcagatcatggatgttgatgtaggtaccaggatgcaaaatattgcccacgatcatccccaacaacagcgcaatcgtcgtcaaaacctcaaagtagatcaaggtcttaaccccgattcggccaagcttcttaatgtcgccgatattggcaatccctaccgtcaagcatgagattacgatcggcattacaatcatctggatcagccgcagaaagatcgtaccgaggctttgcattaccttgatggcgccagtattttgataggtcatggccccaacgataatccctaaaatcagtccgatcataatctgccagcctagcgacagccggccaaagcgataacgtttcatatgatgttccatccttccgcttatttggattgtcataacgatgcattcataagtttatggttgaataaccagccgcgtttaaattatttccaattaatggaccgtaccagaatcaattccagcaaagcccatcccatcttgtacgaattattaaaagcatgcggtcgcaaaagtacgtaaaagttttggttttcgtatcgttatttcactcacaaattaagttcatctgtgtccgaaagcttattttacactgttatttataaaaagtgaacaattaattttagattaagttgatttgttcggtaacaagttgtatagagtccggattttgcgtttattgtaaacgatttctaaaaaccgtttcttaagaatttccgaaaattatttaactttaaaataataaggttcgcaaaattttttattattttttatccagggtataaaagccattaggacgccttggaaacgttttgatcattttttaacaagagtttttaactaaattttttactattttttattgatttaatttttgaaagcgcttaatataattccagagagttttaagtaaatgtcttttctaaggaggaaggctagattatgaatgaggcgagttctaagtcacaatcaatggcttctcggattgcatattcatttggtgctttcgggcacgatatgttctacgggatgctgtcgacttactttatgatgtttgttaccggccacctgttcaacagcaacagtggtggccaagcagcccacatggtttctttcattacgattaccatcatggtgctgcggatcgttgaattggtaattgacccatttatcggtaacgttatcgacaagaccgataccaaatggggtcactttaagccatgggtcgttgctggtgggatcgtttctgccgttgcaattgccctgctgttcactaatctgtggggtctgacctacaagaatccagttttgtacctcgtcgtatttgcaattttatatattacgatggatattttctattcctttaacgacgtggctttctggtcaatgattcctgcaatctcatttgactcggcagaacgtgaaaagacggctaccttcgcccgggttggttcaacgcttggcggtcagctggtcggtgttgtcgtaatgccaatcgtcttggcattttctatcagttcaaacggtggctctggtgacagtcgcggttggttcgcatttgccgcaatcgtagctgctatttcagcaattacgtcctgcggggttggtctcttcactcatgaaaagaagaacgaactgcgtgaaaacaaggaaaacacgactttcaagaaggtctttggggttctgcttcacaatgaccaattaatggcaattgctgttacctacctggtttacacgactgggattcagatcgttaattccttccaactgtactacttcacctacattcttggtcgggcaagcacctacacgctgtacgcactgatcaacggcgttatcggtgccgttacggttgctctgttccctgctctggctaagaagttcagtcggatgaaggtcttctattactcaatcctggttctgttgatcggtttggcaatcttcgcctttgctggtcaatctctgccaatggttattcttggtggtgccatttacatgctgccacagccactgattttcatggttgttttgatgatcatcactgactcggttgaatatggtcaattaaagcttggtcaccgtgacgaagccgttacgctttccgttcgtccactgctggacaagttcggtggtgccgttgctggtggtgtcgttgggatgacggctacggctgccggcatgatctctggtgctacggcatccgacattactgctcacggtgcggggatctttaagctcatgatgttcgtcgttcctgcaattctgattcttttgggtgtcctgtgctttaagagcaaggttaagctggatgaaaagatgcacgctcaaatcgttgacgaactggaacaatcctggcaccaacacctggaaggcaatgacagcgttcgtgaagaactggctgaagacgccagcctggccaaagatctggttatcgacttcaaggcaccagtcagtggtactttgatgccattgtctcaagtaggctccaagccatttgctgatggtaccatgggcttaggtattgccatcaagccatctgacggccaagtctttgcaccattctccgggaccgttgttgctgacttcccaaccactcgtcacgcaattggtctggaaaccgacaatggcgttccggtcttgattcacgttggtgttgataccgttcagatgcgcgggactggcttcatcaactatgtcgtcaaaggtcagcacgtggcagccggcgaaaagctgatggaattctgggccccagcaatcaagaaggcgggtcacgatgatacggtcatgattgcctttaccaagtctgaaaaggcacctgattacactttgacctatgtcaagcaggatggtgaagtcaaggttggcgacaccattatgcaaatcgaagtcaagaaagactaattagactaattgaatgatcaaaaagtctgttggcctaaaaagctcggctgcagcagtcgggctttttgtttgtcatttaatcatggaggaatttgaacatgagtatccaagttaatgccagcaatcgactgtttcacctgcagaccaagcataccagctacgtcttccacgttattgaggacggctcgctgggtcagctctactacggtcctaagattccattcaaagacgactacgccaacctcaacacgcgtgaagaacacgactgtaccaacacgcgcactgatgaagacgttgagtttcaagctgagctgctaaaacaggaatacgccggactaggtaagggcgactaccgttatccagccttccagattacctatccaaacggctcacggacctctgaattccaataccgcgactatgagcttaaggacggtaaagagcggctgactggcctgccttcaacatttgccgatgacagcaatgattctcagacgctgaccgttaaactggcggatggcgatttagagctgcagctgcactacactatttttgctgatgaagacgtgattgtccgcagtacaacgtttgtcaaccatggcaaaactgtctttttaaaccgagccttgagcgcacagctggatctgccggatgccaactacgacttcattcagtttgccggctcttggtcacgggaacggcacctgcaccgcagccatctgcgtcccggtacgcaaagcatctccagtctgcggaccgcctccagtcatcaggaaaatccattctttatgctggcccggccacacaccgacaataaccaaggggcggttttcggctttaactttgtctactcaggcaactttttggattccgtcgaagttgaccaatttgataccacgcgtgtcctgattggcatcaacccggatgaatttggctggaagcttaacagtggtgattcattccaaaccccagaagtcatcttcagctataccgacaatggcttcaacgcgctttctcagcaattgggcgccttttatgctcagcacttgatcaaccctcattttgcccaccaggaacggccaattctgatcaacaactgggaagccacgttcatggactttaccgaagacaagttaatgccaatcgttaagcgtgccaaggaactggggattgaaatgttcgtacttgatgatggctggtttggtcatcgtgacgacgatcgttctagtctaggcgattggttcgttgacgaaaagaagttcaaccatggcattgctggatttgccaaacgcgttcatgatctcgacatgaagtttgggctctggtttgaaccagaaatgatctcaattgacagcaagctctatcaaacccacccagaatggatgatcaagacgccaggtcgcgggcagacgccgggccgtcaccaattcgtcttggacatgagccgtcaggaagtcgttgactatctgtttggattgatgagccacattattcaagatgccaaactggactacatcaaatgggacatgaatcggaatatcaccgaaatgtacggcgccgacctgcctgccgatcagcagctggaattctcacaccgttatatcttaggcgtatacgatctctatgaccgcttgaccaaagccttcccagacgtcttgtttgaatcatgtgcctctggtggcggccgcttcgatctgggaatgatgtactatgcgccacaggcctggtgcagcgatgataccgatgctattgaacgcatcaagattcaagacggcacctcatatggctacacgccttcaatgtggggcgcccacgtttcagccgtgcctaatgatcaagtcggtcggctgacctcaatcgacacgcgggctaaagtggcctacttcggtgcattcggctatgaactggacgtcactgagctcagcgatgaagaacaggctaccatcaagcagcaggtggccttctataagcaataccgcaagctcttccagtttggaacgttctaccggctggaaactccggataccagtgataacgtctatggctgggaaaccgtcagccctgacaagcagacagccattggcatgcgctatcagattctaaacggagccaaccctgcctacatccgctactacttcaagggcctggatcctgaacggcgctacacggtcaatgatggctcagaagtcttctcgggcgctgaattgatgaatgctggttatttcgtgccacgcgtcatgaaccgcctgcaatcgccaaaggtaccatctgatttccacgctgacatgtttatcgttaaagccgttgactgattcggcatcaaacaaataaaccgcaccgtctaatgacagtgcggtttttgatttagtgtcagtgttaatcagtcgacaaacagctttcggtactcgccataaccagcttctgccaactgatcaaacggaataaaacgcagggcggccgaattgatgcagtagcgtagaccgccgcgatccagcggtccatcgcaaaaaacatgtcctagatgcgaatcagccttcagactgcgcacctcggttctttccatgccaaatgactggtcgcgcttttctttcagcttggtaattggtttggtaaatgccggccagccgcagcccgaatcaaacttgtccagcgaagaaaacagcggctcgccactcacaacatcgacatagatgcctttttcgaaaaactgatcatatttgccggtaaatggcggttcggtagcagcttcttgcgtaacgcggtactgcatttcagtcagctcgtttttatcagtcatcgcaatccctcatttcgtacctgctgaacgattgattgcttgtcattcagcattttgattttggtcattgtatcatctggcatcgttttgacgtaaaaatatgcctacgctatcaaaaaagcgacccgtattgcgcggatcgctcgattattaagctcattaagcgccaaataccttaaaacgcttttcagcaggcaggacgtctttttcgccagctggtgcctcaacggatccaaacggcatttcagcccgcagctgccaggtttcaggaatgtcaaacgccttggcaattgcttcatcgatcagcgggttgtagtgctgcagcgatgcacccagtccttgaacggccaaggcttcccagaccgcctgctgagcaccgccaattgcctgttcagcccagccagcaaagttggcggcatatgctgggaagtcagcctccaactgctttacggtcgccgtttcagtaaagtacagaatcgttccgtacgccttgaagctgttgaccttagcttgcgtcttggcaaaagcttcatcatcttttacgactttgcgcagctcagccaatacgatatcccaaattcgatcggaatcttggccaaaagcaatcaccgcacgtaccgtctgactgttaaaagcagatggcgacagttcgatcgtcttttcgatcaggtcaaccaacgtctgcttgtcttccttgacgtttttgcctaatgcataaatggagcggcgtttttcttgaagttgattaaattgatttgtcatagtcgttcctctttttctgaagatttgttatttgtattataacttattacttactttttgtaaatgattttttcttataaaaagtaagtatcagccatgcaaaaactcctgctggccaaaacggcacggcaggagtcggcaattattgatgtgtaacttaggattttttgatcatttttcggtactttgccgcaaaaccagcttagtaccgactactacgcgctgcggagccagatctgggttctgcaggcggcgtcccagcaattcaagtcccattgccgccatttgatcggtcgggacgtgaattgaggtcagcgttggataggtatagtgagtaattgacgtgtcgtcaaaactgatcagcgccatttcatgtggcacgtcgatctgtttttcgtgcagggcacgcaaagcaccgactgccatcgcatcattggcaaccaaaacggcttgaggacgatcatcgagctgcaaaaggcgctgcatctggtcaaagccgctcttttctgagtaatcacccatcataaaccattctgagtggtaaagatttttagcttttaaagtcttggcgaaagtgtcgcgccgtgaatcgctaaccggtttttggtcagtcgttttttcctgaccagcaatcatgccgatcttggcatatctggcagccagaaaatcagcagcctgcttaatgccgccatcaaagtctggcaaaaccgagtcacagccattggacaattcatcatagtcaatcaccacgatcggcttgttgaaacgctgcagctgatcgatctgtttttgactgtacttgccgatcgcaacgatcccgctgacgtcattaggaatctgttccaaatgcgtgtcaaaaaccgtagccgttgtatagccaacctgctgggcctctttttcaacgcccaggcgaatattcatgtagtaaagatcatccagttcgcgagctggcgaataccactgaataacggcaatcttgtgaccagtggctgcgctgcgtcgatgttttttggtataggacagctcttcggcaatcgttagaatcttgcgccgtgtctcttcaccaaccgacagttgagggtcattgtttaaaactctcgataccgttgccagtgaaacccccgcacgatctgcaatgtcctttagcgttactgccatcaaaaaccatcctttccttggtcaaaataggttacagtcgttcaacgaaccgctgccagccagcttgaccctgggcattgcgcttaaagacgccggcatccgccaaaacatcgccgaagacctgagcaacttcttgttctaaaatctcttcaacgttgtcggcattaatgtcatcatgccgtgcctgaacttctttagcccatggcagatgactgtcggcaatcttgtttggttcattgagccagtacttcttgacttcttccaattcactcttcaaacgagctggcagaatggcccggcccatcacttcaatcagaccgatgttttcctttttaatgtgccagagcttttcatgaggatggaagatgcccaatgggtactccttactagtattattgtctcgcaaaaccaagtcaagcacaaattcatcaccattacggtgcataattggcgtaacggtgtggtgtcttgtattaccgtcgaaagctttcaatgaaagttctggatcgtcataatggtcccagacgttgatgacatgcgttcccagctgaatcaaagcctgatcgttcttgctgatcaagcgcagatcgctcattggccagtcaacgatgccggccttaacgtctggatagtctttaaagctcagttcctgcttgattggcgccttcatcatcgggaaggtatgccggccgccttgataatgctcatgggccagcatggagccgccaacgattggcagatcggcattgctgcccacaaagtagtgtggcagctgcttttcgatctcaatcaagttgatcagtgtctgttgattgatctccattggttcgtgcttggcatccaagaaaatgcagtgttcatggaagtaggcatatggcgagtattggaagccccactgcttgccgccgatcgtcatgcgaacgatgcggtggttgctgcgggcagcatgccccaaacgtcccagatatccttcattttccatacaaagcgcgcactgcggatacttcttttgagtatcatgggcagcagcagcaatcgccttaggatctttttcgggcttggaaagattgatcgtaatctccagctcgttgccatcattgacttttttagtaaactcaatattttttttgattgcggatacctttacatagtcattgctggtacacagatcataaaaccagtccgtagcttgttggggggattgttcatgcttttgccagaacgtcccattaaccttggccggtgttggcgtcagcagatcatacagctgatcgtttaagatttcacgcgctgtctggccatcttcaatcttgccgcgctgaactgccaattccaccaactgactggccagtggcgtatctggttgggcctcagcatcttcatcacccaccagcgctcgaatcttattcatcacatagatcttgtccattggctgaaaagcaccgctggcaatcgccttttctgcaaatccttcaatgagttccatgtcgcaaacctctttctcaaaaactgaccttaagactagatcttgtggggaccatcaacgatttcggcatcatagaagctggcatcgtaaccaatcgtttcccggtagaccttgccgacgttttccttaaatgcatcggcttggtccttcttaacgattgcgatggcactgccggcaaaaccgccgccgaccatccgcgcacccagacagcctggttgttcccatgccgtttctgccagcgtgtccagctccttgccagttacctcgtagtcaaaatgcagcgaaacgtgagaagcattgatcagacggcccagcttttcaaggtcacctgccttcatagcctcaatcgcccgcagcgtccgttgattttcggcaactgcatgacgagcccggcgaatcaaaacatcgtcattgatcaaataggagtattcgtcaaacgtgttttcgtccagttcacccagcttcttgatgttcagcttttggttcaggcgcttaacggcttcttcacattgttcaacgcgttcgttatacttggagccagccagcgagtgcttcttgttggtactcatgatcacgatttcgtagtcgcccagcttcaatggcaggtattgatattccaaagtactgcagtccaagaagatggcgttgtctttcttacccatcccaacggcaaattggtccataattccggagttcaggccgacaaaatcgttttccgtcttttgaccaagcttaaccagcgagatttcgtcaatatccagattgaattcatccttcagcagattacccatcaaaagctcaatggaagctgatgaagaaagccccgcgccgtatggcagattgccgtgtaccagcagattgaagccatggtcgatctgatagccagcctgctttaagtagaccagcatccccttaaagtagttggtccaggtcttgtcggcatccgtttctggcttttcgtcgttgatgctgaattcaacgaccgtgctgccttccatgttggctgagtagagctgaaccttgtcatcatcacgcggaccgtagacgccaaacgtacccagactgatggcacatgggaaaacatgaccgccattgtaatcagtgtgttcgccaattacattgattcgaccaggtgagaagaagacatccttagcttcaccattaaaaacatcttgatattctttcagtaattcttgcttatccatctctagctacctccataaacggttagtaaacttttactaaacattagcttacgctcaccttgacaatttgtcaataagcgctttcattattatttttaaaggatttgtaggttttttaacaatccttatttagcaactgtttgcgccattttttatgctaaaataaattttacttaacaaaagaatctgagaaaggatggccgtctatgaaaaaaattctcccagatcagttaaaaaaacagactctgctgctcggtcgctggaccattaaacagctgcatgggaaaagcgtcttatacacgaccaatcttggcagtctgatcaaattccatctgcaagccagtccagttttgagaatcgaggccttagataacggcaatccgcaaatgccgccacaatactgggccgtgcgagtcaatcatggaaattggcagcgctggtcgacccgcaatgctccttttgagctgtcgctgcctgataatgctgaagttgagatcatcgcggctggcaataccgaccttgatgatgtctggcttggcaatcagggactggctgtggccgcgatttcgattgctgatcaagccgtcatgaccccgcctaagccgcaaaaacgcgtaactgtcattggcgattcaattacggctggctgttgggtaaatggcaaacggcccagcaccgactatcgcccagaaagctgctatatcggtcttgttagtgacgccttgggaatcgatgtcgatcggatcgcctattcagcaggcggcgttttaagagccgcggtaggcaacgtccccccggccgcccagttcttgagccatctggacgcccaaacgccatggtaccccagcgtcatgcctaaactggttttgatcaatctgggcgtcaatgatcggcgttttgccagccagcagtttcaaaaagcctactcagcgtttgtcaaacaggtaaaagccgcctatccaaacgttccactggccttaatggtgccttttgctcagacctatgccgatatcattgaagaaaccgctttggaatgtcatactgaattcgttcctaccaaaaactggtgtcagtcatttactgatggtctgcaccccgatcagcaaggttctttacagattgcccagcatttaacgccggttttggcagagctgctgaaccaaaaccggcaatagcatctgggcacttcagcacgcttctgccaagccaaacaaaggagagattttcatgccaattcctactcgtcggctgccaatcaatggcggttacaactatcgcgatcttggcggctatccaacgcttgacggccataccatcaagtggcgccgactgctgcggtctggcagtctgcaccgcctgaccagtcaggatctgcaatacttttctgatatgaagctggctaaagacattgatctgcgctcaccgcgagaaaccaaaaaagagcctgaccaagtcccaggtgccactgaatacatcgccaatccaatcttttcaaccgacgaaaccagagcctcgcagccaatctcatcttttagtgatgaattgaatgctgatccgaaccgtggccgccagcatatgcgcaccgtctatcatgaaatggtcgctgagcctggtccacaacaggcctaccgcgattttttccaacagctgctaagcgcgccggctgatcgccccgttctgtttcactgtactgctggcaaggatcgaaccggtattggcgcctatctgctattaaacgccttagaagtgcagcccgatgtcatcatcaaagactacctgctgaccaatgagctcgttaaagacgttcagcaagacatcaagcagaaactgactgctggtcatttttcgtcaaactacatccaaaattcgcttgatatggctagcgttaaacgggaatacctgcagacggcccaggatgccattcaaaaaatcagtggctccgttgaccagtatcttaaagaagtcatgcagctttctgattctgatctgcaggcattgcgtcataagtaccgcgactaatggtataataaaccaaaagcaagcgttttctggaaactaacgctgatggaggtgtcaatatggagacaagaatcttctttaatcccggcgactcgattgccaatattcatgactataacgaagccgtacgcaagggacagatttttaaaaaagagcgtaaaatcgacgacctggtcattgccaaaggtcctgatgatgaagaatatgccatcttttatgccaaggacgccttgccggccgatcacgccaaagcccagccttatgacgtcaaagagcatctctagccaaacaaaaaacgccgagtcagcaagctgattcgacgttttttattgaatagtcacgattaataatgagtgccccgttgcttggcaaggtccctcgtcattatttaaggtcatgtcaagatatggtcgactccaacagcttagcggccgccgacaatctgcgctgcctgttgttctaagcgcagcaccaattcatcggcatcagccttaaaatcttcaataaagctggcatgaatcggtgaggctgaaccaactttttcacccatgatatcggttaccactagatcttcgcctacccaggcaacgtcgtcataatgaccttccaaggcttcgtccataaattcctgcaaggtatcgcgcacggcatccttaataacgtcatccatttccaaatgctggccatgaacttgatactgtgcgatcttcattgcaacttcttccatattttctggaatttgaatactcataaaaatcccctcggtttctagtgtttgcgacgacttttctgccgacgattccgaaatgaaatgccaactggcgggtgctttttgcccttaacagttttagccgctggcgtttgggaagccgttcttttttcagcaacgcgcttagccatctcgttgttttgttcacgagcatcatagtcacgccatggatgcatgatcgtcccaacaaaactggtcaaaagcgtccgatgggttgccatccatttttgcgcagtttcacgatcattaatatcaacgccttctgcctgagccagtgacaataccagctgcgtcaaacgatccttgcgatcaagcgaggccagtgcttcttgagctggctgcatgtgcaacagcgtccgcttagcgatggcatattgatcatcgttaagatcgccttgctgatgcagatagtcaaaaaaggcatcaaataaagccacgatcttgatgatttgatacggcttgatgtgcgggtccaatggcatcgtcatccccagcacctgttgcagcgcctcaaaagtccagccatcaggccactggtgcgcttcttggttcatcagagtcaaaaactcatcgatcaggtactgctcatcagtttcatcaaggccctcgatatttttaagcagggcagctttaggggccacagcgaccattgttttttgccaggtcaggtagttttctggcgtccattctcgcggtgcctttccagcagctggttggtcggcagccgctttccagtttgcctgcatggtcttgcggtgctcatccattacctgagccagctctttaacatgctcaacttttaaaaacttttgataggcctttaaaactggaatggtcgaaatcacctgacgatatggcgcctgcccatcctgatagagctcgtgatccaaaacggctgccaatgccgcaccagtccagtgacaatcatcaagctgatgacgatctgccatcaattgattgacctgctgcaagattctttgtgcatgttcctgctgattttttgacaaccgatcaaacgccgcgtcgactaagaatgcttgtacgtgggcttgattctgttgatactccattaaaactttcactcctgttgcttcaacttgaatttcaataactatcataacataattacttagtacacacgttcgcttacgatctataaaattggaggaatttaaatgccacccaaaaaaatcaaagtccctgacttctattatcaagaaatgacggcagccggctaccggcaaattgaagaccagattgaggccctcaagaaacaacggcctgaaaagattgcacggctcaaggctgctcgagctttaggcgatctttccgaaaatactgaatacagtactgccaaacgggatctaagacatttggaaagccgactgcgctatctgaacaaacagctgacctatgccaaaatcatcacaccgcaggatactggtaaagttggcatggggtccacggttgagctgcagtatgacgacgacgatgaaactgagacctatacgctggttggtcgtcaagaagccgatattctgcaaggcaagctggcatttgactcgccactgggcaaagcaattaccgggctcagcgcgggagattctgccttggttgccgcgccgcagggagaatatcaggttaaggtcgtttccgtcagggtaaatcaagatgaagtcggttaagccaaaccagccagactgaccaaatccaaaaattcttcaatcggcataaaggtttaaacgatggcttgaattgcgctggtcgcttgatcaatttgaattcttgctgcttgcgaattgattttgataccgttatactaaatgacgttgcaggttggcagcacaagatattgtgggttttccacagatatcgccacttatccacaatatcctgtggataagtgacgaactgagtctgaattgtccgctcagattcagtctgcctaacttacaccatctgatttctactctgtttcaaaagacccctggcttgtccaaccaggggtctttttaaagtgctttttgataggcagcctcagttttaggatcaaaagccaccataatgacttcttgaacccagcggctggctgtcagaaattcacgaatcgttttaatcgcaatgactgccgcctgctcaacgggaaagccatagacacccgtgctgattgacggaaaggcgaccgtctggcaatgatagtgctccgccagctgcagactattgcggtatgagtttttcaatagatcagcctcaccatgctcaccaccacgccaaatcggcccaggcgtatggataatgtatttagccggcaactgaaaacctggcgttatccgggcctcccccgttggacagccatgaaatttttcacaggctgcatagagagctggaccagccgcccgatgaatagcgccatcaacaccgccaccacccatcagtgtcgtattagcagcattaatgatggcgtcaacctgatatttggtaatatcaccgcgctctactttaatcgttttagccattttatccgcctttcaaagctgctaccagatattgacccgcttttctggagccaggtacatgccatcgcctgcttgaacgttaaaggcttggtagaactcagcttggttttgcgcttgaacgttggcacgcagcttgtttggcgaatgaacgtcaattgaaagcagcagctgcatgtattggtcggttgccttcattcgccagattcgggcccagttgatgaagaactgccgagcatcaaagctatcttcttctttagcagcggccagggcacagctcaagccacccgcatcagcaatattttccgaaacagtcagcttgccgtttaccttttgcccagcaaacggcaggccatcaaactcagcaatcattttttgcgccagctgtttaaagtgcgccaaatcggcttccgtccaccaattattcagattgccatattcatcaaacaaagccccgttattgtcaaaggcatgcgagatctcatgtgcaattaccgcgccgatcccgccatagttttcgctgctggtctgctttaagctgtagaatggcgcctgcagaatcgccgctgggaaaacgataatattcttaaacgggtggtagtacgcgttaaccgtagcggcgctcatttcccaacgcaggcggtcaaccggttgattccaacgactaaacatttccttggcggccgttttgcccaattgaatcatgttttccaaaagcgtggcctgctcgtcaacctttaattgatcataaagcgctggaatctgatctggatagccgacctgaattcccagccgatcaagcttaagaattgccttggcacgcgttttttcgccaagccagtcgttttgggccagtcgctgctgatagattttcaccatctgttcaaccatatgatgaacgtcagccttggcttgaggtccaaaataagttttgccgtaatagtcgccaactacctgatcaaacgtgccccgcgccaggcgataggcaaatttacgctggtcggcaggctgcttggctcctgaaagtgctcggctaaagcgaccgctgatctcacgcagctcatcagtcaaaaggccagccattgaactgatttcattaaccaaaagccagctcttgaaccattcaaaatgaccagccaggatttcatcaagcgcggccagatatcgcggctccattacgataacctgttctggcttggcgccaatcaattcctcaactaccgcggccagattcaattgactgatatgaccagcaaattccgccagcgtttgtggattgtacatcttgctgtagtcagctaattcttccgcgctcttgacatggggaaccagcagtgcatcaaaccgcttggcttcttcaatcagcttttgagccgctgccgtttcatagcccagcttagccagcagcgtggtcatcatcgccgtccaaagctgcattaattgtgggccttgtggatttttaggatcatagtagttcttttctggcaaaatcaaactgggagcgccggcaaacaaagcataaacctgtgcatttttcatatcagcatcaatatcaaaagtcacgggagaagccacgccattaagcatcaactcggcccagtgagcttgatagtcagcataactctgcagattctcaattggcagcagggccttttttaatggggccgtgccttcttgatcacggcgcttaaaatccttggctaagccatacagtttgatcatctcgttaaagcgagcatccgaactgtttttttggttgttcaaaaacgcatcaaaatcatccatcagcgtcttgtcaatatcatcaaccaaactgttaaatccgccagttgctggccgatctgcaggaatcttggctgtttttagccattcgccattgacggcttcataaaggtcatctttagcctttgccaaatcaatcgtcatcatatcactccatccatcgtttttatgaaaacaatcataacaatttttaagttccacgtgaaacaaaatcgccaggcagaattctggctactcaaatggggccagcagcgcattgcgggccgttggcgagaaccactcagcatgcagcgccaatagatctttcacctgtccgtagtcatctaattgccaccttcccttaaccatgccggcttgctgcagtgcccgtgccatttcaatgtcaggtgcctgcagcatttctcgaaacaggccgccttcattgggatcccagtcatcatgaagcattgctgctgcatgctggaaagtttgatcatgtctcatcgctgccattagatagcttggcgaaagcaatggatactcgttcatctttaaattcctccaatcttaacggaacgcatcaccggactctttaccgataattcgctttccgtactcagcagccacaagacgttgcgatagccatgcactgcaagctcgctttcgccccagccatccgttagaatcacaaccgttgcctgctgtcgactgacgtgctgtttttgcagccagtcaaaaacagcctgaaaacaagtcccgccaccgccagttcgctggtatgacacgtttttcccgggctgcagacgggttgcctgctcactgtgcaccttggcatcaaaaggaatgatctcaacttgcgaattcagctgaacagtcaaatactgcagttcggttaatacacccgcaatttcttgatcgctcattgaaccagaattatcaacaaatgcatagatatcagcatttaagcgatcaatctgtcctggcagctccattcttagtggctgacgacgattaaacctggcgcgggtatcctgtttgccgcttgggatcctacccagcagccgcaccaaaagctgacgccagtttaacggctcaggattgcttagacgctcaagctcttcttgaatctcacccggtaacaggccacgattcttctgactgagacttttccatgctttagacagcagcgcctttaatcgcgccttttgcaggtctggattgtcaaccgactgatctgtctgccagccttggtgacttgcagcagctttttgcgctttgccagcctttttttcactgcgctgcggtttgctttgatcattgtcatccagctttccccagactttttcaatccgtccctgctcagccggcgtcagatgcgtcaagatccgcagatagtacctggaatcacgatgcgctgctaaaggccgctgcagcagtttttccaggtcagccagcgtcatggttccctggggcggcgtttttaaatattgattgacggcaatatccgttgctaaggccactctacgcggatgcgtactgctgacgtatcgtaatgggtgctgccagattgcatgcagaacctcatgctgcagtctgacgtctaattgatcggctgtcagctcattcaactggcggtcattatattccaagaccagctgattatgctgccatgccaggccaattggtgcatccagatcctgatttctggtccgcggcatctcaagcagcacctcaccgcttagccgctgcgttgtcaacagactgacgacggccttagtcagccgctgtcttgccgtttcattcaaatcagtcatctaatcaccagcttcaaccgtaatccgttccaagagccgatacagctgttcttggtcgccgccaggattttcattggcagcctgatagagtgccttaatctgttcagcagcaactgcttgttcccccagatcctgaactacggcaaaccggccatcaggactcagcgcgtacagacagttcttaaactgagccggatactgcgtgattggatacttggtcaattccttaacccactgtcttactgctgttaatcgatccacttcggcaacaaactgcagctgcgttgaatggtcgatcaaatcagcaaccgatagctgctgaccatgctgtgcaacaaatttggcaaaagcagccccgacttccgatcccagatcaccactgaacagatcagccgctagcgttgtctgcgtttcctcatctaattgttccagctgccgtagattgccagaaacccgggcccaggctcgcggtgttggataaagatccttttcatgatcggctggcgccaaaagattaggatgcagccgaatatacttggcaaccaattcatgaatccgcggctgaccatctgattgaagctgccgtgcccacaaaagccagtcatcaaccgcggctttcatgaccaagcgcacggttcggtcgcgaatggcagcatccccagctgttacgccatagtcgctgtcagcaaaattttccatcgtactgtccggattttcggcaatgacgatatgtacctgatccggcaatttcagcgagttgacctgccgctgcagaaccaggttcatcaattcgctttgcacggcctgcgtaccacgattaaactcatccaaaaaccagataatcggctggtcagggtgtgcttcagcctgcttgacgattgccgccagcgtctctgaatagccaaactgaacattagccagcgtgccataatgctgagtggtcacaaatgagcgctccgtcaacggcggcaccggaattgccaggtcccctttttccgatagactgacaaccgtcgtataaagcttcgcccccattgacgcggcaatttcctgaaccagcgccgacttgccgatgccggcctcaccaacgatactgggcacgttgccagccttgatcaccaatggtactgcaatcttcatttgttgatagctaagcgacattcaaatcatctccaaccatgcgttaaatcatctgcatcacggcgtttcatctttgagacatatggattgccggccacgataaagcggtagtctttcaaggcatcctttccttgcgcattaaccccaattcgtggtccggcaatgatttttacaggaatccgccgttcagtgcgtaagtcaacctgcagcgcggcatgctccatcggctgaccatccattgaccgcgactgcacgccaagcgcctgcatcagcttgcctggtccattggttaagttaaagccatcctggccacgattctcgatcatctgctcaatgcccaacgccggctccagcgcgcgaatcaagatgccctgcggctcttctgggtcttgaactacaatatcgacacagtaatgtgagcgaatctgataaatataaagattaccaggcatgccatagagcgactctgaatagtcagttcgccgtcccccaaaagcatgcgatgctgaatcctgctcgccgacataagcttcggtttcaacgatccagccgccaacatcgcctttgcgaccatggaaaaccaaaagccgtcctaaaaggtccttggcgatctgtggggttgggcgagccgtaaaaaatttttgatattctgaaagcattcgaaaccatccttttgaaaagtgctttaatggtcttatgatttatttttccaagaggtgacaggaattgaaattaaaactagaacgcatctatgataagcccgctgatcttgatggctggcgcattctgatcgatcggcgctggccccgcggcatctctaaggttaacgcccacctggatgaatgggctaaagaagccgcccccagcgaagagctgcgcaaatggttcaatcatgagcccgctagatttgccgaattcaaggaacgctacttgcaggagctagccagcaatcctgcttatttagacttattggcaagcgtcaaaaaacatctgcagaccgataacgtgattctgctttatggcgcaaaagatcggcagcataaccaaggaatcatcttagccgagcttatcaaacaagagctgaatttataactattttaacgctgtttaccataaaaggcgcaatcgttgccattacgattgcgccttgtcttatgactgctgatccaaaatagctagtcccttggccagcgttgctgaatcagcatccactgaaaggaatcgtcccagcggcacctcgctgtgacgatccttgaatgccatcggttcgcttttaacgatcatgaccatcaagccgttttccgtcagcatcaattgaccaatccgccgaaatcttcctttggtgtgtttccccgtccgccaggtatgcagcctgatctgaccattggcatcataatgcagctgatagccgccattgccatcgtcttcgaccggcagccccgtatagcgactgaccggatattgatcttttttgctcatcaaattccctctacttttctagctgtggacgctgactggtcagttctgccaaacgcttggtcaaacgatacaattcaccggactgcagcgcctgagcccaggttccttcctcaacttcttcccagtcaacgattaaagaaatcatcgcaccaatcaagctgacatcatctgactttaagacttgcgcaatggttgcttcaccaacgcgtggcttaattcgattagcctttaaagtcttgcggtaatgggggtcatattccgcactggcacggaacttgcgcgtaaattccagcatcggtttgtcatacagcggatagccaacacgtacgatgccatcttctggattgctgatggtccagccaattttacgatcaatcatgcttttgaaatatggcaggtatgcatttaaatccataggctcaccttcttttgtctaagtatgtttagtgtaccgcttttaggttggttcaataaagtggtaggctaaaagaaaaccaattttggaggtagtttttatggaaaaaccaatcgttaccgcagcccagatgaaacgctgcgacagctacaccatcaatcacatcggcattccttcattagttttgatggaacgagctgcgctggccgttcgcgacgagattctcaatgccctgccgatctatttaagccatgttgtcgttgtcgccggcagcggcaataacggcggcgatggtctggccgtcgcccgcttgctgaagattgccggtgcccgagtgacgattctcaacgttggcaatcctgatcatgcctcccaagagcaccagattcaagcccatatctgccaatactatcgcatccctcaaaccagcgacttgaacattttggatgaggcctcactgatcgtggatgcaatctttggtattggcattgatcggccggttgctggacactacgtcgacgttatcaaagctatgaatgatacaaaggcttttcgcgtcgccgttgatatgccttctggaatcaatactgatactggtgcggtcatgggaattgccgtcaaagcccatctaaccgttacgtttgccttcaacaaaatcgggcttacccaaaacgaaggtcgccagcatgccggtcgcgtcgtcattgccgatgatatgggaacttattggattgatgagcatgcgctggctgataatcaggattagttttaatcgcggccaaggtcattaaccgcgcttctttacccaaataaaaaaacgattcgccgttttgacgaatcgttttttattagttaggcccgtgacttgtagctgccatccatcgtgttgacgatgatttggtcaccgttcttgatgaaggctggcacgttgacaaccagacccgtgctcatcgtagcaggcttgccaccaccatcaatcgttgcacccttgatcattggttccgtgtgttcaaccgtcagaacgaccgtcgttggcagttcaataccaaccagttcgctgccaacaaagtccatttgcacttgcatgttttcaaccaagtacttcttttcttcagtcagctgttcatcactgatttcgtattgttcgtaggtttccatgtccatgaagaccgccgtgttgccttcatcgtacaggtattgagcattcttcttgtccacgttgacttgttcaaccttttcggaaggacgcatcgtcgtgtgcacaatggagccagtccgaacgtcttggatgtccatttgcatcaacgtgttacccttgcctggcttgtggtggttgatttgcaaaactttcagcagcttgccgccacgttcaaaaaccatgccctttttcaaatcaatcgtttgaatcattgtactaagtactccttttattaattactgaacttggccacgcgtaccgtgagcttttgatcgttcaaatcttcgcgatcgaggcgtcgttcatcgccttttatcgtgtgctcgccattgcactgtcgcaattttagcatccaccttttactatatcatgtaatcagttgatttgccttgacaaacccacttatttatttactttttttgatcaaccatgttggcagccggaattctgatcagcgtatgcgtatcagccagcttgccgcagcgaacacccatcccgtttaagaccgtattgcgatatttgatcgtcattacggcaacgaaagcatgacccgtttttgagtcataggacttcagctttttcatattccaaggatagccggctgcctgaccagtaaccaggcgatcactgtcaacgatcgtggtgccccgcgcgtcagtcgtcattttggcattatccgtccagtaggtgtaggaaacgatcggccgcgtaccaccctgagcatgtttggcaatcacatagtagtaatcattgtcttgactgttcagctgcaatgcctcatattcagtcgttatcttaacggcttgggtatcgtcataggaaacgcgccggaaaaacgacagatatgccattccgcccagccatccaatcgccaagacgaccagcactacataacgtgcaaacaattttttgtcaaaacggcgcttcgtcttggcaatcagcatcagttgcttgacgcggatgtagtgagtaacccagatcataaaaacaatggccgcgatccaaagcagccatcccaaccagttccaattcataattttttgctcctaaatcaatgaccgtattcgtgcgtcagacaacataaaaatctatacataaattgtaacacatcgcggcaattgttccttatttctcatgccgttattaataaaataagttacaatagaagtataaataaaaacgctttcacccataaaagtggtgatgtggctagtatagttaacatttgattagttattgtctctttatatttttgcaattatccatgatgtgtttgcattccgatcgctaagggggtaatgattatggaaatggacggatacaaaaagcgttttgactgggccagtttgattttgggaatcgtattggtggtactgggctgcgtttcaatcatgcacccagacaaatcgctgcacctgctctgtatcttagttggcgttggtttactgctgttagggatctatgagctttgggcccgcagcaagatgcaggaatggctcggctatcgttctggctggctgctcggtaccggtattctagacattgttttggggatcgtctttttggtatatcaaaactttggtacaaccgtaattgccgtcatcttcgcactctggttcattatcagctcagccaatgaattaacgattgccggtttcttccatcagctaaacgttggttactactggcttttgttcattctcgacattctgggactgatcatcggcgtagttctgctcttctcgccgatgctttcggcaatcaccatggtttggctgatttctttctacttgatcgtgattggaatcgtaaagattattcaagccttctagcatctacgaaaagaaaagtttacaataaatattgtaatatcgtacgtatgcagccatcgtcattatgaatgatgaccaggaagggagaaagttttaatgagcgaaccagtcaacagtcttgcagcagaaatcatcgaattcgaacgggtccatgcaatgaccgacaaccaagtcgcatttggcagccaattgtcggttgagcgcgtgcatgatatcaagtcacaaagcgatctcgctactgatgaggaagccagtctcttgcggcgcttcatgcaggccaagcactagcaaacaaaaaacgcgtcttagcaggcgcgttttttatttgcgtataaattatcaaattcttcattgaacggccgtaaaacgtcaaaatcgagcaattacgccttgattttcgtttattggtcttctggatagtgaaaagccaccgctaatggcgcaggcatcagcttggcatctggattcttgatgcgttccatcaatgtatcgatcagcaggtccgccaactcggcagtcggctgctgaaccgttggcaattctggcgtcagctcgcaaatcatcttggagccatcataccctgtaacgtggaagttctcattgattcgtttgccggctcgtaccgccaggcgcatgatcttcaaggcatcaacgtcattggttgccatcacgccatcatattctccaggaaatgtcgtttcaagattcgttttcttggcatccagtggcacatactcaatttggtgggcagaaaaacagtcaattgccccttggactcgattaagcgttggcgagaccgaggtatcctcatcaatcagaattgctggatggctgacgtttttagcaatcaggtactcagcagccatctttccgccacgatagctgtcagccgacacgattggaatattgtcagccagatagcggtcaaacgatacgattggggccttgattcgctgatattcctcaattccaagattatgcgagcctgaaataatgccatcgacttggttcgccatcagcatcgccaggtagtcatgctcgatatctggattttgggctgatgaggcaataatcgttttatagcccttagcaaacagacgatattccagatcatttaccaattccgcatagaacgggttaataatgttcgggaagatcaggccgataaatttggatggcttcccctgcatcgctcgcgccagagcattgggctgatagttcagctcacgcattgcctcatgcaccttgttaatggttttttcgcttagcgatccatagttgttgatgacgcgggaaaccgtcgtgactgaaacgcccgccagcttggcgacatcttttagtttagctaccatattcttgacctcgttgaaatgattgtcacactattatagaccaatttacgacaattcgtcatttttaaaataaaaaatcgcatcagctttaagctcatgcgatttttgtgaactattcggcagatcagctgaaacagacctttaattagttttgttccatgaccttttcgccattagccgtaatcgtaaacgtcttgttggctgcgtcggcttccagaactgctacgttttggccttccttgtccttacgagtaatcgtaatcgtcgtttcggtcggtgtttgaatgtcgatcgaaccatccagatcaaaggcagcaaattcattgcgccagctcagtagcttcagcaggttggcaacgactggacgctgaacttccttggccacttcttctttagtgtagtagtgacggttgatgttccggccttccttagtcttttccaacagttccaggtcattggagccagccaacagaccaacgtagtaaaccattgggatacctggggcaaatacttggaaggcacgtgccagcaggtatgcacggtcgtcatcgcccaatgcggagtagtacgttgagttgatctggtagatgtccaggttgttgtaggcagctgaagagtacttgcgcttaacgttggcaccaaccttgtaaagctcgttggaagcgtagtcgatttcttcatcagtcaagatgtcgcgcgcgtcaacgaccccgatcccatcatgagtgtccagcgtcgtgaactgcttcattggactcatcttcagccacttagccaggcggttggtcttgccagagtacagcgtgtacagcgtcgtcattggcagagcgaagtcatatacaaagtagccgtgttgagagatcttttcaggaatcgtgtagtgttcgtgaatttctggcagaatttctgcattgtaaggagccaggatctcacgtacttcattcaacagatcccagatttctggttcaacgaagaagtcattggtaccgatcttcttaacggcgtaggcaaaggcgtccagacgaatcaggtcagccccatgcttaaccatgtcagtcagcgtctgcttgaagaattcttgggctaccttactcttaacgttgatgtcgatctgttcttcaccaaacgtgttccacaggtgttcaacggaaccatcgtcaaacttgatttcctgcattggtgccttgtccttacgcttgtagatcaagtcaacgtcttccttggtaggacgatctggaccagcagctgcccagaacttttcccaacgaatgaagaagtcgttgtacttggagtcgtcatggttcttcttgaagtcttggtacataaccgacttcttggaaatgtggttgatcatgaagtcaaacatcaggtagtattcttcacccaatgcttcaacgtcagcccagttaccaaaagctggatcaacaaccgtgtagtcataaggtgcaaagccacggtcaccagttgatgggaagaatggcagcaagtgaacgcccccgattgctgaaccgatgtattcgttcaagacttcatgcgtttccttgatgtttttagccagcgagtcagagtaggtgatcagcatggctttgtttttaattggcatgtttaatcctccaaaaatgtaaattagtttttcttagcttgacgacgagtagcaataaagataaccaaggcaatcaccagcaggccgattccgtatggtacgaaaggcgctgccaggctcaaaccagcttgcggctgtcccataatgtgattggtccattcagcaatcgttggtgagaagaaggccccaaagttaaaaccgatcagaatcatcgaggtaatcagcggttgccgattagcaggcgcaagatcaggcagcaggttaaaaatcaaaggagagaccagctgtaatggaaacccaatcaaaagcagaccaatgaccagcatcacgaaactgcggtgactggcaccataggcaaacaagaagttcgagatggccatcagaatcagaccaaagtaaaccgtcccgaatcccatgaccttcttgattgagccgtagaacaaaccacccagcgttgctccaatcagcatcaacgacaagaagttggaagatccagtgtagctggcacctttaatggcgaccgctaccccagagaaacggttttccatgccgacatagtcaacaaccagcaggaaggcaaataagatgagcagatagacgactggactgatcttgcccttgtcttcgccttcaacggcttctttcaattctgcttcctgtttttcttccttttcctcagctgcttctaccttgctgtcgtctggaacgcgggcagcaaagaaaagcagaaccaagaaggccagtgcgtagaccaagaatgactgccgccagccaaatgagctcagcagcaggccggcaataaacagggtcgtggcttgaccgatctgttcggcagctgcccgccagcccagcatttgagctcgctcattgccttcataccaaactgagatcattgaaatggcctgcgagttatatagaccataaccagcccctaagaccaatcgtgatgccaagacgatgccatagttgctgacaaacattggtaccagcccagccaggccaacgatgaaaacccccagcatgatgatcttcttgtcagaaatgtggaaccaagactgcagcagcggtgaaagcaccacaaagatcataacggcaaaagatggtgtcgtaaccaggtattcagactgcgtttgcgtgatatgcaaagccgccttcaactgtggcagcgatccctgaatcgcgtacgcactggtcaccatgaaagaaaccgacagaaaagccagtttcgtcacaatcgactttttgttgtccatgttgttttcccctaaaagttgtatttaacgttctcaacagacattttgataaacgtttatcaatttcatcaagaattattttaacttgttttagtttcttttgtcaatcgtttatcaaaaagatttgaatcgcttccgcggctcttaaatcttattttcacacttttaatagtcaaaaagtaattctttgtttaatagtgcgatcagtgaagaaatttctcaagcataaaagtctattaatttatagtagattttggtcgttttcatttaaaaatcaattgacgtaacccgttgtgaatgctactttttaattagctgctattcttaacgaattattaaaaaatataaattctaaatatatagccgacttaaccactgatcagctagtttttaaaggagtatgctcacgtatgaaaaatccaatcatcgacgaaacgcatcagcattataagatgtacaagagcggccggcaatgggtctttgccagcatcgccgctttaaccatgctgacggcggccggctcagttgcccacgccgatcagactgatcaaaccactcatcagattacggtctctggcagtgccaatggctcggatgccagtcaagattctgacagcagttctgcagctgacagctcagcagccagtcagaccagcgataccgcatccagcgccagccaggccagtgccgaaagtaccgctagtgctcaagcgacttctgaaagttctgcttcagctgccagcgccgttgccagcaccgccattcaagccagctcagctgctgaatcagctacggctgctgcatccagcgtcagcgctgctagttccagcagtgcggttcaaagcttggctgccactcagactagtgatgctgcatccagtgccagccaagcagcagccgcaactacgactgtagcggctgccaataccgacactgccagcaatcaggtcgacttgagctcgctttacttcagcagcaatgccaagtcgcaaaacttcatcgaaagcgtagcgcaaggtgccatcaacggctggaccaagtatggcgttctgccttcagttaccgttgcccaggctatcttggaaagcggctggggacaatcagcactttccactcaagctcacaacctgtttgggatcaagggcagctataacggtcagtatgttacgatgcagacgcgggaagtctacaatggtcaaagctactacatctatgacaacttccgtaaatacgccaacaactctgaatccgttgaagatcacggcaacttcctttacagcaacagccgctacgccaatctgttgggcgatcagtcctatgccagcgtagcgcgcaagctgcaggcagacggctatgctaccgatccatcatatgcctcatctttgatcaagctggtagagatgtacaatctgactcagcttgacaacatcgccttttctggcaagcagcccgttatcaacaacaagaatgactacaactattccaacagtggcaatgccgacagctccaacggctactacaccgttcaaagcggcgacacgctgtctggaattgccttgaagttctccacgacttccagcaagctggcacagttgaacagcatttctaatccgaacctgatttatgtcggacagcgcctgctggtcaaccagagcagcaactcaaactccagctcctctggtcagtccagttctactacgacgaatacggaagcatcagctgccagctacaccgttaaatcaggcgacacgctgtctggaattgccagccagtataatacgacggttaaccagatcgtttcgcttaaccagctgagcaatccaaatctgatctatgttggtcaggtcttgaagcttaaaaacagccagacaaccaactcgtcatcgtcatcatcatcgtcgactgctgcaacgactgccggtacgtataccgttaaggctggcgatacgctgtctgccattgcatctcgctacagtacctccagcagcacgctggcttcactgaactcattgagcaatcccaacttgatttatgtcggtcaagtccttaaagtcagctcaaatgcctcgaccagcagctcagccagttcttcagcaaacagtactgtaacgactgccgcttcctacacggtcaagtctggcgacacattgtctgccatcgctgccaaatacggaacgacctatcaggcactggcctcaacaaacagcatcagcaacccgaatgacatttacgtgggtcaggtaatcaaggttagcgcaacggcaactgccgccagttctcaagctgtttcttcaatcaacagcaacggcagctacacggtcaagtctggcgacactctttacggcatcgctttggctaatggcttaaactggcagacgctggccaagcaaaacggcatcagcgatccaaacgtcattttcgttggtcagaagctgagcctgtaaattcatcgtatttgaagcttaacagccagtcggatttgtttccgtctggctgttttaccaaaatcatgtctaacgtttgacacgccgtttgcgctgcttgaattttaaatggcagcgacctattattgaaagcataacatttagtacatcgttaccaagaaagtaagtggtgttgtgatcaattaccgttcaatggaaatcgaagacctggatgaaatcagccgtttgttcaagctcttaggacatcccaaacgactgcagctgctgtatctgctgattcagcattcaatgagtgtttccgaaatcagcaaagccttaaactgggaacagtcagctgtttctcatcaactgcagctgctgcgcaaatatgggctggttaagcagattcggcatggcaagaccatcatctatcatttacaggatcctaaagtcatgactttgattgccgatgtcgtcagtcatgctgaaaaaatcgttaaatcatcataaaaaaacgcactggaaaaaatccagtgcgtttttttagtcttcggtcatgtgctctttaatcaaacgattgattgcctgagcatcctcattatttttgctgatagtcaaaagcgtatcattaccggcaagcgtaccaacgacttccggaagctgcgcattatcgaacagacccgccagtacggttgcataattggagttcaatgtcgtttgaataacattgatgaattgaacgttggtgaccttctcaacgttgtgactgatgccatcaaacagccgctgatattcatccgcatgggtatgcaggattgaatagtaggtatgtccatgctgatcactaaccttgacgatgttcagagcgtgaatatcgcgagaaatcgtggcttgggtagcatcaatgccatgctcagccaacattgccaacaaatcatgctgcgtgttgatccgctgctgcgttaccagttcttgaatcaattgacgtctttctttacgatccattgtacccctccaacatgcataataattcactggttttataatactatgaattgaaagtacttaaaagccagtctgccgtttttatccggctttttttcagctggtgcttgaatattatgcaatcaatcagctgccagcgccttgattggatttaatctagcggcacgccgagctggcaatagagccgccagaaaagcaatcagcaaggcgctgaccaaagcaaacaagacgttgcccagtgaaatctgaacgatatcgtacttgatcaagtggtacagctcatgattcaagatcagctgcgcgccatacgccaggaccaaagccaaaattgctgcgaaaaagccgataaacagtgattcagcggtaaacagacgcctaatgtccaccttgcgttcacccaatgcccgcagcacgccgatctccttggttcgttctgaaaccgacatgtacatggttacaataatcatcaaagccgataccaataaggaaatcccggcaatcgctgccaagacaatcgttgccagctgaacgtaggtattgaccgtcttaagcatcgagccaaccgtaattgcgcctaaaattcgcttgttggtctttatatcccgcagattattgatcttagtcgccgtcttatcaacccggtccagcgatttcacgctgacggcagcatagttgggctgcgttgacgcgccgctttcactgagcatgctcttgattgtctgatagctcatcgccgtggttgccgaaactcccgaagtaaagccgaccaccttcacggcccgcgttgactgcgttggttgaccatcagcattgacccagttaaacgtgatcgtcacggtttgattcaacaagcgctgataatgttttgcgccggccagctgaatcgcctgctgcttatttaaaacaatctgattggcatgcggtacgtggccttttttgattgagttcgtggtataggccttgctccagctgttaaggttggtaccgctttgcaccttgtcttgatagtttatcttataagccgcaatcgagtaccccggctgaacctttgctacgtcagcaatatttttcaagcggttcaagtcttgatttttcaaaaacattgcctgtggattggctgccatgttctgcattgaagcctgcagctgaccctgattcatctttttgccgttggtattgcgcagaaccgtaataacctgtggattagccagcgaattgatctgattttcaatgtagccgttgacgccattgcccagaccactgaacagcagcacggcaaacaaaccaatcgccgttcccagcataatcagcgaattgcgccaaaaattatatttaaaatgcttaaaagccgtcttaaagctggccaatgccggtaacggacgcgaattaagctgcgttgggtcctgcggcagatcataggctggccgcaagcgctgatcgccatcaataacgccatctgccaaatgaacgatccgtgtcccatggttggcaacgtcttgagagtgggttaccgcgatcacgagcttgccgtctttagcaatgctgtccagcaattccaatacttcctgcgtattctgccgatccagggctccagtcggctcatcagcgataatgacctgcggatcgctggctaaggctcgggcaatggcaacgcgctgtttttgaccgccggatagctgatgcggatatttacgcagctgatctttcaggccaactttttctaacagcgatactgcacgctttttgcggtcttctgccgttaggtccgtcatatccaaagaaatcagtacgttttctaaaaccgtcagatgcgcgatcaggttataggcttggtagatatagccaatcgttgcccgccggtagttatccatctgtttttcctgtcgatgatccagcttttgaccatcaacaatgacttcaccatcaaattcacgatccagtccgccaatgatgttcatcagcgtcgatttgccgcccccagattctccaaggattgagacaaattctccccgttcaaattcaagattgatcccttttagaaccggaaactcttcttttcccaggaaatatgacttatagatatcatgaagctccaaatatgccataaaaaactccttacattctgctgtcttcaaaaactgtctctcaaattataaaagatccagtctattcgggcaattattcttgtcagcctgtaaagtcaaaagcgcattactccagtcatcgaccggtataatgcgctttaatataaaatcagcagttatctaagcattcaacggctgctcggtcatcttgccatccataatctgatagatgcgatcggcaaaatcctttaaacgcaaatcatgagtaacaacgaccactgccttgtcatactgctttgccatttctttcatcaagcgtcctacgaccttgacccgctcactatccaaggcggccgttggttcatcagccaggataattgccggatcggtatacagcgcacgggcaatggcgacccgctgattctgtccgcctgaaagctcatcggggaatttgttaaccagctgatcgatccccagttcctgcagcagtttctcaagccgatccggactaagatttcctttatgaacgcgatcaaccagggcaaactgatccgcaacgctcaggtaggaaagcagattataagactgcagtacaaacccgatttgatttaagcgaatctcgtctcgctgcttttcggaaaatcgattgatgtcttgaccatcaatcaacacctgcccgctggttggccgctgcaagccaccagcaatcgtcaaaaaagtactcttgcctgatccagagggccctaaaaccaggcttagttcgccactgtgcgccttgaagctgacgtctgaaagcacctgaaccttgctgatgcccgtcccatagtctttgttaatgttttttaattcaattgccgtcatcctgctcacctctatctcattgcatctaaggggtcaattcggctgatcatgcggaccggcagcaatgagccggcaacgcctaatacaaccaatgccaggctcaagatcccggtcagcggccaattgatcagcattggcaccgaacttggcattgctgccttggaaacgatcatcagcagcaatgcgtcaagcgtaccgctgaccatcaagatcactgcctgaccaatcgttgccccgatcagataagccgccggaattccctgtgctcttaagactgcatagttgggaatcttttgcatcgtcagaatatataggaaaacggtgataacgatcagcgagatcaccatcaaaaaggcgatcataaactcaaaggtcatattctgcgctgcatagccgggtagtttgtcaataaaggtaccgatggagtattgcttgagatttttgtttttgaccgtctgtttctgatcagaaaaaattccgctggccgcgaactgatcacccgttcctttaagcgtttgccaggttgtcaggctgccatagacgattgaggcgatattcagcttggcatctttggcaaaacccacgacccgatatttttgcgtgctgccgttaagcgtgatctgatcgcctaaccgatagcctttgctctttaatccttcatcgaggacgacctgatttttaccatgtggcttgtgaccgctgctgagcttcattttcttttggtagataaactgcgagctgtccagaccaacaaactgaatcgtctgcttgtcagtcgctcccttggctctttcaatcactgccggcgtctggccgactaatgcctggtgatcattcagctcaggcagatcctgcttggcgatcagcgactggctcaggctgatattagaatttttgtttaaaaccacgctcttggcgtcccatgaatcgattgcggccgtattttcattggccagccccagcatcatgcccatcagcataaacatcaaataaccgatcaagacgatcatgccaataatcagaccatatcttaacttctcatgacgaatttccttaacggccagaaacattttaatcaccttcgttttctaataagcgctgcagagcctgcaacaagcgctgtaaaatcattgtctgttcagcaggaaaattcagacactccttaattgcctcatgattgatcgtcatgatggtccactgcagagccggaatccttgaggccgggcgcagcggcagcattccttcattgcaccgcagatgaagcttgatcagatcataatagcggctgccatggactttttgtacgaattcacgcgtctgttcaaaataatcctgagcactcatcaactgatgcggcgtagttgccacgttttggtgaatatctcgcattgccttggcatacagatactgataggcatctcttaaatcggcaaaatacttatagaatgcaccacgagcaatttcagcctctttaacgatccgtgctacctgtgccgttgccagtgaatgctcactgaactcatgcagcagtgcctgctcaattttttgccgtttttcatgatttaaattttcaaaagtactggttggcatctgaatttccctccctatcgagtgacaccatgtcatctaccatgtgatcatactgcaatggtgacaccgtgtcaactttaagggataaaaaaacagccgtcattttgacgaccgttttgaacattttatctaaaggagttaggcttcttcgccaccaaccttgacaacggctttggaaaccttgcccaacttgccgctgacaaagtcttcaacttcattaaatgccagttcgtgagagaacagtggcaatggatcaaccttgccgctagccagcagggcaattgagtcttcaaacgtgtatgggttgatgaaggcaccttgaatcgtcagttgcttcttgaagacatcataagtgttgacggagaacttagcgtcagggttaccaacaccaaacatcagtacttgagcacccttagcagcggctgccagacattgttcctgcgtttgtggcagaccaacggcttcaacgacaatgtcaaacgcatcggctggaatttcttccttggtcgtgttgatcgtcttaacgccaaagtgttcacggttgttagtcagcttttcatcagagcggccagccagcgttacctcatgaataccacgcgccttcagaatctgtgcaaacagctgaccttcaaagccatcacccagaaccagtgctttttggtatgggtgcgtcgtcagcaggtcaacaccatgcattgcacaagaaattggttcaacaacggcagcggcctttaaagaaacgttgtcaggaacttggtagacaaccttggcaggagcagtaaagtattcctcaaaaccaccgtcacgggtaaccccaacggcatccaggtgttcacacagttctggacgtgaggtgcggcagtacttgcattgaccacagtagatgttagggtcaacggtcacacggtcgccaaccttgacattggtaacggcatccccaaccttggctacgacaccagagttttcgtgacccagtacgattggtggaacggctgaagcagagcctggcagaccagcgtacagtgccttgtcagtaccacagataccagcgtaggccgtgtgaatcaaaacttcatctggcttgatttcaggaacgtcatattcttgaacggcaagatctttaataccttgtaatacaagtgccttcatcgatttatacctctttctttgtgaaaacattaatttaaattttgccaatagtataatccagatctcaagtatgtgtcaaccggttatcatcttttttgataatcgtttgacattcagcaatcgtttaaccatatgataacgcttgattttcagtggttaatttttttgaagttttcgcgacaaaaaatcgtaagcatttcaatattaagcatatcaagactgctatcatttgattatcaatgtaaaaatgctgtaaaataccgttagataggcattcttacattgcaggattttaatttttatgttagcctaacaaaggtgttttattgcattaaacgttttttattgggtaatgcaaatttccaattaagaaaggtgggtttaccgtggataacaacacgaatgaccaacgccgcaagcacaaactgatcgagtatgctaacggcaaatcgcttgaagaaatcaacggcaccgttgaagttcctaaaggtaaaggtttctggaagacacttttagcttattccggacctggcgcattggttgctgtcggctatatggatcctggtaactggtctacttcgatcactggtggtcaggcattcggttatactctaatgacgaccatcctgatttcaagtttgattgcgatgctgcttcaatacatggctgctaaacttggaatcgtgagcgaaatggacctagcgcaagccattcgagctcgtacagggaaggtgcttgggattgtcttatggattatgaccgaacttgcaattatggccaccgatattgctgaagttattggggctgccatcgctttaaaccttttattccatatttctctgattccagctgttttcattactgtgctggacgtcttggtcctgctgctcttaactaagattgggttccgcaagatcgaggccattgtcgtctgcttgattttagttatcctgctcgtctttgtttatgaggttgcgctatccgatccaaactggggcgctgcttttgccggcctgcttccttcagcagatgccgtagcaactgaaccgcaacgcttgggcattacgccgctgtctggctctttaggaattataggagcgactgtaatgcctcacaacctctacttgcactcggctatttcgcaaacacgtaaaattgatcatactgatgcagaagacatcaagcagacgatccgttttacggcttgggactccaatatccaattatcagctgctttcttagttaactgtctgctcttgatcatgggggttgccgtatttaagtctggtgcggttaaggatacttctttctttggcctgtatgaagcattgagcaacacgtcaatgctgagcaacccgattctgatctcagtagccaagtccggtctgctatcaacactgtttgcagttgcgctgctggcttctgggcaaaactccacgattaccggtaccttgactggtcaggttatcatggaaggtttcgttcacatgaagatgccattatgggctcggcggctggtcacgcgtctgatctctgtcgttccggtactgctgtgtgtcgctatgactgctaaggacaatgccattcagcaacacgcggccttaaacatgctgatggaaaactcacaggtcttcttggcctttgccttgccattctcaatgctgccactgcttttgatgaccgatagcaaagatgaaatgggtgagtttaaaaactctggctgggttaaggtctgcggctggctgtcagttatttcgctgacgttcctgaacctctacaacctgccaagtactttcgaaggctttggcatctggcaaaagagtacggctgatgtattagcttggatctccatcgtggccatcttattgctgttagcttggacaatctacgacatgtacaaaggcaacaagcggctcgttgcagaaggtattcatcatccttgggaacataaggatggtcaaaaaccagccagtcaagattaataaaacaaatattttaatttatcaataaaaaaccgtttgaacgccttggttcgagcggtttttgatatttttggtgtataatagcctgtgtttaggcatcagccgcgttatgctgactgcgcggccaaaataattttgaggtgaatattttggacaaccacgataataaagaaaagcggcgcccaacccgagttgaactatacgatcaaccaaacaagcgcccagaaaaaaagacgcatttcttctttgataaaaaagctgaccgcacggctaaaaaagaagctgcgccaacgtttaagcttgataagcaagccaagcgctcatcacagagcaatgccgatctgaacatcaaagctcagccaaccactaatggtacgcgctccagcatggattctcagccaatcagcaatgacacgcgttccagccgcggtcaggaacgactgggcgctcgcaatggtcaggcaagtgccgctaaaacaactagcttaggtgctaaatcaggcaaaaacaagcagccaaaaaataaaaaaactagccatcgcccatttaaaattgccctgggaatccttttggcggtcttggtcgtcatggtcatcgtctttgccgtcaagcagcaggaccccgtgaccgataactccagtgatacgaccgtctccacttcttctaagaaaaaatccagcagctcaaagaagtccagcagtcacaaaaagaagcattcttcttccagctcatcttatgaagccaactatgacaccaatgatcaggattcctattacgtaccaaatactacgacgaattcatcatctgctccggcggccagctcatccagccagacgactgccaacaacaataatcagacggctggcaacagcagctatcaaggcggcaactctggcaacgccggcaataccggcagcagcagttcaactactgccaataacaatacgccttcagaatctgtcagcggcaatactggtggacctaagcagtcggatgctgcacaatagccaggatttttaaaacggtcttgacacgctcttgccaggtgcatataattcaaactaatgacaaaggacatgcctgatgcggctggttatccagggagtcggtaccttggctggaagtaccgttgaccaagcacatcagcgtaccacctttttgaattgtcactggccgagataaggtcagtcgggtcgtgcccgttaccacacttatgaggcgatgccattagtgcgccgtaaattagggtggaaccacgctgattatgttatcaaccaacgtccctttgattgtttttagcaatcaaagggacgttttttattaccacaaaggagagattttacatggctcaagttgctgttatgaacgtcgatggctcagtcaacaagattgaccgcgactcaaaagaaagtttggacgccctgcgtcaactgtccgctctgatgctgaaagcggctctgcaaaaggaatttgccggtattcgtctgggtgccgacgttgctgaagaagacggtttttacgttgactctgacaaagacgaacagcaggtttccgctgacgaactgtcacaactggaagctgccatcaaggcaattgccaagtccgaagccaaggttgagtttaaagagctcagcgttgaagaagccctggccagcgtcaaggacgatccattctcaaccgaactgatcaacgaaaatgctaaggacggcaaggtcgccatgtacgatctggatggcgtgctggcagttgccaatgcaccggttctggtatatgccaaactggttaagaactacaagttgctcagcgtggctggtgcctactggaagggtatgtcatccaacccaatgctgcaacggatctatggaacggtcttctacaaaaaagacgatctggaagctgatctgaaggctcgtcaagaagctaaggaacgcgaccaccgtgtcattgggaaccaactggacctgttcttcgttgatcctaaggttggtgccggtctgccatactggatgcctaaaggggcaacgattcgccgaacgattgaacgctacatcattgacaaggaactggctgacggctatgagcacgtctacacgccagtcttgatgaacctcgatgcctacaagacttctggtcactgggctcactaccgcgaagacatgttcccgccaatggacatgggtgatggcgaaatgcttgaactgcggccaatgaactgcccaagccacattcaagtctacaagcaccacattcgctcctaccgtgaactgccactgcggattgccgaactgggtatgatgcaccgctacgaaaagtctggcgcgctttccggtctgcagcgggtacgggaaatgacgctgaacgatggccacacgttcgttgctctggaacagattcaagacgaatttgccaagattctgaaactgatcatggacgtctacaaagactttgacattaccgactacacgttccgtctgtcataccgtgaccctaagaacacggaaaagtactttgccaacgatgaaatgtgggaacgttcgcaatccatgctgaaggctgccatggactcactgggtctggactactacgaagctgagggtgaagctgccttctacggtccaaagctggatattcaaaccaagacggccctgggcaacgaagaaacgatgtccacgattcaactggacttcatgctgcctgaaaagtttgatctgcactatgttggtgaagacggcaagcagcaccggccagttatgattcaccgtggggttgtcggcacgatggaacgtttcgtagcctacctgacggaaatctacaagggtgccttcccgacctggctgtcacctgaacaagtcgtaatcatcccagtttctgatgaaaagcatgatgcctacgctgacgaactggctaagaagttcaaggccgctcagattcgggctaaggttgatcaccgcaatgaaaagatgggctacaagattcgggaagcccaaacgcaaaaagttccatacacgctggttgtcggtgaagatgaaatggccaacgactcagtttccgttcgtaagtatggtgaaaaggatcaaaatggcatgactgtagatgccttcatggatgaaattctgcacgatattgctacctactcacgcgaagactaatcaaaaagctgtttggcagatgccagacagctttttattatcttctcagcctcattaagcgctttttttagccgtttagatgataagatggatctttcatcactttagaatcaaacgcgttataatagggaaaatttcaaatcagaaaggtcgcgaatcaaatgtctccatggaatcgtttcaaaaattcagcctgcacgtcaatgatggtcggcaagcatgcttcaactgatggctctacttttatctcgcgcaatgaggatcgcgtcaaggcaattgagcccaaacgcttcctggttcggccggccgtcaagaatcgccaggcagcctatgtctcagcttataatcaattgaccgtgccactgccagctgacagtatgcgctatacggctatgccaagcgttgatcagacgcagggacccaacgaagaggatggctttaacgaggctggcgttggcgagagtgccccggaatccgtctatgccaatccaaaggtgctggcctatgatccatacgtcaaaaacggtctggccgaagattcactgacaaccctggttttgccctatatccattcggcacgcgaaggagttgactatttgggacgattgattgctaaatacggttcagcggaaggcaacggcattcagttcattgatcaagatgaggtctggtacatggaaattgctactggccactactgggttgccgtgcgtattcctgatgactgctatgccgtggcagccaatcagattgccattgaagacatcgactttggcgacagccggaattttgcctgggcagatggcattcgactatttgtggaaaagaatcatctcaatcccgatgatgagcgttggaactttcggcatatcttcggtaccaataccaaacaggaccaccactacaatacgccccgcgtctggtttgcccagcattatctgagtcccagtcttaccaaggagcaaacgcccgagtcagccgatatgccttttattcgcaagcccgatcataaaatcagtgttgaagacatccagtacgttttaaaatcacactataatgaaacaccctatgatcccttgggcagcggtactttagagcagcggcggcgctaccgttccatcgcgctttcccgcacggcacagtcgcatattctgcaggcgcgcaatgattcatatggtgccgcacaggccattcagtgggttgagttcggtgtcccgactttttgcgcctatgtgcccttctttgccaacgccgatgataccgatgcctcataccgcgagtttccagaaaaaatggatctgaacaatgcctattggctaaatgaggccctggccagcgtcgttgaaagccattatgctgaatttgccaaggacaatctggactttcaagacgagctgcagacctgggcacgacgcaagatcaaagttgtcgatgaccagatcagtcagcttgacgggcaacgactgaccagctatctgacctcgcagaatcatgatatcgccaagcattttaacacccgcgcgcaacagcacctgtttgacctgctgaccaagggagctgaactgtcccagctgaccttcaagatggatcctaatctctaggaatttctttaaaagcaaacagccttgatcagattttgatcagggctgtttttttactgcagcgaatcccaagccgtcagttgaaccggccgctgcttagtcagctgcagcagttcggaactaaggtagcgcttgttgatcacggcttcataggtatagtcttcaaaccatttttgcgtcatgacgaaatagcctttttcgccattttcctcaccccatgaattctcaatcttccaacgatcaatctgaccgtcagcctcattaaaaccagtcagcgtcatggcatgagaaacgcaggcctgtctggtttccagtcgttcttttttattcatcacgtagtcaatgcccaaaagcgcttctgttttgtacagttcagcatccataatgccccgcttgcgatccatctgctgtaagacccacacggtttctcctgctttcagctgcttgaccgcgctgttctgcagttcttcaaacggcacattgacgaattgcagcgggattccaccaacgacattttcctgttgcggcattgagtagacctgattgagcttatgatccggcgcgttggtcaaaaccacatagtcacgcagattcagctgccaatattgatgaaagaattccagtggcgacagattggcctgccgatgcagctgatgatcgtcatcctgatattccagatcaaactgcttaggcggcatcccaaaagcataaacggccaatcgatagacctcactgaccatcttttctttgacctgctgaaccgcaacccgatcagcatgctgctcattgatcatcttccgcagtaccaacgcgtctttatgcatcagatccttcattaccccggcaatatcgtcagtattcttggtattgtaggtgtcaggcattacatattccggtacgacgccatatttttcaatgatcgaggcagcattggcccactgcccgccatcattttccgcaaacgccacataaaaatcgaccagcctatcatgaaatggcagtgcggccgtagcaatgatattttgcaaaaacatattggcccgttcaacacgatcccagaaaaacaaataattctgcgataattcaaaatccttgaagttgtactggctggcaaaaagatgccgcagcgtgttcagcgtggcaaacgaccagcaacgaccgctatgccgctgattggataccttgcccgtcttgacttcatacgaaaaaacgcggtgattgcgctgactgacgttttggtcctcgctggccgccttgatgccgtttttcatcacggcccgcgcgattacggcagcatctggccgctttttgaaatcggcttcgtagccctgcagctgctgcgacgttaacttttcaaactctgacatgttgaatcttcctcacttacagtcttttgtgaatcattctaaagcaaaatcatcaacaactcaaaagcagcgcccttgctaaagaacgctgctcattgttagttatcggcaaagaaatgcttccattgctgattgatattgtttttagccggctgcgtacgattccagaaacctaccttgacgacgccgacgatcttgctcttaggtacgaatccccagtagcggctgtcgttagagacgctgcggtgatcacccaagacaaagtactcgccttttggtaccttgtaggccccattatgcagcacccagctgttttcctgggaaatactgtgcaaagtccaggttccggtaccgctggaacgctcgctcttgctgatgtagctttgatcaacctttttaccgttaacgtaaagattgccgtttttagcctcaaccgtatcgcctggcagaccaataacccgctttacgtactcagtctttactgaaacttgcggatcaacgccattggcatcaaaaaccactacgctgccgcgatgaatcttggcttgctttaagcagaccacgcgctcgttgttttgcagattaggctgcatggatggaccatcaactcggacaaactgaaaagcaaactgcttgatcagcaatgccagcagcagaccaatcgcaatcggcacgatccaactcattaattctttaaaagctttcatcaaaattgctcccagattagatttctaacggcaattttaatacactttgccagcaactaacaacttattcatcatattcgcgcatcaattttttggtcagctgataatcgccaacatatgggatgtcatggcctttttcatgcataaactgctcgcgtcccttggcagccataaacatgacgtcgccgggccgtgccatattaaacgcatcttgaatggctttggcgcgatcaacgttgatatgtacctcaacatcaggattatcaatgtgtgatttgatttcttcatcgatctgatgcggatcctcaaagaaattgtcttcgctggttagaatggccacgtcagcatatttggccagcgcctcgccaatatccttacggcgcgactcagccttaccaccagccgcaccgatcactacgatcaaacggccattgggataagtgtttttcatgtatttgaagctttcattcaggctcagatagttatgagcatagtcaacgcaggccaatagtccccgctgattgctcagcatttccatgcggccaggaacggtggtttcttccagtcccttgacaaaagctgccgtatcatcactgaactgccgccctacgaccagcgcggccaaggcattgctgtcattgaacgtacctgggatattgatcttaaagcggccagtcaactgcggctgctgactgctgaacgtagctacgtgaaactcatgcggcgaatcaactacatagcgatagtcggcattggactgactgctgccaaatgagattacctgattgccagcagccagcgctttttgagccagcagatcataataaggacactcacgattgatgatcaccttggatgagttgatcatcagctgactcttacagtacagatagtcttcaaaacttgggtgttctaccggactaatgtggtcagcagcaatatttaaaaagacaccaatatcaaaatgcagaccatagactcttgacttcttataggcctgactggaaacctccataatcagatactgcatgccattatcggcagcctgacgcatcatccggaacaggtccagtgactctggcgtcgttaaatgagcttcttcaaaatgctcgccatcaagacattcagcaattgaggataattgggctaccttatgatcaaaaacctcattcatcaaatggcgggcaaagtataccgaagtcgtttttcccttggtcccagtaaacccaatcactttcagttcctgttgcgggttgttgtaaaactcgcgcgccaatagagccattgccctttgaacgtcattgaccaccagctgcacgacttgcttctggtctttgccggcatagacgttttcagtcacacaggcaacggctcccttatcaattgcgtcctccagatatttttcgttgaagtttagtcctttgcacataaacagcgtatcaggtgcaatacggcgcgaatcataagataagaattggagcctgcgatctttgagattggctggaacctcgaagcgccaatcatcaccgattacgatttcacgcagcaattgatcctgttttaaaatgttggcagcttgattaagcgtcagcatttctccccccacctttcatttaaacgttcattgtctttcgatcatgtttcgtattctgacacaagattatgaaaaaaatgcgaaatcccaacgaaagcatcaagaacttgcttttaagatgtcttaaaaaaacgacaataaggtccagtctgcaaacgcaccgcagactggaccttatcttcaattaactgtcaaagtatcgacttccctaacagtcatatttaattatacgctttcatcaactgctctgtcagctggtaatcgccgacataaggcttgtcatggccattttcgcgcaggaactgctctcgccccttggcagccataaacatgacatcacctggccgcgccatctgaaaggcagttttaatggcctcttcacggttaagaatctcatgaacctcaacgtggggatccacgatatgatcgcgaattgcctgaataatctttttgggatcctcaaagtagttgtcatcttcagtcaggatggccacgtcggcatactctgacagtgcgcgaccgatatcctggcgccgtgactcagctttgctgcccactgaaccggtaaccacgatcaagcggccgtctggatactcatgctttaagaacttgaagctctcactcatgctcaggtagttatgagcgtagtcaacacaagccacatagcctttttcgttctttaagatctccatgcggcccggtaccttggtttctaaaagtcctgccgcaaactcactggttttatcgcttagctgcgcggcaactgccaaagccgccgttgcattgctgcagttaaacgatcccggcagcatgacccgaaagtcgcctgcaactgtcggcagctggtcattaaacgaagcaacctggaaatgcccatgctcgcctaaggtaaagcgataatcggcatctgattgatcgctgccataggtaatcagctggttgccgaatgcgcgcgtcttttgggccagcagctcaaagtaagggatctcgcggttgatgattactttatcggcattttttaccagctggctcttgcaccaaagatagtcgtcaaaacttggatgctcaacgggactgatatgatcacgcgaaatattcaagaagacgccaatgtcaaaatgcagcccatcaacgcgcgacttcttgtaggcctgactggaaacctccatcaccagatacttcatgccgttatcaacggcttgacgcatcatccggtacagatccaatgattcgggcgtagtcaggtgcgattcaataaagtttttaccatccagacattcggcaatcgatgacagctgcgccacctgattgtcaaagacatgcgctaaaatatgccgcgtaaagtagactgaggtcgtcttgcccttggtaccggtaaagccgatcagtgtcagttctttttccggatcgccataaaacgcccgtgcgactgtcgccatggctttttggacatcagtaacgacaagctgccagacggtctgaccagccagctcctcatcatacacctgctgagtcagacaagccgtggcgccttttttgactgcatccaccagatactgcggattaaagcgctgtcccttgcagataaaaagcgtctgcggctcaattacacgcgagtcatacgaaagctgtctgaactccaaatcggcaattttttccggtacgtcatactgccactgaccgtcaacgatgatttccttaaacaggtcccgttccttgagagcggctaccgtctgtttaaccgtcagcatttagttcgccgccttttgcttggtttgatcaattgcagattcatccggcttgaagttgtcgataaagtacagcttgtaccagaccaagaacgtgtagacggtccagatcttacgccggtcgtccgtcttgccttggaaattgtcttcggccatcttcaagatcttgtcttgatcaaagaactctttgacaaaatcctggctgaacaattcgcgaacttcttgatagtacttgtcttcacgcagccaggcccgaattggcgttgggaagcccatcttaggccgcgttgcccattcttctggcaggtgacggttggccgccatccggaaagcccacttggtacccttagcgttgaacaggtacttggttggcgtggtctgagcaaccttcatcatttcccgatccaataaaggcacccgcagttccagcgagttggccatactcatcttatcggccttcagcagaatatcgcctggcataaagcagtgcagatccaggtactgctttttggcaacctcatcaatatctttgtcttcaaccttgtcgtagtatgggtcaacgatctgcttaaccgttggaccacagtcaaattcaggctgcagaatgctttgagcctgttctggactgaagatgtaggcctcaccgataaaagtatcgcgagctggcgccaggttggcatacatatgcgcctggccatggaaatgcttgttcttgatcttttcggcaatctcatagcgcttttgccgcggctttttcttcagctgatcggtaatccagcgaatcagctttgacttggtgtagaagccataatcaatgtagccggcaaacagctcatcggcaccttcaccagaaagcattgccttgtagccattgtccttagccagcttggtcaagaagtacaatggcacgacggatgggttggagtcgggctcgtccagatagtattgaatcaatgggaaggtatggaaggcttcctcgttggtcagcttggcatccgtattcttaagattcagcttagctgccagttcccgtgcttccttggtttcatcgtaggtgctgtcaaagccgattgagaacgtgttgtcaggccgcatcatcgccgtaacgtagctggagtcaaccccagccgaaagaaacgaaccgactttaatgccttggtcagcaaaagagtgcgccttgactgattcggtaacggcagcctcgatccgatcaacggcttgatcaaaggtttcatcggctggttcaaagtcttcatcccagtattcagtcattgagaactgaccatccttggtgtagtggaacgaatgaccttctggcagtttgtagacgcccttaaagaacgtttcccgggtaattggatattggaacgtcagatatggcttgagggcttctttgttcagctgcttgtcgaagttcgggtgttccaagaaggccttgatttctgagccgacaaagaacgtcccattcatcttggcgtaatacagcggcttaatgccgaagtgatcgcgggccccaaacatttcttgggtttgtcggttccagatgacaaaggcaaacatcccccgcagcttcttgcagacgtcatcgccccattgctcatagccatgcagaatgacttccgtgtccgtcttggttgagaaatggtgcccagcagcaatcaattcctcgcgcagcggctggaagttgtagatttcaccattaaataaaatggccaggttttcgttttcattaaagattggctgcttaccgctcttaacgtcaacgaaacttagacgccgatgtcccaaagccgcgtgttcatcgacgaattggccggcatcatcgggaccacggtggatgatccggtccatcattttttgaatcaggctttctttgacttgtggcttttcattatccacaaatgcaacaattccacacataatgactctcctatgttcttgactaaattagcgctgcacgaagtattccttgtacttcttaggcattaacgaaaaggcgtagtgcatcagcagccgctgcttgagcgtatcatgcttgtcaaaggccgtcgtaccccagttgcctgattcaagcatctgcttggcacgctccttatctgggccttccttagcgtacttgtagaagactttcttaggaacgctcagccacagcttgttgccgtctgcataatcggtatggtcatatggacgatggtagatggcatcatcaaccacatacttagccagattatagccgtttaaagtgcagtagtagctgctgcggccctgacgcagattgatctcaaaaatcttgaatttgccatcgcgccggtcgtacttcatgtcaaaatccgcaaacccgacgtaattgatttcttccaagaacttttgaatcgtttggtagatttccatgttcttttctggaatgatcaccatatagttgccgactgccactggcgatggatcttccagtaggggatgaccaaggcagatcatgcgtaccttgtgatcttgaccaacataggcatttaccacgcgcatgttggaatcatcgccgggaatgaagtcctgggcgatcagctttccggtatagccggcttgagcaatttcaggcagcagcttatcaaactgagcccgcgtgtccaagacataggcctttttacgatcagcaaaatgaatgtccagccaggcgatactgtcggaaggcttcaaggcaatcggaaaatcaaatggcagctcaatttcttttggcttcgtaaattcagccgcttcaatcagcttggtctttggataaggcaggccatacttttccgcagcagcgtaaaaagtttctttggtccccagtttttggaacatgtcatagtcaacatatgggcagacaaaccattgcttcagctcgtctaagtgcttggcgatcagttccgtgtagccatccccacaggacagcagcaggtattttttatccggctttaagttcttggcaatctcacgcattgatttgataaagcctggatcttcgttaaagccttcaattacatgcacatcagccagcttggtgtagcgagttggcgccatgtgcgtaactccataggcaatgcttttgattccataggcttcataaaaagaacgtgccatgccatagcagttaaagtccgttcccagcagaattggctggaaatcaatttgatcattcactttaaaatcatcctcatattttcctagtgatactgtcaacggcgattataaaaaacgccctctgaaaccttaatgataatccaaacccaaggcaccttcaagatattctctaatccttaagcttagctaaacgtccttgacgcagataaacgctcaaaatcgccaggtcagctggattgaccccactgatccgcgatgcctgcgccaaagtttcaggccgaatcttctccagcttctgacggccttcagtagccagtccatcaattgccgaatagtccaggtcagccgggatcttcttggcttccatgcgcttcagccgttcaaccttgacgtcttcttttttaatgtagccctcgtacttcaattgaatctcaacctgttcgattacttctcgactgagcggttcatctggatcaggaatcaggttcatcagcgtctggtagtcaacatatggccgttttaagaaatcggcggccgcgatggcatctttcaaaggattgtcgccgtgagcctcaatcaggttgttggctgcctcattggttggcttgatgcgaatctttttcaaacgagcgatttctgcttcaactaaagcttttttatgctccattcttgccaggcgctcatcagaaaccaatccaatcgcgtggcctttttccatcaagcgcaggtcggcattgtcatgacgcaggatcagccggtattcggcacgactggtcaacagccgatatggttctttggttcccttggttaccaagtcatcgatcattacgccaatgtaagcatcagagcgtttcaaaacgaacggccccttgccttgagcacgcagcccggcattgatgcccgcgatcagcccttgaccagctgcctcttcataacccgaggtgccattggtctggccagccgtaaacagattcttgaccagcttggtttccagggttggatgcagctgatatggcgccaccacgtcatactcgattgcatagcctggccgcatcagcttggctttttccagcccttttacggaatgcagcatcttttcttgaatttcttcaggcatcgaggttgacataccgtccacgtaccattcgtcagtatcgcggccttctggttccaagaagacctggtggcgatccttatcggcaaaccgcacgatcttgtcttcaattgaaggacagtagcgcggaccaaccccttcaatcaccccagtaaacattggcgcccggtcaaggttatcgcgaataatctgatgcgtggttgggttggtgtaggtcagccagcaggaaatctgatcagtgactgcgatgtattgactgtctggcgtatcaaaactgaaatgatgcggtttttcgtcaccaggctgttcttcggtaactgaataatcaatcgtattgccgttgatgcgtggcggcgtcccggtcttaaaccgctgcagatcaaagcccagctcttctagattctcagacagcttagtggctgactgcgtattgtttggaccagattcatacatcagctcgccaatgatgatcttgccgcgggctgccgttcccgttgccaataccacggccttggcaaaatagcgggccccggtattggtaatgactcctttgcagacgccatcttcaaccaccagctgatcaacggtggcctgccgcagcgtcagattaggcgtttcttccatcgtctgcttcatggctcggtgataggcgtgcttgtcagcctgagcccgcaacgcacggacggctggacctttccccgtgttgagcatccgcatttgaacataggtcttgtcgatattgtggcccatttcaccgcctaaggcatcaatctcacgaactacgattcccttagctggtccccccagtgatggattgcatggcataaaagcaaccatttccagactgatcgtcaaaagcagcgtcttgttgcccatgcgtgctgccgccaatgccgcttctgatcccgcatgaccagctccaacgataattacgtcaaagctgccggcatcaaacggcttaccttgtgaaatctgcatttttatctcctttactttcctagacagaactggctgaacaattgatccaacagctcatcttgatagctgtcgccggtaatctcacccagcagttcccagcaccgcgtcatgtcgatctggaccaagtcgactggcattccagctgcaatcccgctcaaaacgtcattcaaggcgtcattggcttgatgaagcagtccaatatgccgggcgttggtaaccataacggtactttgcgagctttcgattccttcatcaaagaacatatggctgatcgtccggcccaattcttccattccctcatgctcaacgatcgaggtcttgataacgcgatcaccagccgtcagctgacgcagttcgtttaaatcgattcggttcggcaggtcggttttgtttaagatgacgatgcgtggcttgccagccgtcagcttgatcagttctcggtcctcatcggtcaatgcattggaactgtcaatcaagagcagcaccaagtcagccgtatcaatcgcctgacgactgcgctcaacgccgattttttcgaccgtatcctcagtatggcgaatcccagccgtgtcgatcagttttaaaggcacgccttctacgttgacgtattcctcaatcacgtcacgcgtggttccggccacgttggttacgattgccttgtcctcatgcaaaagcgtgttgagcaggctggacttgccgacatttggccgcccaatgattgccgttgccagaccatctcttaacactttgccctgcttggcagtttttaaaagtgcctgaatgcgctgctgaacctcttgggccttttctttcagcatcttggtcgtcatttcttcaaccgcgtcatattctgggtagtcaatgttgacctcaacctgcgccaagacgtccagaatatccttgcgcaaagccttgatcaagcgagacagatcgccatccaactggtttagcgccaccttcattgatttgtcggttttggcgcggatcagatccatcacggcttcagactgtgaaagatccagccgaccgtttaaaaaggctcgtttggtaaactcacccggttccgccagtcgggctccatgactaagcgtcagctgcagaatccgattggtagccagcagtccgccatgacagttgatttcgacaacgtcttctctagtgtaggtatgaggtgcccgcatgattgaaaccatgacctcatcaacttccgcaccactgtcgggatcaacgatatgcccatagttaatggtattggttgccacctttgccagatccttgctgccatggtacagctttttggcaacggcaacggcctcctcgccgctgatccgaataatcgagatgcccccttcgccaactggggtcgagatggctgcaattgtatcaaattctgaatttgccattttctgctcctttccgccgcaataaaaaaagtgccgagtccacgctctccccgctttgggatcaacatggtcaaagcactttcactactctaactaacggtaaattcaattaacatcgctattttagtttttcagcgtttggttgtcaatcaattaattctttggtgctaccacgacgctgcgatacggatcacgaccatgtgaataggtcttgacccgcggattgtcttccaagacatggtgcagatatttgcgttcacgagccggcattgggtccaaaaagacggcttgaccagtagcaattacctcggtgacgcagcgagcagccagtttttccaatgactgctgccgtttctgacggtaattcgacgtatccaggatcagccccggatcatcgacgccatgatagcttaaaaaggccgttcccaactgttccaaggcattgatccgtcgcccatgaaagccgatgactcgtcctgaattatcggcctgcagatcaacgatcaattcatgagtccgcagcttgacgattttaggcttagccgttaccccaagcgctgccagcacgtctttcagatagccgcaaagtgcctgggccgcttgattcatcttctgcacgttggcttgatgacaacgctccatttccaaggcatctggctcatttgaatcatttgctgccggtttgacgttttgttttttgtctgtcggcttggcagttttgaccacgaccgtttttttagctggctgggacttaacggccgaattttttacgattggcttttgcggctgcaccggccgttttaattcagcctgaattttggcgttccgacggccaaatccaagaaagccatgccgcggctgctccaaaacctgaatgtctaattgatcacgatcaactttaaaggcagctgatgcggctgcgattgcttcatcaattgtctgcgcctcaaaagtttccataaagctccccctcaatcattatcaaaaaagagcggtcaagccgccctcgttgctcaattatttccgcttgctgcggtaggccttgcgcttagccttggcaatcttgttgcggtggcgacgttcagcagcctgtttttcttcacgttcgcgacgaatcttgaacggattttggaagatcagtacctgcagaacctggaaagcgttggatactacccagtaaagcgtaattgccgaactaaagcccagtgccatgaaaaagaccatgatcggcataaaccaggtcattgatttggtcatggcattttgttccggcattgaagccattgacagccaggaactgataaacgtaaacagggccgccaaaatcggcagcacgtagtatgggtcattgtggcccagctgcagccataagaagctcccactgcgcaaaacgtgcgtccgccagatggcttgatacaatgcccacataactggcagctgaaccagcagcggcagcatcgaagcaaacgggtgcacgccagcatccttataaagcttttgttgcgctgcctgcatcttttccagtgattcacgatcgcgtccaggatacttcttttgaatctccttaagctgcggcgttaattcctgcatcttgaccgacatcttggtctggtacaccatcaatggcagaatgataatccgcacgataatcgtaaagatgatgatccccattccatagccgccaaaattgttggacagccagattatgaatcgtgagcagttatagatgatgtaatgatcccaaaagccggtactgtggctggtaattggtgaattggaacaagcagccaaaaagactgccagactcataatccccgccaggcttaggattttcttgtgtccttttctcaaagtgcgatcctctcttaatcttcttttaacagatgggccaatttcagtgcatgaaccagattctttttaacttctgccatttccaagccatcagcagctggccgcgcaataatcaagaagtcaacgtcaggcttgattgccggcttaacctccagcagcgtttggcggatccgccgcttcagccaattgcggtgtacggcattaccgattttcttgccgactgagatgccgacccgaaaatgcttctgacctggtttttgcatttgatagatgataaattttcgattggctacggaatcatgagtttcaaagacccgctgaaattcactttccttttttactcggtatgactttcgcatgttcgctccaacctttaaaaatacaaaaaggactgaggcacaaccgcacataatgcagtggatgaatgccccggccccttttagaaaaaaagccactaattaaatagtggccgattttatgcagataatactttgcggcccttttgacgacgacgagccaataccttacggccgttgctcgtgctcatacgcttgcggaagccgtgaacgcgtgcgcggtgacgcttctttggttgaaatgtgcgcttcattgagtgcacctcctcgcttgtatttattattttatttacagtccaaaaagacaatctcttcaaacatacttttgaagtataacacatcctacgccaagaataaatgattatcttgcgttattttagcgttttttactgcacagaagcagccagttatccccagttttttccacaagtaccaaaacaaaactggggacttttatatttatccacagagttatccaaagcaaaaagagttccccacaggttgtggaaaaagttatcaacatatctgtggataattatgaaaatatgattagttcgcttttaattcactaaagttatccacaggtcaccagtgattaacttgattttgtcttttctttttccacaaatccacagccttgtggaaaacttatcaacatgtctgtggattttgttaatagtttttacacagccttgtgggaaactaccagacaatgctaaaatattctttggatttttaattagcatgaggaggaatttacttgattgagctaaactcactctgggaatcggttcaaaaagagtttcgcaagaccactggcagcgtaacctataacaacctgattgccccagccaaagcaatttctctcgaaaacaatcagctgaccattgagctgccaaccaaatctcaccgggacttttggcaaaacgagatgaccgctaagctcaaggacctgctgttcaacgaaaccctggttcatattgagccacgctacacgcttgagagagagctcatgactccatcttcgccagccggtggaatcatgaccaaacagacacccttaaatccagaatatacatttgaagctttcgttgaaggccgcagcaatcagatggcctatgcttctgcctatgctgcctctgaacagcctggcggactttataatccactcttgatctatggcggcgttggccttggcaagacgcatttgatgcaggccattgccaacaacatgctgcggcataatcccaacgccaagatcaaatacgttaccagcgaaaccttcaccaatgactacatcaattcgatcaaaaacaacaaccaagagcagttccggcgcgagtatcgtgacctggacgctttgttggtcgatgatgtccagttcttttccaataaggaaggcacccagctggaatttttcaatactttcaattcactgcatgacaacaacaagcagatcgtcttgaccgctgaccgaaatcccaagcagatccccgatttgactgatcggctggtctcacgctttgtctggggagttccagtcgagattacctcgccagatctagaaacacggaccgccattttgcgcagcaaggccgaagaagagcagatcaacgttcccaatgacgttttaagctttattgccagcaaggtcgacaccaacgtccgcgagttggaaagcgcgctgctgagagttcgcgtagccgcccagcttcatcacgcgcccatcacgattgaactggcaaatgaaacgctcaagggcatggaagctgccgatgaggcggtaatctcgattgacttgattcaaaaaaaggttgcggcttattataatatccgtcagtctgatatcgtggggaaaaaacgcgtcaagcagatcgtctttccgcgccagattgccatgtatcttgcccgagagctgaccgaaagctcactgcctaagattggcaaagaatttggcggcaaggatcataccacggttctccatgccatcgataagattgaaaaacagctggccgaggatgataatttacaagacgacatccgcaaccttagaatggagctgcagccttgattgtggaaaactaaaaagttatccccaagatatccacaacttttccacagttatgaaaacttatagctgttgggttcaagccatttttccacattatccacaggtcctattactactactaaacttatataatatatatataaagcaacaaggagagattcatttatgaaattcaccattaatcgcccagcattcattaatcagcttaacaacgtcttaagagccatctcatctaaaactacgattccgattctgactggtctgaaaatggttgtaactgatcatagcgtcatcttgactggcagtgatgctgacattacgatcgaatcaactctggatgccagtgacagcagctatggcctgtcaattgaagaaccgggggcaatcgttttgccggctcgtttctttaatgaagtgattaaaaagctgccagacaagcaggcaacgattgaggtctttaatggtctgcaggtgcggattacctcagggacggctgaatttacgatcaacggtcgggatgccaacaattatccacacctgccagaagtcgaaagtgaaaatacggttgaactggcttctgacatgctgcgtgaagttattgaccagacacggattgccgtttctaaacaagaaagtcggccaattttgactgggattcacgtaactttaaataatgggatcttaacggcagtggctaccgacagtcaccgtttggcacaacgcaaggttgagttgccagaaacggctgatcgtgattttgacatcgttttgccaggggcctcaatgacggaactggctaaaatgattgtcgatgaaaaagatggcgttaagatgcagattaccgaaaatcaagccttgtttatttttggcaatacgcatttctactcgcgcttgctggaaggcaactatccagaaaccagccgcttgattccagaatcatctgatacacgtttggagatcacggccagcgatctgttggcttcgatcgaacgggcttcgctgctgtctcacgaaagccgcaacaatgtcgttaagctgagcgtcaacccagaaaacaagattgcgacggtttcaggcacgtcagctgatgttggtaacgttgaagaagaaatcaatgctgaccagatcgtaggcaaccccttggaaatctcgttcaaccctgactatatgcgtgatgccttaaagtcatttggtcaaaccaagattctgatttcatttacgacggcgctgcggccatttaccctggtaccaactgaagaaaaagccaattttgttcagctgattacaccggttcggacttactgattcaaataaaactgttgaaaaagcatccacttatccacagtggatgcttttttgttgtggaaaagtgattaaattagcggaatttggtggataaatcattcgctagtttaagatagcgcttaaatcactgaaatttgccttctgagcaaagataacctgttttagataaaaatgattaattgggataagatttgctgatacggcctaaaaatgccctttaatttgtttttgcgtcttataaaagctataatagaacagcaagcataaagtaggtgaaaagtatgcaaaattcaaaaaaagtcgcaatcagcagtgaattcattacgcttggccagctgctgaaagaagaaggcattattcccactggaggagctgccaaatggtttttgcgtgaacatgaagtcaaagtcaacggcgaatcagaggctcgtcggggtcgcaagctgcgggttggcgatcaaatcgagatcagcggtattgaaaacgttgagatcgtagctgaataatcaatgtatctttcggaaatcgagctgcggaattttagaaattatgaggaccgtcaagttgagttttccccaggcatcaatgtctttattggggaaaacgcccaaggcaagaccaatctgctggaggccatctatgtcttggcaatgacgcgcagccaccgaaccgctaacgatcgtgagctgatcaactggcaggctaaagaagctatggttaagggcacggttatcaagcagacgggacgggtaccgttggaagtgctgttgggtacgcgtggcaaacgagtcaaggttaatcatcttttccaatcgcggctgtcgacttatatcggcaatctaaacgtagtcttatttgctccagaagacctggcactggttaaaggagcccctcaggaacggcgtcagtttatggatacggagttcagtcagatgagcagccgctatctgtatgccatcagtcagtttagaggccttttaaagcagcgcaatgaatatttgaaacagttgaagtatggcagccaggtcgatcaggtattgttggaggtcttgtccgatcagctggcagaaagcggcgcggcagtaacggcaatgcgctttaagctgctcaagcggctagagacatggtcggctcagctgcatgagcatatttcccaacaaaaggaagtcttaaagctgaaatatatttcccaggttatgattgatgaagaaacggctgaaaatgaaattgccgagcagctgcagaagttgtatcacgagcatcagtcgcaagagatcaagctggggacgacgctttatggaccacagcgcgatgatattcgttttttggtcaacgagcaggacgttcatcgctttggctcccaaggtcagcagcggacaacggcattagcggtcaagctggcagaaatcgatctgatgaatgaacagaccggcgagtacccattgctgctgctggatgacgtcttgtccgaacttgatgatgatcgccagacccatctgctgactgctattcaggataaggttcagacgtttttgacaacgaccagcttaagcggcgtagcacgacaattgatcaatcgcccaacgatttttcagattgcccatggaacgattgacaaggaggataaaaagtgagcgataaagaacttgaagcagaaaagaaagcggaactggccagtgagtacgatgccagccagattcaagtcttaaaagggctggaagcagtccggaagcgccctgggatgtacattggctccaccagtgctcaagggctgcatcacctggtctgggaaatcgtcgacaatggtattgacgaagccttggccggattttgtgatgagatcaatgtcgttgttgaaccagacaacagcattacggtaaccgacaacggacgggggatcccgatcgatattcaaaaagaaaccggcaaaccggcactggaaacggtctttaccgttctgcatgccggtggtaagttcggcagcggcggctacaaggtttctggtggtctgcacggggttggggcctcagtcgtcaacgcgctgtcaaccgagctggatgtctacgtaacgcggcaaggcaaggaatactatatggactttgaccatggccacgttaagacgccgatgaaagtcgttaaagaaggcgtctcggaattaaaacacggcacccgggttcactttaagccagatccagaaatcttccgtgaaacgacggtctacaacatcaagacgctgacggatcgaattcgcgaattgtcttttttgaacaagggcctaaagatcacgattgaggacaagcgagaagaaaagccaacccggcaagagttccattatgaaggcgggattcggcactacgttgaattcttaaatgaaggccaagaagtcctgtttgacccgccaatctatgtggaaggcgaggacaagggcatcacggttgaggtttccctgcagtatacgacgggataccgcagcacgctgatgacttttaccaacaacattcacacttatgaaggcggaacgcacgaaaccggctttaaaaccgctttgacgcgcgttatcaatgactatggccgaaagagcggtcagctgaaggggaatacgacgctttccggtgatgatgtgcgtgaaggattgacggcagtcgtttcaatcaagcaccctgatccacagtttgaaggacagaccaagaccaagttgggcaactcggatgcacggacggcaaccgaccacatcttcagcgagatgtttgcgcgctttttgatggaaaatccggacacagcgcacaagatcgttgaaaagggaatgctggcttccaaagcgcgggtagccgccaaacgggctcgtgaagttacgcgtaagaagagcggcttggaaatttcaagattacccgggaaattagccgacaacaccagcaaggatccagaaatttcagaattgttcatcgtcgagggtgactcggccggtggtagtgccaagcagggccgttcccgcttgacgcaggcgattctgccaattcgtggtaagatcctcaacgttgaaaaagctgggatggaccgcattctggccaatgatgagattcgttcgctgtttactgctctagggactggttttggcggtgattttgacattaccaaggctaactatcacaagctgatcatcatgaccgatgccgatgtggacggtgcgcacattcggacgctgctgctgacgcttttctatcgctatatgaagccaatgatcaccaatggctatgtctatattgcacagccgccactgtatcaagttcggcagggcaaattcgtcaagtacgtcgaatcagacgaagagctgcaaaacgtcttgaacacgctgcagccaagccctaagccagtaattcaacgctacaaagggctgggtgaaatggatgctgaacagctctgggaaacaacgatggatccagaaaaacgccatctgctgcgagttgacctggatgacgctgctgaagcggaaaagatcttcccaatgctgatgggaactaaagtcggtccgcggcgcgagtttattgaagaaaatgccaagtttgtcgagaacttggacctgtaaaatcagctaaggaggaaaaaacgtggcagatcaagatatgccagggcgcattaccgatgtcaatctgactggattgatgaaaaattcatttttggattatgcaatgagcgtcatcgttgcccgggcccttccagacgttagagatgggctgaaaccggttcagcggcgaatcctttatgggatgaatgaactgggcgtgacgccagacaagccatataaaaaatccgcacgtatcgttggtgacgttatgggtaagtttcacccccatggcgattcctcgatctatgaaggcttagtgcggatggcgcaggacttcagctatcgctacatgctggttgacggccatggtaactttggctcggttgatggcgacggggcagccgccatgcgttataccgaggccagaatgagcaagattgccgttgagatgctgcgtgacatcaataagaatacggttgactttcaagacaactatgatggcagcgaaaaggagccaaccgttttgccggctcggttccctaatcttttggtcaatggtgcctctgggattgctgtcgggatggcaaccaatattcccacgcataacttaggcgaggtaattgacgccattcatctgctgatgcagaatccggatgctacgactgaagagttgatgaaggtgctgccaggacctgattttccaaccggcggcgtagtcatgggcaagtctggaatccgtaaggcctatgaaacgggacgtggaacgattattgtccgcgccaaggttgacattgaagaagccaagaatggtcgtcagcgtatcgtcgttcatgagattccttacatggtcaacaaggcacgcttgattgagcggattgccgaattggctcgtgaaaaagaaatcgaggggattaccgatatcaatgacgaaaccgaccgtgaagggatgcggatcgtgattgacgttcggcgtgatgccagtgctgaggtcatcttaaacaatctgtacaagatgacgctgatgcagacgactttcaattttaatatgctggccatcgtcaacggagcgccgaaagtcttaagcctcaagcagatcctgcagcactaccttgaacatcagatcaacgtggttcggcggcggacggaatttgacctgaaaaaagcgcagagtcgcgatcatatcgtgcagggacttttgattgcccttgatcatattgacgagatcattaaaattattcgcgaggcgcagaccagcgagattgccaaggagcagctgattgaccgctatacgctggatgatcgtcaggcgcaggcgattttggacatgcggctggtgcggctgaccgggcttgaacgtgaaaagatcgaaaacgagcatcaaaagcttaccgaggcaattgccgactaccaagacatcttggcgcatgaagaacgcatcaatcagatcatttacgatgaactgttagagattcagcgcaagtttggcgatccacgtcggactgagctgcaggtcggcgatattaccgatattgaagacgaggatctgatcgaagaagaagatatcgtcgtcacgctgactcataatggctacatcaagcggctgccggttgacgaattcaagtcgcaaaatcgtggtggtcgtggtgttaaaggaatgggcgtacacaaagatgactttatcgagcatctgatctccagttccacgcatgatattctgctgttctttaccaattcaggcaaggtcttctccatgaagggctacgaggttccagagtatggccgttcagctcagggaattccaatcatcaacttgcttggcatcgacaatcacgaaaagattaccgcggtgatcaacgtttcgaatgctgccgatgataccgacaagttcctgttctttgttactaagcaggggacggtcaagaagacgccagttgatgactttcgtaatattcgcagcaatggtctgaaggcaatccagctgcatgatggcgatgagctgattcacgtcaacattattgatggtcagcagaacatgatcttagggacgcgacttggctatgcagtcagtttcaatgctgaagacgttcgttcgatgggtcgctcggctgccggtgtacggggagccaagctgcgggaaggcgactgtgttatcggcgccgcaccgcttgattcggacagcaatgtttttgtaatcagcgagaatggctttggtaagcagacgccagctgctgaatacccaattaagggtcgtggcggtaaaggaatcaagaccgtcaacgtaacggcaaagaatggtccattggctggtttgacgacggtcaagggcgatgaggacatcatgctggtaaccgataaaggcgtgatcattcgttttggcatcgagaccgtttcacagactggtcgtgccgccgtgggagtgcacctgattcgaatggatgatgattccaaggtagctacgatggctaaagtggccaaggaagatcagacggatcaagatgatgatgctttacctgctgaagaagattccgcagcatctgaaacagaaaacaactaaataaaatgcaaaagctgaattacggcatatagtttaatcagagggccgcaattcagcttttttgattagatgattgaatcgcttgtaattgatttttatttatgctaatatctttgtctgtgagtatacgtaaagacgtctgctctccttgctcttattaatcttgaaaataagagccagagtccataaggaggtgtaacattcatggaaacacgcaaatatgaaattacttacatcattcgtccagacatcgaagaatctgctaagagcgaactggtagctcgcttcgacaagattctggcggacaatggtgccaacatcatcgattcaaaggattggtcaacgcgtcggtttgcctacccaatcgctaagtacactgaaggtacttaccatgtagtcaacctgactgctgacagtgacgaatctctgaacgaatttgaccgtctggctaagttcagcgacgacattctgcgtcacatgattgttaagcgcgaagcctaagtcgcgttgcaatccaaattgaataagttttagagaggagtacgaggtccatgcttaatcgcgtcgtattaaccggtcgtctgacaagagatgctgaattgcgctacactcaaggcggcacatcagtggcctccttcacgctggccgttgatcgtcagtttcggaatgctcaaggtgagcgtgatgccgactttatcaactgtgttatctggcgaaagccagccgaaaattttgccaacttcacccataaaggtgccttggtaggaattgacggttctttacggacacgcagctacgaaaacaatcaaggccagcgcgtctacgtaacggaagtacaggttgataactttgcattgctggaaccgcgtcgcaatggcggtcagccctacagtggcggtcgttctcagtcaaactttggcaatggtcaaggcaactggaacaacaatcagtcacagtataatggcggtggctatcagcaaggctttgacaacggtcgtgcttctcaaccaatgggaaattcatcatttggcaatcaaggcggattcaacaatccctttgaaaatgcaccaatgcctggtcaagaaacaccagtccacaatgattttccattcggcaatgaagattctcagccagctgcaccatcaaacaatgatgccgctacgtttgatctaaacgacagcgttctgccaaccaatggccagcctgccgctgattcaaccaatgccagtgcagcaccaaagtcaaatgacactaagtctgctgacagcacggctgaagatgatttgccattttaatttaaaaccaaatacatgatttaaggagggtaatttcatggctcaacaacgtcgtggcggtcgtcgtcgtcgcaaggtcgactttatcgccgctaaccacattgaatacattgactacaaagacactgatttgctgaagcgtttcatctctgaacggggcaagattttgccacgtcgagtaacgggtaccagcgccaagaaccaacgtcgtctgacggtcgctatcaagcgtgcacggatcatgggtctgctgccattcgttgctgaagactaattcagctgataatttaaaacatgatggccagtgtcatcatgtttttttttgcctttattcaaacaatgatgaaaaacgtgaacggtgagttgccgaaccgattgtgataagataggaatatctagattgtcgttataggagaaaaatatgggtaatttctttcgacataacaattggaattttttaattaagaatcacgcagttcgctggaatttctgctatctggctttgatgacgatcatctgtctgatgttggcttttaaaaccagctggattctaggaacggtattattggcaattgcctttgtggggatctggatcagtgctcatcagctgcgtcgtctggtagttgatactgaagaatatatcaataatctgacatatcaggttcaacgaggccagcaagaggcgcttttagagatgccaattggaatggtgatgctgaaccatcgtggcatcgtcagttggatcaatccatatatggcgcgctattttcagtttgagcacgttgtcggcaagccattgacgcaggctgatgatgaattggctaaattgattgatgagcatcgtcatgataagggaccagcagtcgtttcgtggcgcgatcatcgatttgagtttttagtgcaggaccgttatcatgtctgttacctgctggatgttaccaaatatgagcagatcagcgagcgttatcagcatgagcagattttcctgggaaatatctatttggacaactacattgaacttactcaaggaatgaacgattcggccgtctccaacctgcataattacgttacttcggaattgagtcactgggcaaaggataatcatctgctgctgcgcgtgatcaatgaagacaactatttcgtaatcggtcattatcaatcactggttgagctggaaaagcagaagtttaagattttagacgttattcgcgaaaatacctccaagcagaattcgccggtaacgctcagtgtagggatcgcgtatggtcaaagcgatttgatcaaactggccgacatggcgcagcgcaaccttgacctggcactggggcgtggtggcgatcaggtcgtggtcagagaagaagatcaccgggcccgtttctatggtggccgtaccaatccaatggaaaagcgtactcgcgtcagagctcggatgatcagtcaggcactgcaggaattaatgacccaggccgatcaagtctttgtaatggggcattccaacccagatatggattctttgggggcctgtctggggatcagaagaattgctgaaatgaatggtcacgagtgctggatcgttttggacaaagagaaggttcatagcgatattgctcgtttgatgatggagatcaatgactatcaaagcattcgcgatcggatcattactccagatgaagcaatcaataaggcaaccgacagcagtcttttggtaatggtcgatcattccaagccaagcatgtcgatttcgccacagctttatgagcgcttggcggaccgcacgatcattatcgatcaccaccgccgcggcgaggaattccctgaaaatccgcttttagtctacattgaaccttatgccagctcgacttgtgaactgattacggaaatgtttgagtatcagccgcgggaaagcgagtcgctaaataagctggaagccactgccatgctgacggggattcaaattgataccaaatcgtttacgcagcaggctgggaccaggacgttcgaggctgccagctatctgcgctcagcgggggcagatgggctgatgattcaatatttcatgaaagaaaacgtccatagctttatggaaagaaatcacctgattgctaccgttgagtttttgaataatgataaaatggcgttatgtgccggtgaggatgatcgtacctatgatccagtcattgttgcgcaggcagccgacaccttattgcagatggatggggtcgatgcctcattcgttgttgccaagcgtgctaacgataaggtcggaatctcggctcgatcgatgggcaacatcaacgttcagatcattatggagaagatgggcggcggcggtcatctggctaatgctgcaactcagattgccggtaaaaccgtcagtgaggtaaaagctgagctgatcaggctgctgacgactggtgatcagtcagaagatgaaacagaaaaggagtactaaactatgaaggttatctttattaaagacgtacgtggccgtggcaagcgcggtgagttaaaagaagtcccagatggctacgctcaaaactacctgatcaagcgcggtctggccaaggaagctaccaaagctgccatgagcgaattaaaggggcagcagcgggccgctcaaaagcatgaggctgaagaacttgctgaagccaagcggttaaaggaagtactggaaagcgaagatacggtagttgagctgagtgctaaagccggtactgatggccgcatctttggctccgtttcttctaagcagattgccaaggctttggaggatcaattcaacttgaagatcgacaagcgcaagatcgaattgccggcaccaatcaaggcaactggctttgtccacgtgccgatcaaactgcatcatgacgttgaagcaaccattgacgtgcatgtggctgctaaataaatgaaaggccgtcaataaatggacaatgccagtttaagttcaacgcgtaccgcaccgcgcgatctggccgcggaaaaagccgttttgggtgcggcctttttgtcacatggcgcgattgaagaggcaatggagtttgtttcctccaatgacttttatcagcgcgcgcatcagatcgtttttgcggcgatggttaagcttaacgaccaagaaaagccgatcgatgtcttgacgatgcagtctgagctggaaagcgaacatcaattggataacattggcggcactgagtatttggcggagctggctggctcggtgccaaccgcggccaatgtcggctactatgccaaaatcgttcacgataaggcaacggccagacgtctgattgatgtggcaacggaaatcgttcaaaaaagctatgacggtcaagaaaacgtcaatgagctgttggatgaagccgaaacctcgattctgcgcgtttctgaatcaagcaatcgggctggctttcagcgtattgatactgtcttaaacgattcgatcaatcatgtctatgagctttccaaaaacgaaagcgatgtgacaggcctgccgactggttatccgcaattggatgaaatgacaacggggctgcatgatgatgagctggtaattattgctgctcgtccagccatgggtaagactgcttttgcgcttaacatcgcacaaaacgtagcaaccagctccgatgcaacggtagcgatcttcagtctggaaatgggtgctgaatcgctggtcaaccggatgctttgtgcacagggaaacatcaatgccaatcatttaagaaccggtcagctgaatcaggatgaatggaacaactttatggttgcctcaagtgtcttggcgcaggccaacatctacattgacgatacgccgggcatcaaggttccggaaattcgcgccaagtgtcggcggctggctaaggaaaacggcaatctgggtctgattgtgatcgactatctgcagctgattgaaggaagcaacccggaaaatcggcagcaggaagtctctgagatctcgcggcagctaaagaagcttgccaaggagctcagcgtgccggtaattgctctttcgcagctctcgcgtggcgttgagcagcgtcaggacaagcggccggtgctttctgatattcgtgagtcaggatcgatcgaacaggatgccgatatcgtcagctttttgtatcgagccgactactatgaacgagaaggcgccgatgatgatgacgaaaaagaagagaaaacctttaatgatcccgatcaaagccttagcgaagtcgagatcattattgaaaaaaaccggagcggcccacggggaaccgtcaagctgctctttaacaaagcctataacaagttcgcggcggttgactatcaacacaccgaaccggcttaaaagacaagcagcagttgagtgatcagcagctgcttgtttgttgtcttgcagcaaattcgcactaaaattaagagaggattattgagaaggaaaggagcagataaatgaaaaaaaccggctttaaactgcagtggctgcttttgggatcgtttttggggagtatcggcaacagttttgtctggccgttgacaacgatctatattcacgatcagctgcatcagtcgctgaccgtttcaggggtcgtattgcttttttattctggcgccaatgttgtgggcagctatatcgcaggattgctgtttgaccgaaaaaatccacgtcatttaatgattggcggcctgattttggcgatgatttcgatggcagtcttgatctttagcaatggctggccgatttatccggtaatgctgacgatcatcggcttttttaatggctggatcattacgatggtcaactcatttggtacccgtgtccgcagtcatgacggccgcttcgtctttaacatgctgtattttgccaacaacttgggcatggttttaggaactacgattgtcggaccgctttatcaattggcacataacagcgtgtcgcctctatttgccattacggtggtcatgtatgcctttttcctgctggtcgtagttatgtttttccagatcacgccgatcaaaccgcggcagcatcatacggtcgatgtcgatttcggcccgcaccaaggcaagctgccagctgccaacgcgcagatcatctggacgctttttatctcatttgccatcatctggatcatgtatggacaatggtcaagcaacatgtcggtttacatgacggatatggggatttcaatgacgctgtacagtatgctgtggacgatcaatggaattttgatcgttttgttccaggccgtgatcagctggctgaccaaaaaaattaccaacgactattattttgtctattttggcattctgacgtgcggtctgtcgtttgttctgctcctgtttgccaaaagctatgggatgtttgttttggcaatggttgttctgactttgggcgaggcaactgcctttccaacgattcccgcaatcatcaatcttttgtcgccggttgacgataagggaaagtatcaaggaatgctgaacgcctttgcttcgactggcaaggcaattggaccgttgtttggcggtttgatcattgaaagattttcatatcggccattatttgttatttgtgcggtttcgattttggtagttgaggccgtagtcattgcagtggtaatggctcgccagcatgctaccgaacagttctgataattcaaggtgagattatgttttacaataactttgatcaggtttatggtgaggatcgctggggaatggttggcaaggttggtgatccctttcgcgaagatcgtagtttaaagattgcctgcagcaagtgtcatcaaaagccgctggtaattgccgagcgcaactgggaagcaaccaatccggatcattcacagcgctatcagatcatagtggcctgcgccaactgcggctttgtggatgagtttgaggtcaacgccggccaggaaaataaaatcagtcggcttaaacatgccaaggttgttccgaccacggcagatttagcagattaaacaaaaaagatcgcgttttaggtgacgcgatcttttttggatgggtggatttaggtaacaaaaaagccaccgactaacagccgatggcgacatgatgggcagtcaggggatcgaaccctggacccacggattaagagtccgttgctctgccagctgagctaactgcccatgtccttaacaacagatattatattatcagatatcttaggctaatgcaatccttttcccaataaaaagttgaaaaaatttgcaattaatcgtcaaactgcctaaaataccgttttacggtaaaacaaaagcgattgaccaaatgatcaatcgctttgtaaacctctgatgggcagtcaggggatcgaaccctggacccacggattaagagtccgttgctctgccagctgagctaactgcccaaatttttaattgctgttgaacaccaacaacaattatatatattaaatgcattgaggtaatttgtcaacggttttagcaaaaaaaataatcagatttaaaagccctgatgcgactatgctataatagaaccgcaattcatggtaaaaaataacctctgcgactcgattcaaatgaattttaatcttattaacaactccatgggggaataattaatggctaaaaagatattggtagttgatgacgaaaaaccgatttcggatatcattaaatttaatttggaaaaagaaggctatgaagtcgtggttgcctatgatggcgaagaagccctggaaaaagtagaaagcgagcagccggatctgatcgttttagacttgatgctgcctaagatcgatggcttggaagttgccaagcgggttcgggctaagcatacgacgccgattatcatggtaacggctaaggattccgaactggataaggtcttaggattggagctgggggccgatgactatgttaccaagccattttccaaccgtgagctggtagcacgagtcaaggccaacctgcgccgtcaagaagctgccgcagcgccagcagccgaagcccagaatgctgatattcaggttggcgatttgacgattcatcctgatgcctacacggttaccaagcgcggcgaaaatatcaatctgacgcaccgtgagtttgagctgctgtattatttggcacagcatattggtcaggttatcaatcgtgagcatttgttgcagacggtttggggctatgattattttggcgacgtacggacggttgacgtgacggttcggcggctacgcgaaaaaatcgaggataatccaagtcatccgcaatggctgattactcgtcgtggggtcggctactatttggccaacccaagccaaaactaaaaaggttcgttagttttgaacagcaaaatcaaattttatcaaaccattcattttaaaatcgccctggtgtttgctttaatgctgatgctgaccttggaagtcgtcggggcggtttttgtgcgtcagttagagcaggaaaacctcaataccttcaagcagcagatcgagctgccgacctatgttgacagttcattggccaaacagctgagccgcaccaatgaaaaggctgctaaccggcaaatcaagcagattctctctgaagtcaagaacaacaacatttctgagattcgcgtagttgatgctaagggaatcgtgcgcggtaccagcaatgccagtaatcaagacgttgttggacaacgaacgaccgatgaagccgtcaagaatacgctgctcaacaatcgttcccatactgaaaacatatacgacaactccagtcgcaatcgctactatgtcaacgtcattcctttagttggcgcagcgaccaataacgtcgtgggcgccgtttatctgcgggccaatctggagagcgtttatgacagcatcaatagtatttcattgatctatctttctgccgctctggttactgtggtgcttgggcttggactggcggtcttgatttcgcgcgagattacgcggccaattgaagagatgcgcaaacaggcattaagaatcgcgcgaggcgactattctggtcaggtcaaggtcatgggaaacgatgagcttggtcagttggcgggagcggtcaacaatctgtccgtccgcgtagaagaggctcaagagtcaaccgattctgagcggcggcgcttggacagcgtcttgtcgcatatgagtgatggggtgctggcaaccaatcggcgcggcaacgtaacgatcatcaacaacatggccctgcagatgctggacattgattcagaagatgatgtcttgggcaagtcgattctggatgtcttagacgtgcggcgcgactatacggtgcgtcagctgatcgacaattcgcagcagcagacgttgtttgatttaaacgttgatggcaatgacatgatcttgagtgcctatttttcgccaattcaacgcgaatcaggctttgtctctggtttggtatgcgtcttgcatgacgttaccagccagcaaaaagaagaacgtgagcgcaaggagtttgtttccaacgtctcacacgagctgcggacgccactgaccagcgttaagagctacgttgaggcgttaagcgatggcgcctggaaagatcctgagattgcgccccagtttttgaaggtcgtgcaggatgagactgagcgcatgattcggatgatcaatgacctattaagcctgtcgcgcatggattcgggaacggccaagctgaatttggaatatgtaaacatcaacgagctgttcagctatattctggatcgctttgatatgattatcaaaaaagaagaggatcccaaaaagaagcgttataccattgagcggcactttacacgcaaggatctctgggttgagatcgatccggataagtttacgcaggtcgtggacaatattatgaacaatgccgttaaatattcgccggatggtggcgtgattaccgcgcgcctgctggaaacgcataatcatgtgattttaagcatcagtgatcaaggcctggggattccaagaaaggatctgaaccatattttcgatcgcttctttcgggttgacaaggcccgcagccgcaaacagggcgggagcggacttggcctggcaatctcaaaggaagtcgtcaacatgctgggtggtcagatctgggtcgacagtgtggaaggcaagggctcaacgttttatatctcactgccttacgtaccttatgatgatgaaggagatgactgggattaatggccaaaatcaaagaaaactggctgagcattctattagccgtggtcgtcattctcagtatgatcttttcggctttgctgtggacgaactcgcttggctatgaatggattgccaataatgactcggaaaaaggcgcctcacagcagacggccctgcagtcagtcggcgatatctatctgccaacgcaggtgatcctaaccaattctgatgagtcgcaaaagcttttgtatggacaaaaaaagaatctggtgctgacactgcgcaaggagatgcaaaaatggcagctggctggtttccgccgcgttgctcgcaatgattcttcagcttatctgaactatctgcgcaatgatgattcaatcatgctgtcttatccagatgccatggcaacggggatctttaatcagacgttttcaaaatcaatcgatactcaaaaaatgtcgcacatcaaccatatcgtgattccgcttaagggtcgcgatgtggtctatctgcttgatgatgattttacggtctatcgattgaatattactcaaaacgccaatcggtctaagctcaaaaagctgatccaaaattcgggtcagcggatcgacgttgatcataaaatcgttgataatcagccaaccgtgacctacccacatgccattaagctgccggtctttgcctaccagttgtcaacgcagaatattgacaatctgacgcagaatctgctgcggtcgaccaattcctcagcgttcaccgtcaagaaaaagggcaatgatacgacctatatggatggggccagcaaacggcttgactatcatcgcgatacgcatacggtcagtttcaacaattatctgggcaaggacagcacctatcagggagccagcctgtatcgtcatctgtataaacgcttgacggctacggggacgaatcttgattggatgcgttttgactcggttaatgaaaaaaagcagaccatcgttttccgcagctatgtcgaaggcttcccgatctttaatgagcatggctatggcgcggttaagctgcaggccaatgcggatggcgtcgaacgcggtcagttgtcattgtttggacttggcataccgttgccgatcaaggagtcgcgagtcaaactgccgccttcttcagtcgtctataatgagctgcggcaggctggcaaggataaggatgttactggcttgagaatcggctatcgctgggatgatcagaatgcggacagtaaagtcgttaaactggagccaacctactatgcctactatcatggcaagtgggttgcctaccagacgctgatcgacgataaataggaggacgcggcatgaattttaaacgaattcaatggatcttcgtgattgcctttgcgatctttgatatcgtcttagccagctattttttaatcggcactcactttacggcgatggtcaagcagcagggtcaacagcagctgatcttaaaggaaatgcataatgacgagatcagtttcgctgaactttccaccaagcagccaatgggatattatatttccgccaaccgggccaacagtcagctgaccaatgctgctgccaagcttgacgatcagacggtgcgcttgagcaatggaaccttaatcagtgaactaaacacgccgattaaagtcagcgtgctgaatccagaacggcagctgaacgactacatcaaaaattcgcgtcacgttttatacgggtcgcactatgtctacaacaaggccttgtccagttccagcacgatcgtctatacccagatgatggaaggccggtcggtgtttggcggtgaagggcagttgcgctttaaggtcagcaggaatcataaagtctatgcctatacgcagacttatctgaacaacattcaagtcttaagaccgcgctcagtcacgatcagtcagcaggaagccgtgacctggctgtataagcataactatattcccaacaactcaaagattcgctgggcaaaacttggctatacgaaaaccttgctgactaaggatcaaacagtctatgtgccaacctggtacgttgagatcaagaccaagaactctgatgacgtccaacgcctcagggtcaatgcattcaacagcacgctgatgcgcaatacgccagaagaaattgatacgacgcagctgaatcaataaccaaaagaaggaaaaacagcagtgacaaattcggatgacaagctttactacagtattttagccagtggcagctcaggaaatgccacctatctagagaccgctcatcatcgaattctgattgacgcggggcttagcggcaaacgtttagaagagcgcatggaggcgattggccgctcgcttaaggacgttgaagcgctgtttgtaacccatgagcacagcgatcacgttcaaggcgtcggcgttttggctcggcgctatggcatggacgtttatgccaatgctaaaacctggcaggcaatggctaaaaaagtgggccagatcccgctggctcaaaaaaacattattgagcccggcaaggtgaaggactttggtgatctggaagtcgaaagctttgccgtttcgcatgatgctgcctgtcctcagttttaccagatgcaccacgataatcagaccttctgtattttaacggatacgggctatgtctcacagcgcgtggctaaaacgattgaaaatgcggatgcctatttgatggagtgcaaccatgacactgaaatgcttagaatgggaccatactcctggccgctcaagcagcggatcctaagcgatgaggggcatctttccaatgaggagagtgcccaggcacttttggacgtaatcggcaccaacacgaaacaggtctttttggggcatcgcagtcagcacaacaatattcgctcgctggctcatctaacggttgccacgattttagagcagcatgatctgggcgtggatcaggattttgacttaaaggatgccgaacccgatcagccaagcaagctgctggctttgtaaatatttcaactaatattcatacttttttgttatactgaaaaaaaacaaaggaagtattagattatggcaggcaagcagttaatcgtcaaagttgcaggggtaggacttttagcgggcttgattggtggcggtgtttcgtatggcgtgggtaatgcgatcgtcactcatcagcaaaacgcagctaccaaagtgccatctggatcaaacaagtctgggggcactaagatcaataaaaatgaagataccaagagcaaccagtcaactgaggcctataatgcggtcaagggggccgtggtcagcgtcatcaacaagcaggccagctcttctgacgacaatgatattctgtcgatatttggtgcagactctgattcatccagctccaattccagttcgctgcagacggccagtgaaggttcaggggtaatctataagaagtcaggcaacgccgcctatatcgttaccaacaatcacgtggtttctggggccagcgcgctgcaggtgatcatgagcaacggcaagaaggtccaggctgaactggttggtacggactcaacgactgatctggccgttttaaagatcagtgccgctaacgtaacgacggttgccaagttcggcaattccaactcgatcaaggctggtcaagacgtcttggcaattggttcgccaatgggcagcgaatatgccaacacggttacgaaagggatcatttcggcgccaaaacggacgatcagtgccagctcaagcaactcaggcaccaataccacggtcattcaaaccgacgcagcgatcaatgccggtaattcaggtggtccgctggtcaacatggctgggcaggtcatcggtatcaactcaatgaagctggccagcgacagtcaaggaaccagcgttgaagggatgggcttctcgattccaagcaatgaggtcgtgcgggtcatcaatcaattggtagccaatggcaagattacgcggccatcgcttggcattgagatgatcgatctgagcaatgtggatggtcaagaccagcaagacatcctgaagctgccaaagagcattaccaaaggggtcgtagttatgaaggctcagagcggctcggcagctgatcaggcgggaattcaaaagtatgacgtaattaccaagatcaacaataaaaaagttaatgatggcggtgatctgaagactcagctctacaagtacaaggttggcgacacgattaagctgacgctgtatcggcaaggcaaacagcagacggtatcggttaagctgactcagtctgccagcgccgacagcagcagctcatcaaacaaccagtagcttaaaaacgtgttcttaatgattaattgattgttaagatcacgttttttatttgacgaattatccacaatttctgtggataaatgttccaaaaacggtggataactttaaattagctggctttgccgccacgcttcgtgtaaaaaactgcgatttaaaaaataagaatcaaattccttaatatcagtacttttagttatccacaagtaaagattgcagaattgtggaaaaccctttatcatatttattgatgattgataaacacagttatatcaatgggtttgaccgttgaatacaaacggctgttttggttttgaactgtggataactagtcgtggttagttgggagaagaattggtataattaccgaacaattgattaaaaggagttttaaatgaacattaagataattggggttggcaaattaaaggaaaaatactttaaggccggaattgctgaatatgccaagcgtttggggcgatactgcaagtttgagattgtggaggtcccggatgaaaaagcacccgaatcactaagccaagccgagatggatgaggttatggctaaggaaggcgaacgtatcctaagcaagattaaggatcgcgagtacgtttttgccctggcaatcaatggcaaggaacgcagctcggaagaatttgcccagacgcttaatcagttggcaacttatggtcacagcgacattacgtttgtgattggcggatctttggggctgagtccggctgtcttaaaacgggccaatgagcagatctcgtttggacgctttacgctgcctcaccaattgatgcggctggttttgactgaacagatctaccgggcctttacgattatcaatggtcttccctatcataaataaaggtgcgctgaattatgaaatattctcatcgtttaagtgatgccgtgcatattctgacctatctggagatctatcatgggcaaaaaatcagcagtcaggatctggccgccagcgtggatgccaatcccagcctgattcgcagtctaattgccaaaatggtcaaggccggcattctcaagccaaagtcagacgcgccggcaccacagctgagtcgcccggcagctgagatcacgctgttggatgtgtattacgcagttgaagaaaatcaccatctgctgcatgtcgatgaacagactaatcagcagtgtccagtcggtaaaaacattcagccggtactaggcaaggcctatgatcagatccaggcagctgcagaggccatgatgaagcggattacgctgcaggatgtcgttgacgaggtggctgatcgaatcaaataaaaaagacgctcaattgttgagcgtcttttttatcaagagcggaaacgcgttttctaggcgatgatctgtcttgatatgatttggtgatgattaagcagtctgattaatgcggcaccttaagcatgaaccagtcatgcagcagataatgatgcccggccgtcagatcatactgaaccatgcgatagtcgtcaaacagccgcatctgctttagagaaagcgtcgtctgcaggccgtcttgatcaacgtattcaacggccgtgctgtgtggacggttgctgtgactgtgaacgttgggatccagcgtaatggccggcagcttttcatgaacctgtgtcaagagcgcgtagtatggtgaaaccttgagatccatctgcgccattgccatggggataaactcgtttggactgacgattttggctttgtcaacgcggctgtgattgattttttgagcagctggattgctatagataaagtagtcggtttcgtgcatcaccagcccatgctcagccatcgaaacgccattgtagataccgggcagatggtcgccataccagacaacggtggtcggctggctgctttggtctaaccggctgatgaattttttcagtgcctcgtcagtatagtggatgccctgtgtgtaggtctcgatctgctgctgagcctgaggagttcgataggccgttccgctgaccttgtagttgttgtgatgataaaaattgtcgtatggcatatggttttgcatggtagccaattggatgaactggttgccatgatgattcctaagatttaacaatacttgctgataggcagaccagtcatcaatgcggggactgttgtcgatcttatgcgtataggaaagtcggctgccgccatcaagatgatagaaacggttgaaaccaaatttgcgatagacttttacacggctgtatagattggcggtaaacggatgaattccatcactgtaagaaaacagctgattaatggatacggctcgtttttggtagggaaccagctgggaatatggcgttggcatggttggcgaaaagttgacgatagaaagtccggtcaaggcttgatattccatattggccgtcccgccgccataaccagtgctgatcatcaagccgctggtcgtacgatgcttgagctggtccagataaggcagtggattgccgctgacttttagatccggcacgcgacgcggatcagcaaaactctcgcttaagataaagacgaggcgctgattgccaacgctggcgtgagttcgctgccggttgatgattttagcctgctgctgatatttttgaccgattttttccatgcgagcttttgaatatcccttgggtttgtccattacgcggacgtcaacgttattggcaaactgcaggagcgtgccgttaaccttggcaccacgcagctgcgcgtaaaaataaggcgtgtcgtcgactttctcagcccagcgataggttggtgaattggtgtgattgataaaggcaaaaccgcttagataaaggatggcagctgtgccaatcaaatagcgccactgaatcttaaggcggtattttcgaccatggcgaatctcgattgctacggcaaagccaagcagaacgatgacgacaccccctgcggccagcagaatcgttggctcgaccatgcctagcatttccttaggtgcggttagcgtagccaggtcagttggcagaatcggctcagcccgtgcttgaatcttaagcagcgatgcagtcagccagccaccatagataatgatcgttaaagcactgctgagccaccagcgattggtcaaggccattaaaattccggccagggccatcatgatcattacattggcccagacgatggcattatgatctgtgatgatccactgcagcatgttgagctgccagttccaaaggtagccaaacgaccagatcgtcattccccagataacggcggcggtcaatagaaacggccagcatttggcaaaggttttctttaaaacgtcccagccagcacctaaatcaaacttaagctgccagtcaaagcgggtcgtccactgactgagcaaaacggcaaggctccagctgacggcccagcctgctgcaatagcaatcgataggtgccagcgtggctgatactttaagaacggtacgaatagtttggggatggccagcaaattaagcatcaaaccgcccaaaatggcataaaagctgcttaatgatcgtgatgacagcagcttgaccagcgtgatgatgactaggattgccattgccaggtaggtgttttgaaaggtgttgatggcgacctgatagtgagtggtcaaaagcagaccatcatgcggattatagctcagctgattgatattgaaccaggcagccagacacattgccaaaaagaccagcaaatcgccaattatcagccagctggtctttaatgactgcagcagtgcctgatcgctgcccagccaatcacccatggcaaaaaggtagccaaaccataaaaagctgctgccgcctgccagacctaagacccccacggcatggttgagattgagcagccaaatcgccagcgtcaagataagcaaagtacgccggcgctgtttgatcgtgaattgatgcagccgctttttcagccagggggagaaaagcagcagtgccaaataggccagccaggtcacaaagatgttttggacgacatagcgctcagcagaagggacactttccaaaacggccggctgcgtgagatgattggccaagccaaacaagatcaggccggttcccgctgatagaatcacggcggtttgccgatgcggaatcttgatgtcaaaagctcccagcatcattggcagaatcaaaacgctcaaagcggccgcgtttttaatcagccataaaaacaaaaaagactggccagcagcatgagaaagcatttggcgagcggtagtgctgaccgcgactgtcgtgatcaaaagaactgttagccaaagcatgctgaaccagttgatggttaatttctttaacttcaatttaaatctccctaacgttttcaaatatcctcatataatatcgaaacggattagtcagcaaaaatcaatcgacaaagatcggatgagtgtcgcgttaaagtatttaaaacgtttaatgtcccaatagagcaaatgaaatgacggttaggtattagtgaatacggattaaggagcctgctaaaggatggctttttgaaggaaatcagatcatgaatggctacggggactaaaattacctacgatgccttgtttttttgccaatgatcgccaaaacataaaaagtcctgcaaaacttcatgagtcttgcaggactttgcttaatcttttaatagttctttggcagctttaatctgggctttgacttgagaaaagccggttccgcctgctgaattccgtcgttcaacggctacttttggctgcagcacgtgataaacgtcttcagtgatcaaaggactgatcttttgatattccgccaggctgatatcgctaaggttcttaccggtcttcaatccctttaagaccagctcgccaacgatttcgtgcgcctgtctaaatggaatgcctttgctggccagatagtccgccagctcagtagcatttgaaaaatcattgtggacggcatgttccatcttatcttgattaaccttcaacgtttcaaccatgccagccatgatcttgagactggggatgatggttttgacggcatcaaaaacgccttccttatcctcttgcatgtccttattgtatgcgagcggcaggcccttcatggtggtcaaaagtcccatcaagtcgccatagactcggccagtcttgccccgaatcagttcggccgtatcaggatttttcttttgcggcatgatcgagctgcccgtggaataggcatctgaaagctcaatatagccgaattcatagctgcaccagtagatcaattcctcgcacatccgcgacaggtgcatcatcaaaatgctggcgctgctgagaaattccaagacaaagtcacgatcagataccgcgtccagcgagttgtgataaatatctgagaaaccaaggtacttcgcactcaattgacggtcgattggaaaggtcgttcccgccaaagccgccgcgcccaacggagagacgtcggtatgctgcatgttgaattggaatcgttcagcgtcacgctgcagcatctggaaatatgccatcagataatgaccatatgagatcggctgggcatgctgcatgtgagtatagcccggcatgatggtttcaacattgtcactggccttgtcaaccaggatctgctgcagctgcttgatggccgcaattacttgaggcagccgctctttgacgtacagatgcagatcggtggcaacctggtcgtttcgactccgcccagtgtgcagcttgccggctaccggaccgatttctgccgtcaagagtgcctcaatgttcatatgaatgtcttcattttcaatattgaaagacagtttgccttgcttcagcttttcagcaagcgtctccagtcctttgatgatggcatcggcgtcggcagtgtcaaggatcttggttgccttaagcatcttgacatgggccaatgatccttgaatgtcttcttgggccatctcttggtcaaaggtgattgaagccccgaatttatttaccaaatcggagccagactcttcaaaccgtccaccccacatccgcttaatcggcactgatggtttccccctttacgctaggttcagattggttcttggcaacattggcctgcacttgagcatagaccttgtcaggcagttcccaaagcttgatgaagccaccagcagcttcctgatcaaattcatcggcagaggtgtaggtagccagattcttgtcgtataaggaattaggcgacttccgaccttcacagacaacgttgcctttaaacagcttgacccgaaccgtgccgttgacgtctttttgcgtttctttaatgaatgcttgaatggctttcattaatggcgagtaccacagaccattgtagatcaggttggccatcttcagttcaacgaccggcttgaagtgagctgcttcacgttccagagtcaggtcttccagatctttgtgcgccttcaaaagaaccgtagctgcaggacattcgtagatttcacgcgacttgatgccgaccagccgattttcaacgtgatcgatccggccaattccgtgcttgccggcaatcttgtcgagcttcatgatcagttcggccagtggcatggcttcaccgttaagggcaaccgacttgccgtgtgcgaattgaatctccatgatttctggcgtgtccggcgttttttcaattgggttggtccggtcataggcgtcttcaggagcgctggcccatggatcttcaagaatcccacattcattggcacggccccacaggttttcgtcaatcgagtaggggctttccatggtgattggaacgggaatgccattcttcttggcgtagtcgatttcttcttcccgtgaccagtgccagtcacgaatcgggtcttcaatcttcatgtcgggagccagtgcatggatgccggcttcaaaacgaacctgatcattgcctttcccagtgcagccatgggcgatggcggtagcaccgtattccttggcaacggcaacgagcttttgaacaatcagaggtcgggaaagagcagaaaccaggggatattcttgttcgtacatggcattgctttgcagagcgggcaggacaaagttttccgcaaagtcttctttggcatcgataacgacggatgcataggcgccgacttgacttcctttggccttgatggcttccaggtccttgccttcaccaacgtcaatacagcatgcaattacgtcgtagcctttgttcttaagccaggcaatagcgactgaggtatccaggccgccagaataagctaaaacgattttttccttttcttgtttcataagttcttcctccgatatttctgtttctgattgctcttaatttataattgatttataaattgtcattaaatatacagaaaaacgaataaaaagtcaacaatcctttatattttttagttttatgcaaaagataaacacgagcaatcaaaggctgcataattgcgtcaaacgtttgcagcatggtatttcacgtccttgggaactaaagtgagaaaatggttaaaaatttttatccatttttctatgcactaagcaggccgtcatcagtcagcttgcttggttattgattcaatattcttgaaagcgatctcaaaacgaagcatataaaaggaagagaacctttttgacttgataaaaaatatttcacaaatgtggtattttacacttgtgttataacgcggatgtgatataataaaaaacgtaaaggaagtgagcatggtgcgaatcgacatcaagcattatttggacgtgaatcacttgacgatctatcaagtgtccaaacgatccggctacggctacacgaccttgcacaaatcgttcaacaaggagcagaccagtgccacgccgctgaatctgcgcgacttggatgctttggctcgagcacagcaccgcaagatgtgggaagtgctaaaagagctggaagagcattacctagagcgataatcgcatagtgtagcagtaggaggtcgagtgtaacagcattaggccttttattgaccactgatttagcgaattacaattgaatattaacaatagggggaatagcttatggcacaaattccagtagatccattcgatgacatgaatgacatttttaaccagatgatgggcggcttgaacggttttaataccgaaaatcgccgctatctgatcaatggacgtgaagtgaccccagaagagtacgctcagtatcgaagaaccggcaagctgccgcaagcagatgtcaagcagccaactgcgaaggcacctaaaaaaggcggcatgctggccaagctggggcgcaatctaaccgaagaagccaaggctggcaaattggatccagtgattggccgtaacaaagaaattcaagaaactgcagaaatcctcagccgccggatcaagaacaatccagtcttggtcggtgatgccggggttggtaagacggcggtcgttgaaggattagcccaggctatcgttaacggcgacgtgccagccgcaattaaaaacaagcagatcatcagtatcgacatttccagtctggaagctgggacacaataccggggcagctttgaggaaaacatgcaaaagctggtcgatgaagttaaaaaagccggcaacgtgatcctgttctttgatgagattcatcagatcattggtgccggcagctctggcgatggcaatggctcaaaagggatgtctgacattttgaagcccgccctgtccagaggcgagattacgattatcggggctacgacgcaggatgaataccgcaacacgatcatgaaggatgcagccttgtcgcggcggttcaatccagtggttgtcaacgcgccaagcaaggaagacacgtttaagatcctgcagggaattcggggtctgtatgaaaagcaccataacgtaaccttgcctgacaacgtcttaaaagccgctatcgactactcggttcaatatattccacagcgcagtctgccagacaaggctattgacctggtcgacatgacggccgcgcacctggcggccaagcacccagtcaaggatgccaaggagattgaagctgagatcaagcggattgaacaagaacagaccgcagccgctgaaaaagaagactatcaaaaagctcaagaatgcaaagacaagattgccgaactgaaaaaagaactggctgattactcggcttccgagaaagttacggcaacgcctagtgatgtcgctgactcggtagaacggctgactggcattccggtttccaagatgggcgccagcgatattgaacggcttaagggcctggctggtcgcctcaagagcaaggtcatcggccaagatgaagccgttgatgccgttgcccgcgcaattcggcggaaccgggccggctttgatgaaggcaatcgcccgatcggcagcttcctgttcgttgggccaactggggtcggtaagactgaactggctaagcagctggctttggatatgtttggcaataaagacgatatcattcggctggacatgtctgaatatgctgaccggacagccgtctccaagctgattgggactacggctggctacgttggctacgatgacaacagcaacacgctgacggaaaaggttcgtcgtcatccttactcaatcgtgctgcttgacgaaattgaaaaggctgatccacaagtcattacgctgcttttgcaggtgctggatgatggtcggctgacggatggacaaggcaatacggtcgactttaagaacacgatcattattgccacctccaatgccggctactccagcgatgctatgatcaaggcagccgacaataaggaagaaagcctgaccaagcggctggagccatacttccgtcctgaattcctcaaccggttcaacgccattgtcgaattccaccatctgactaaagaagatcttaagcaaatcgttgacctgatgcttaaagacgtcaacaagaccctggctaagaagggcatggacgttgcagtcagcgaggaagccaagaacttcttgatcgaccaaggctatgatgaggcaatgggtgctcgtccattacggcgggtcgttgaacaacagattcgcgaccaggttaccgactactatctggatcatctggacgttaagcacctgcgcgccgacatgcaggatggcaagctggttatcagtgaaaacaaagactatcagacaccaaaagctgaataagcaaatcaaaaagagctggccaaaaagccagctctttttttatcggcgttgattcaagtagatggccaaaacgacgatcagcgccaagacgataatcgccagtcgcggattggacttgaacagttcatgaaacagatgatactggccgattcccaatggcattgagtcaaacatggttgttcattccttttttaaacctttcagcaataactgccagatttaactatatttcgaaaaattatagcgcaattaagttgttggttcgaatcaaaaggtgcgttagaataaaaaaagcaagcgaaaggaaggtagaacaatgcttttaacgacgtggcagattatcaagttgattatttggggaatcatcataatcaatgaaattgccgcgctttatacggtgtttcgtgaaaagcgcgatattgccgcaacctgggcatggctgctggtcttaaccctaatcccggtgctgggctttatcttatatgcatttttgggacgcaagctgccgcaggacaagatggagcggatccaatcgcaaacggaactggaactgagcgcggccttagaagaacagaaaaagcagtttttggatatgccacgaccgaaaaaacaaaccatgcgcatgtatcgacgaacgatcatgctgttccaaagcatcgacaatgcgtttttgacccggcataatcaagttgatatctatacggatgggcaaaaactgtttcaaaagatgtttgatgatctagccaatgccaaaaaaagcatccacattgagttttacacgatctataacgaccggatcggcaatcagctgcgtacgctgttggaacagaaggcagcagaaggcgttgaggtccgggttttatatgactcgtggggatcgatgggcgttaagcgcagtttttatgatgctttaagacaaaatggcggtttggcggaacctttcttgatgacgcacagcaacttgtttgattttcggctgaactatcgtgatcaccgaaaaatcgtcactattgacggcaaaatcggctacgtgggcggctttaacgtaggtgaccagtacttgggaagactacctaagtttggctattggcgcgatacgcatctgcgtgtgatcggcggcggcgtctactcattgcagcagcgatttattcgtgactggaatgcctcccaacgccacgtccaggacaagatcatctactatcggccatattttccgccgattacggttaaacagggcaacaccgctttgcagatcgtttccaatggtcctgaatcgccgttggaaaaaatcaagcttggctatctgcggctgatcaacgcggctcaggatcatatctggattcaaacgccttatctaattcctgacgacagtgtcttggatgcgttgcgaattgccattcattctggtgtcgacgttcgcatcatgattccatgcaagccggaccatccctttgtctaccgagccacgcagtactatgctcatcaattggctaacgaaggggcaacgatctatttttatcaaaatggcttcctgcatgccaaaaccatggtcgtagatggcaagatggcttcagttggatcggccaacctcgattttcgcagcttcaagcttaactttgaaatcaatgcctttatgtatgaccatcacatcacggatcaactagaacagatctttgttaatgatattcgtaactgtaaggtaatgacgccggaaatgttcgcggctcaaccagtatggctgcgctttaagcaaacgttctcgcgcctgttttcaccgattctgtaatgctggatgggcggtacaataaaaaacacgatgaccaaggattggccatcgtgttttttatttcaacgggttaggacgtcagctggactgacacatcgaaaaagttatcattgaggcgattaaaaaccaccaagtatggagtagagagatttgaatttgagataaaagatgactttattgggatggaagtcctaaccttgacttagttattgctcactaagtaacaattacattaaaccacttttatatgacaaagacaaccaagaaatcaaaatttgcgatttttattttaaaacggcttgaaatattgatattaaagggatttttaacacgagacattattgatcataaaatcacaaactttgctgattataattaaaaacagaattgacagtcgcggtctttaacggcgggggtgcatgataaaattaagtcaatcaatcaaaacggaggagcgatttaatgagcagcttaaagtttattttggggacagccgcgtatgatcatcaggctggtctgctggctgaaatgaaacagcagctggccgctgatcctaaaggcgagttcttctacctggttcccaaccatattaagtttgcaaccgaaatcgaagtactgaatcggctgaaaaataccgctgagcaggatccggatcagccatatgctcagatgaaggtgcaggtactgtcgttcagtcggttggcgtggtatctgctgcgcgacacgccggcttttcaggcaccacggctttcgccaacggggctgacgatgctgacggctcagattgtcaaccagcatcaaaatgaaatgcagatgtttgccggcgaaatcaagcgcccaggttttatcaaggaactgacgcagcagctgactgaactgcagacggctcggatcgcaccgactgactatgcggccatcatggaacgtgcgcagacctgggccaaagacaatcaccagatcttagatgatgtctggcaggctaagcttaaagtcatttttctggtgtatggcgaattcgtgaaggctctaggcgactatcaagatatcagtcagattgacgcgcttttggtgaagtatctgcagcaaaaggatctttcacatgcctatttttatctggatcggttttcgcagtttacggctcgtgagctgcagatcgtacaagcgctgatcaaaaatgcccaagcgaccacgattgcactggttttggatcgcccataccaaaatcagctgccagatgagcataatctgttttatgaatcagggcgtcagtactatcgcttggcaaaattcgctaagcaaacgccgggcgtcaagcagctggcagacgtgatggccgaccagccgcgtgttattgcggatctgcaggtgctggatcgggtcttggcggctcaggctcagatgctgaatgagctgccgagcgcgccgcttcaagattcccaaagcattcagttctttacggcccccaatcgcgtggcggagctgaatctgatcgcagccaagattcgtcagctggtcagcacgggtaaataccgctatcgggacttcttgattttgacgcgccatctggacggttatgccacgatgcttgaatcggtttttaaagcgcatgaggtgccgatttttaatgaccttgagcgcttgatgaacaatcatcccttggtaaatctgattgaggcgctgtttaaggtctatcagcgtcattttgcaaccagtgacgtgatgcaccttttgaagacaggattgctgattccgcaacaaatgcatgatgatctaggccggcttgttacccgaaaatatttccaaaaggccgtctaccaaacggaaaactggtgtctccaatatggccgcacgggtgatgattggctgagcagtcagcggtggcattttgatcccaacgtagatgctgaagagctgcggcaccatccggatatgcagaaacgcgatcagtatgcctcggcaccattaaacgtcgtcaaggattacgtcagcggactgcaaaaatttttcagccagcttgatcaggcagaaaacggcgcggcggcagccaaggcactgtacggctttttggtcaatgccggcgttgtcaagcggctggaggaatggtcgattgccgacagccggtctgatctggcaagggcgcaggaacctcagcaggtctggcaagtcttttgtaatctgctggatgagtacgtgcagatcttaggtcagcagcagccatttttaattgatgagtttgccgatttattgatggctggttttgaggccgcgcaatactcgcagattccatcaaccttggatcaggtcgtgatttcggaaaccgggatcgtgcaaaccactacgcgcaaggtcgtctttatgatgggcgcaaccagcgacgtcatgccggaagctaagtcagctacgggactgcttagcgatccggaccgtgagctgttgaatgcctgtctggatgacgaacagtttctgccagccagcggtgttgaaaaaatgagcaacgagccgtttttaaactacctgggctttatgagcggccgccagcgtttgatcatttcggcaccgcagatcggcaatgatgaaaaaccgcttagtatgtcgccttatatgattgatctggcgatggcgtttgatcgctgggatgccgacaagaaacgtctcaaggatgatctgccgtttatggctcagccacaggataccgcgaccgcagcctggccgtttgtcagtgcgccatttgcagtattgggtacgctgatgcaggttaagcggcaggcattggatgatcatcagccattgggcgcggcctggaactttttaagcgaactgatggcgcaaaaggtcaagcgctacgactggacggcgcaaagtcttgactataccaatgaaacgacgccgctgccagctgatctggcagaacggctgtatggtcaatgggatccagaagcactggatgcacgaacgcaggcactgcagaatggtgaacggccaggagaaatagcacccgcactgcagcatgacacgctgtatgcctcaatttctcaattgcaggactattatcgcaacccatatgaatacttccttaaatatggcctgcgcattcaaaaacgagaagagctggaaatctcggccgataaatccgggacgtttttccatgacagtctggatcgcttcatgcggctgcttagtgagcaaggcttagcactccgccaattgaccgatgatcagctgcagcgtctcacccatcaggcaatggcctgggcctttgatcagcagccacagttgattcaattaacgcagaactatcagcgactggcctttcgcaagcggcagctggaacgtctggtcgaaacgatgacgaaggttttgcgtgatcagtccaagctgacgcgcgccaaaaacgtggtaacggaacagaaattcggcgtgatggacttgagcgatcaagggcagcagagctttgcgccattgatctacccgcttgatcatggtcataaggtctatctgcgtggccggatcgaccgggttgattccgttgagctgaatcaggagccttatttgatggtggttgactacaaatccggcaatcagcagtttaatctggtcgaggcctatgacggcttggcactgcagatgctgtcatatctaaacagcctcagccaccagctcaagctgaatcagcagtcggccaagatcgccggggctttgtacctgcatctgcagaaccccgtctttaaatgggaggatctcagcggcagtctggcatctgaagaattaaagagtcatcgctatcgaggggttctactgaacgatcggcaattgctgaatgatctggatcagggctttgacaatttcaaaccgcagattctgagcctgcgtgcctttaagaacggcaatatcaaggccaacagcggtatggcactggttgatgagtcacagctggctgctcttttgcagcgtaatcaagaacgcatcgtcaacgcggcgacgcagatttttgcgggggacacgtctttgcggccatatcagcttgataagcgcgacggcctgcaatacagcgactatcaagatatctaccgcttcgacccaatgctggatcaaaagaactatcgcgacgttttgctaaccgagcgcgacgtgcaggaaaagctgaaacaagaatcacagggggaaaaacatgagtgataccaggtttacgccacagcagcagcgagccattgatgccagaacccatgatattttggtgtcggcatcagctggcgcggggaagacaacggtattggttgaccgcgttatcaaaatgctgaaagaagatccgaatctcaatatcgatcagctgctgatggttacttttaccaacgaagccgccgataacatgcgcgagcggattcggcgccgtttggaaaaagaggccaacaaccgtcatctgcgcgatcagatcaaccggctggcgattgcccacatcagtacgattcatgccttttgccaacagctgatcaagcgctactactacttgattgatctggacccacagtttcgcctgctgactgatgaaaccgagacgacgctgctgcaagatcaagtctgggatgatcttagagaagaactgtatgccagagacgcgctgattgaagatcccagccagcgaccatttgagcggctggtgatgaatttcgtcaacgaccgcagtgatgacgcattgagcgatatcgtgatggaactggatcgagttgccaacgcacaggccgacccgcatgcctggctttggcagctacctaaattatatgagctgaatgatgaagagctgaccaaatcaaacttttaccaaaaacagctgctgccggttctgcagcgtgaactaaagcagatccatgctgattttgtcacgctgactcatcaggctcaggcagcagacttgacaacgacttcgcagatgctggctgacgatgccgaacgggtagagcagctgctgaaactgaccgaaaccggtacttgggacgcaatcagcgctcaactgaccaaaaaaatgtttccaacgatcaaaggccggcccaaaaaagatgaaacggctgcattagcggcatacgatgcaatcaaggattcacgcaacgagctgcgcgaacagattcaaagcctgcatgatcactactttatggatgccaagctgctgatcaagctgtcggcaggggccaagaaagtcgttgatgagttggttcaggtagcctggcagtatcgccaaaactatcagcagatcaagctgcagcggcacctgcttgatttttccgacttggagcactatgcctaccagattctgacggttgatacgaatgccggtaagcagactttaaagaatctgcagcggcactatcgcgaaattatgattgatgagtatcaagacaccaatccgctgcaggaaaagatcctccagcagctccatgatccaagtgtcaaccggctgtttatggttggcgacgtcaagcagtcgatctatcggttccggcaggctgacccgacgatgtttctgcataaatatgaaacgtttgtcagcgaagatcagctgcagccggattcgccaggcgagctgatcaatctggctgaaaacttccgctccatgcctaacgtgaccgattttaccaacctgctgttcagtcagctgatggatcatcaagttggtgagatggactatgatgaggctgctcatttgaaatttgccgcgcaatggtatcctaaagagcaggtcaagccagttgaggtgatgctctatgatgccaatgctgaggacaacgacgccaatgccagtcatgaggctgatcgtcagtcaggcgagctgcggatggtcggcatgcggattcgccaaatgctggacaatcatgaacagatttttgatcccgacgctcccgatggtcatcgtgacatcaagccaggcgatatcgtgcttttggaacgggccaagtcaatcaacaacacgctggtcaacgagtttgcctcgttgaatattccattgaccgttcatggcgtggaaaactactttaagtcgaccgaggtacggacgatcgtttcattgttgaagattatcgacaatccataccaagacattccactggttgccgttctgcgctcgccaatcgttgggctgacagaaccggaaatggcctatctgcgcatcaatgaccggcatgatcagtatttccaggcattggagcgtttcgtgacgacctaccatgacttaaagctgcttgatgatcacccatatggcattgatctggccgtgctgcatcaaaagacggcccgctttttggaccagctgcatgagtttcataacattgcccagcgacgttcattggttgaattgatttggacgatctatcaagaaactggctatctggactatgtggccggcatgccagggggacagcagcggcaggccaatctgcatgccttgtatgaacgagcgcatggctatgaagaaagcagctttaaaggactttatcaattcattcggtttgtcgaacgcatgcaaaaacgcaatcaggatcttggcgaggctccggcacagcttgccagcgataccgtgaacgtcatgacgatccatggtgccaaggggctggaatttcccgtggtctttttgatcgacacggcgcatggctttaaggatgaaaacggcaaggcgattattgatgccaacgcgggtttgggaatcaagtatcttggccgggccgcggatcaggcacctgatgcattgccgcagattctctatgacctgccgcagcgcaacctgattattgaagcccaaagagccagcagccgagcagaggatctgcgggtcttgtacgttgccttgacgcgagctcagcagcgtttgatcattacaggctcagtcaatgaaaacaaagaaggcactggccgctcaggattgaagcaggccgccaagacttggcaaaaagccctgcagagcagtactgccgtcattggttcccaggctcggctcaatgcccattcgtttttggattggatcggcatgggaatggtgcgggcagctgattttgacctggctgatctggggatggaagccaacgatgatgaagccgcctggcagaccagcgcaggtgatttttttgcccagcgctataaccagacgcaggttcaaaaacagcttgatgatctggcggcgcagcgtggcgaacaggctaaggagacgaccgcgccggcaacccagctgacgcctaaccagcagcaggcctttaagcaggtcgtggaaatggaatacccgcatcctgaagcagtgttgacaacggcctatcaagcggtcagcgacatcaagcagctgtttgccgtccaggaccctgatgatcgtgaaatgggccgactgacgtttgatcagcagcaggtcaagacaagcggttggtatcgcagcgatgattttgcccagcctaagtttatgacgactcaaaaacatcagccctcggcaactgaaatcggaacggcaacgcacctggtctttcaaaaacttgatctgagcagtggtcaggtagatgccaaactggtcagtcaaacgatcgctcaactaagaatggatcagctgctaagcacggatgaactggctgatgccattgatattgacggcatcgtggccttttatcaaactgagcttggtcggcggattttggcgcacgcggccagtctgcggcgtgaggctcctttttccatgctgatcaatgccgcccagctctttaagaatctggcagatgaaaaagaggatgctcccgtattgattcacgggattattgatggctattttgtcggtgatgacggcttggaactatttgactataagaccgatcatgttgatcaatcaacggcagcgcttaaggaacgttctgagcagcgtatcgttgatcgttacagcgggcagctgaacctgtacgctggcgcactgcagaatgtcgaacggcaaaaggttgcgcaccggtggctgtatttggtggctacgcgtgaattaaaagagatctaaaaaatagggctcggcagctgtcgagtcccattttggctatttttcaatgatgctttcctgcagcagaccgtcaaaaaagtgctgtagtgagatctggccgccattgttttgaacgcctttaagcttgagtacttcattatgtacgtttttgtagccgaaaaggttgttggcatattccattaagatctcgttttccggatagtccaaaaacatattggcaagattgttgaggccgacttttaaagcccggcgaattctttgaaagacgattttttttgtgtgtgcgtcaaaatgcagcacgctggcaaaatcaatgtcgctgaagcccagtttttgatccaccattaatgaaataatgcgaatgatgtcttggcagccggtttctgccgtgatgcccaaaaagcgcagaatcgatttgatgcggtcaacctgttgccgctgctgagactgtggcagatgatagggggcactgctgccaaccagctcaaagatgcggttgagcttgtcggtcatcagcgtatagccggcaatgagtcgaataatatgcttggtttcggccaggttgattggcttttctaagaagaagtcaatgccagcctggtaggcagccgtccgcgtcttagcatcgcttaccgaagacatcatgataaaatgcggctgactgttggcggctttaagcttttcaatcagctgaattcctgacattactggcatgccatagtcgaccagcatgatgtcgacgcgcagccttaaaaggtcatcataggcctgctgaggattatcggcgaccccaacgattgaattgttaaagtcgttttcaatcaaatcgctaagcagatcaatggtatccggatcatcgtcagcaatgtaaaaattcataaaaatacctcctaaagcataaacgttctcaaattgaagtttttggaaacttgttgatgcttcttgaattttaacatttttatttaaccagcaacatccctttttgagcggtgatgttttatgcaccgatttaatgcatatttctaagatagcgtttacattccttgatatatcaagattaagataacctaaaaaataaatttttcttttgaagtattttgaatcaatgtgaagattactgaaaacggtttctatgatagagactgtaattaagaaggaggaacttaaaaatgtcatttaacttacgtaaccgcagtttcttaaccctggctgactttaacacccgtgaaatggaatacatgctgaatctggccgaagatttgaagaaggctaagtacacgggcaatgaaggcaagcgtctggaaggcaagaacattgctctgatttttgaaaagagttctactcgtactcgttgttcatttgaagttggtgccaaagacgaaggtgctcacgtaacttaccttggcccatctggttctcacattggccacaaggaatccgttaaggacacggctcgcgtattgggtgggatgttcgatggtattgaataccgtggcttctcccaacgcaacgttgaaattctggctaagtactctggtgtgccagtttggaacggtctgactgatgaagaccacccaacccaagttctggctgacttcctgactgctaaggaagttctgaagaagaactaccaagacatcaagtttgcctttgttggtgacggtcaagacaacgtatccaacgctctgatgctgggtgccgctgttatgggtatggaataccacgttgtaacgcctaaagaacttgaaccaactaaggaaacgctggacaaggctaacgaaattgccaaggaaactggtgccaagatcgtcgtaaccaacgacatcaaagaaggtgtcaagggcatggacgttatctacgctgacgtttgggtatccatgggtgaatccgacgacatgtgggaaaagcggatcaagctgctgaagccttaccaagtaacgatggacgttatgaaggctactgaaaaccctaacgttatcttcgaacactgtctgcctgcattccacaacctggacactgaagttggtcgtgaaatcgaaaagaagtttggccttaaggaaatggaagttactgacgaagtctttgaaagcaagcactccgttgtcttccgcgaagctgaaaaccggatgcacaccatcaaagccgttatggttgccactcttggtgaataattaaacatccacatcattaattgattctattaccaagggggaactgcatatggctaaagtagtagttgcattagggggcaatgctttaggcaagacacctgaagaacagcttgaattggttaaaaacacggcttggtctttgatcagcctggtatcttcaggcaatcaagtagttatcagtcatgggaatggtccacaggttggggcgatcaacctggggatgaactatgccgctgaaaatggcaaggcacctgccttcccattcccagaatgtggtgcgatgagccaaggctacatcggctaccacctgcagcagagtctgcaaaacgaactgcaccgtcgctggatgaacaagaacgtggttacgatggttacgcaagttgctgttgacccaaaggaccaggcttttgagaatccaacgaagccagttggtgatttctacactaaggaacaagccgaagcaatcgaaaaggaaaaaggctacacgtttgttgaagatgctggccgtggctatcgtcaagttgttccatcaccactgccaaagcggatcttggaaatcgacagtatcaacaagctgatcgaagccggtgacctggtaatcgcaggtggcgggggcggggttcccgttatctttactgatgatggtctgcaaggcgtgccagccgttatcgacaaggaccggacgagtgcactgctggccgacaacatcgatgccgacaagctgatcattctgacggcggttgactatgtctatgttcactacaaccaaccagatcaaaagacgctgaagaaattaacgatttccgaagccaaaaagtacattgacgaaaaggaattcgctgccggcagtatgctgcctaagatcgaagcctgcatgtcatttgttaaggatcacccagaccgtgaagctatcatcacttcactaagcggtttgaaggatgccttggctggcaagctgggcacggttatcgttgatggctagttcaaaataactccttaaatccactgacgtaagtctcccaagcattaataccaatagcaaaaagagtcgtctcgcaaaacgcggggcgacttttttggggcctttgttaaattataggtagtgttagggatccctaactcgatatacattgatttttacctactatgcatcacttttttaaaagtaggtaatgatatttttatcataaatgatatgcagaattttttgcataacggtcgccaatcaaataagattgctgattaaatggttgacgaggcacgtggatgaattgtttgccacgatgctcacgttaagctgcctaagttgctgatgaatttcgcaaagattgaaaaattaatctcgactgcttggcgattgagaaactggctgctgtcatgctgaggcagcagaagacaaagtacatgctactgctgaccgctgccagctgtttttaattgttgcaacaaaaaaggatcagccttgtctggactgatccttattgattaatagtcgccgtttaagatggagtttttaacgaccacatagtcaactttggtaattgacttaaggtcgcggcccccagcgtatgagatggatgactgcagatcttcttgcatttccagcagcgtgtctttaatcgaaccacggaatggtaccagcatctgcttgccttcaacattgcggtaggcgcctttttgcacttcggaagcggatccccagtactgcttgtagcgcttgccgtcgatggtgatcagatgaccaggtgattcttgatgaccggccaagagcgagccgatcataaccattgaggcaccgaagcggactgatttggcaatgtcgccgttatgccgaatcccaccatcggcaatcagcggcttgctggcagccttgctgcacagacgcagtgcggccagctgccagccaccagtgccaaagccggttttgagcttagtgatgcaggctttaccagggccgacgccgactttggtagcatcggcaccggcattttccagttcacgaacggcttccggagtggcaacgttgccggcagttaagaatgattcaggtaattgttgcttaatatagcgaatcattttaattacataatctgagtgtccgtgagcaacatcaatcgtaatgtattccgggactaaatgttcggattttaattgatcgataaaatcgtattcactatctttgattccaactgaaatggaggcaaacaagccgcgatcgtgcatgcgcttaacaaagtcggcacggtcttcgggctggaaacgatgcattacatagtagtagtcgttttgggccagccagattgccagatcctcgtcaattacgctttccatgttggcaggaacaacgggaatcttgaaagtcttgggaccaaacttaacgctggtatcggcttcgctgcgactcttgatgatgcacttgttaggcaccagttgaatgtcatcgtaatcaaaagtttccatgagtcaaggctcctttttggtaaaaatgtaatacgttaaaccttagctattatgcacaaacaaattcatggcgtcaagtataaaacgcacatttttaatcggtctttttgaaaacgttcggttaatatcttgcaaatttttggtaaatcgtataatatcattaagtaagtacgtgctcataaagaaattttggatgaggtgactaattaatggcatcagtagtaatcgtcggcagtcaatggggcgacgaaggcaagggcaaaatgactgactatctcagtcaggaagccgatgtcgtcgttcgttcgcaggggggcaacaatgccggccattccattagctttgacggcaagaaatttgccctgcgcttgattccatcagggattttcggcgctaagaagctttccgtgatcggtaatggggttgtggtaaatcctaaggcgctgctcgaagaaatccattacttaaacgataatggcatcagcacggatggtcttagaatctctaaccgcgcccacgttaccctgccttaccacctgctgcttgacaagtgccaagaagaagccaagggtgacaagaaggttggcacgacccaaaaggggattggcccaacctacatggacaaggttgcgcggactgggattcggatgtgcgatctgctggaacgcgatgtctttgctgaaaagctgcgggctaacctggctgctaaaaacgagctgtttacgaagatctatcatgttgaaccgctcgaattcgatgacatctttaatgaatattacgagtacggtcaagaactgaagaaatacgttaccgacacttcgctgttggttaacgatgaattggatgccggcaaaaaagtactatttgaaggtgcgcaaggtacgatgctggatatcgacgatggtacctacccatacgttacctcttctaattctggagctgccggtgcaccaactggggcgggcgttggacctaaccagatcgatacggtcgttggcatctgcaaagcctactgcacgcgggttggggctggtcctttcccaaccgagctgcacgatgagattggcgcccacattcgcgaagttggtcatgaatacggggtcgtaaccggtcgtccacggcgggttggctggtttgactcggttgccatgcgtcatgcccgtcgtgttgatggcatgacctacctgagtctgaacctgcttgacgtcttgtctggcttaaagacggtcaagatctgcaaggcctaccgtttagacggtcaagaaatcgactactaccctgccagcttggctgaactggatcgctgcgaaccggtttatgaagagctgccgggctgggaaggcgacattacgcagatcaagagctatgatgagttgccagaaaacgccaagaactacttgaagcggatctgtgaactgtcacaaacgccattggctacgatttcagtcggccctgaccgtgaacagacgattattctgcatgacccttggctgggctagaccttggcaaattaatcaatcaggtccagccgtcgctgatggttggatcttttattatggtttgattagaattggttctggcggttgacactgctaatcgaggcagttacactaacagataaagtatgagcacctttaacttggtcccgtgaggctgaaaaggaacggataaatgttgcgtctcctcgttttggtgcgaagagacgttttttctttcagcaaataaaataaaggagtgaacttcatggctcatgaaatcgttgacggttcaagcatgcaacgggcactgacccgaattacctacgaaattatcgaacaaaacaagggtgtcgaaaacctggtctttgttggaatcaaaacgcgcggtgtctacctggcccaacgtcttgccaagcgcatggaacagttggaaggggtcaaggtaccagtaggaacgcttgatattacactgtatcgtgatgaccgtcatcgtccagatcataaggttgagcctgaagtcaagactactgacctcggcgtcgacatcaacgataagcacgttatcttagtcgacgacgttttattcacggggcggacggtacgagctgctttagacgccttgatggatatgggccggcctaagcgcatctcgctggcggtcttggttgatcgtggtcaccgcgagctgccgattcgacctgattttgtcggtaagaacattccaacgtcaactaatgaaacggtacacgtggcggtcgaagaatacgatggtcatgaagatatctcaattgaatagtctaacttagcgttgccatttaatgaactccagagagggtcaaacggtgcggtgaggtttttaaccgaccttaaaaagcatcagtgctctcctgaagtgagcaactgatgcttttttcgaaaggggaaaattatgagtcgtttatcagtttcacttccaggcctgcatttgaagaatccggtaattcctgccagcggaacctgctggtatggtcaagagattgcccgcaactatgatttaaacaaattaggctccttggtcatcaagtcaaccaccagtcagccacgcaaaggcaatccagctccccgggcctgtgaaacgtctgccggctggttgaatgcctatggtctgaacaatgccggggttgacaacgtggtccaagaaaagctgccatggctggcgcaaaactatcctgaactgccagtgatcgccagtgcagccggttttagcgaggaagaatatgaagcagtagcggccaagctggggacctcaccttacgtcagtgccatggaactcaatgtctcctgccccaacgtcaagcatggcggtctggcaatgggaaccgatccggaattgttggaacgcttgacgcggcgctgcgtagcggtttccaacgtaccggtctacgttaagctgacgccaaacattaccgacatcgttccgctggctaaagccgcaatcaatggtggcgcggccggcttgacgatgatcaacactttaaccggcatggcaattgatctgaagacgcgcaagccaaaactggccaacgtcacaggcgggctttccggggcagccttaaagccaattgcactgcgcatgattcaccaggttcgccaattctccaacattccgattattggcgttggcggggtcgagactccagaagacgttttggaatttatgatggctggtgccaatgcggttgaggttggcgcggccagcttccatgatccattggcctgtcctaagattattgaccagctgccgacggtgatggattattatggtattgagaaactgacagatctgaatgaggtacgattttaatggaacgatttgaaccaatggtggccattgacgttgacacgaagcaggccgcattgaagctttttgatgaactcgctaacgacacggatcacacgccgatcgtcaaaattgggatggagctgtactacgcgtttggtccgggcattgttagagaagccaagcagcgcggctttaagatcttcttagatttaaagctctacgacattcccaacaccgttaagcgggcaatgacggcaattggcaagatgggcgtatcctttgtgacaacgcacgcggctggcggcagtgagatgctgcaggcagccaaggcggggctggcagaaggtgccaaagcggccggctgtccaatgcctaaattgctggccattacggaactgacttcgattgatgatcggattctgcatgaggaacagcacgttgatttcagcctgatcgaagccgtacagaactacgcgcagctttcggaaaaaaacggtctggacggggtcgtctgctcagctcaagaagtcaaggcgattcgcaaagttaccggtcccgattttctgtgcgtcaccccagggattcggcctaatctgcaggttcatgatgatcaaaagcgggtcgttacgccacagcaggctcgcgagctgggcagcaatgggatcgtggttggccggccgattacgctggcggaagatccagtcagtgcctaccaaatgattcgtcaagcatttatggaaggggaaaactaaacatgtcaacacaagccgaaatcgttgctaaagatcttttagacattcaagcaatcactttaagccccgacaagccatttacctgggccagcggactgcactcgccaatctatactgacaatcggctgacgatctcttatccagccgttcgccgcaatatctatgaaggcatggtccagctgatcaacgaacattttcaagacgtcgacgtaattgctgggaccgccacggctgggattccccacgcggcctgggttgccgaaaaaatgggcctgccgatgatctacgtgcgttccaagcctaaggatcatggtcagggcaagcagacggaaggcgttctttatgagggtcagcgcgtggttgtgattgatgatctgatctcgactggcggcagcgtcttaaaggccgttaaagccgttgaaaaagaaggcgccgatgtggtaggcgtggtttccgtcttcacctatgaactgccggccgccgatgacaacttccagcagtttggcattccatactactcggtaaccaactatacgactttgattgagactgctgaaaagactgatttaatcgaccgcaatcaaatgaaggatctgcatgaatggcgcaaggatcctgccgcttggtcagctcgtcattaaaaataaaaaacgatagccagattcgctatcgttttttatttttgccgatatttttctttccaatagccggattgggtcaaaagctcttttgaacgctcatcggctggatagtatcctttggtgaacagatgtctaaagtacatcatgttgtaaaagaagcagaagaacagtgttggccatgggaaatcaagcatccagttccatttgaaaaacaggccgaccaaaacatagtccagatccaagacgatcattaaaaagaagttgtaccagtcattgcgaaacaaagctggaaacgggccaaacaaaaagacggtccaagaaaagcctaccttggcaatgcgcatttcgccctcatcatttttgatcttggcatagtttggcggtattggcagattattaaaaaaatcctgattattttgattgttattgccaaatggattctgcatccgtccaggcctccctttgtacgtttatccattaatcataacataactgagaatgcggacctaataatgtcaacagttcaatcatgctttcttcatattcaaatgttaaacttaagcagtaagtgcgagcaaagaaaagggtgaaaaaatgctgttatttttaaatgataaccttcagcgcaatcaatcaggaattgagcacgcccaaatcaagcgactcaatctgtttaaaaaattcaatcagccagccaagatcgtgacgcggcagtattccaacgagctgcatctggtcgtggaagcagctgggattaaggatcaggattttatcaatctattcgactattttcaaaatgcctgcctggtgccgcatcggatcgtcaagcttcaggatctgcatctgaatccaaagtggaaacgcaaggcagatggcatcagctacaactactatgacggcaagacgcgggtcatgtacgttcgccgtcgcaatgatcgtgatcgcagcatcatcaatctgcagtattttgaccatttcggcaagctgttgaaagtagtctggtatgacaatcggggatttgcatcggttgaacagttgtatgactggaatggtcagattgccgtggaaaactatctgcgtcccgatggccagttggcgctgcagaaggtgaactttaaggatcggcgccagcaaaaagcaaccagctatcatttgtttaactggcatggtcaggactggcagtttgccaattttgacgaattgacgcgctttttctatgatcagttggccgtggatcctgccttaaatggcgatggtccgctggggttggttgtggatcgcgtctatgaattgggctgggcggtcttaaacatgcatcatcgcgttttccgcgtcatgcagctgcataatgatcatgtcaacaatcccagcgacatgctgcactcaacgctaaactacaactatcaatggggattggatcatctgaaggactgggatggcattattgctctaacgccgcagcagcaggctgacgtccaggatcgttttggtaagcagggcgtcaagatctatcggattccagggccaatcgtggctgatgaggtcttggcagcgccgcatgttgattttgctaagcgacagcgcgatctggtcgtgatggtagcgcggctctcaccagaaaaacagcaggatcatctattgcaggcgtggcctaagattctgcagcaggttcccgatgcccagctggagctttggggatacgccaatgataatttcgaccagaagctcaaagctcaggtcagtgccgagcagattgagagctcagtcaccttttgcggctatacgaccgatgtcaatgcagtctatgaacgggcgcagctattgattctgcctagccgttcggaaggtctgccgctgtctttggtggaggcgcagtcgcacgggctgccaatcgtggccaatgacatcaagtacggtccggccgatgtcgtgattgatcaacaggatgggctgctgactaaaaacggcgatattgacgggctggcgcaggcaatcatcagcttactgaccgaccagaagcgactggctgagtttagcgcgcacgcctatcaagacagtgcccgctactcggcagccaatgtcatgaaactatggaacgagctgcttagcgatatgccaaaggaggccaatgattgatggatttctttgttaatcagtatctgctgggaaaaaactccagtgtcgaacatgccgaattaaagcgtctgcagctgtttaaggatcatcagacgccggcccagctggttacgcgcgattttgatccagtgcttcaccggacgatgcagcgttttggcgtcgctaatgaccaactgaccaacctttatgatttttttgcccagacgactgactatcagggccaaccgctgcataccgaggatctgaaactggccgtcgactatcagatcggcacaggcaacaactttcgcgaggtcagagacgggggacgcttggcagcaacgatctattttgccggtgggacgatcggtcagattcatcacatcgactggtacgatcagactggcagcctgactttgcgcaatacttatgacattcggggctttaaggctgttgacgagttctttggtcaggatggtcatgagttcaatgcccgctactatcgccccgatggtcagctgtatctggagcgctactttgtcaaatcggtccagaacacgccgatcaattcgcttaatattttaaaaaactggcatggccaggatcattggtttgccagtgaaaatgaaatgtttgccttctttttggatgaattgaatcgggctcatggcgagaacaacgtctttatcgcggatcggccggctgttgccattgatccaattctgcacatgcattccaaggtccatcgctatctgtggctgccgatgagtcacgtcaatgatggccaggatccactgaaggcacctttgaacagccttttgcaaaacgccctgacggaaaatctgcaacgctgggatggtattatcgtgatgacgcaggcgcaggcacgcgttttgcgtcagcgcttgggcaaatcggcacgtgttttgacgattaacggtacgccggttaaaaaggcagccaaacgcgttaagatggctgcgcgaacgcctaaccagctgatcagtgtcggccgcctgggctatgacaagcagactgatcaattgctgcaggtatttgccaaaatcaaagctgccgtacctgatgcgaaactaacgctttatggctatggcacgcctaatgacacagccaacttcaagcagctggctaaagaccttcagattgacgccgcggttgagtttgccgattatcaatatccgctggatgctgcttttgatcaagcccagctgctgctcaataccagtcgcatcgatgcgcagcctttggcgatgggcgaggcgctggggcatggcgttccggttgtcagctacgacttttcgtatggtccagacgagatgatcgtcaattatgaaaatggtcgactgatcgcgctgaatcattctgccagcatggctaaggccgtcgttgagcttttaagcagtccggctaagctccagcagctgagcgatcacgcctatgacgatctggacaatatcagtgccgcggcaacctggaaacagtggcaggcagtcaagtaagtagtgagttaggagctgactttaaacgattttcgttcaatggctgctaccgtggactgcgtcattagtaatcagtcgctgaccagtattggctcgtcaacggttaagctggtcggcagcataacggctcaagtgcgaacgcagctgccaagctggttgcggcctaattggcttcacaatcccagccgttcagtgctatcaaggctgaggctggctcatcaaaaaaactgcagtcggcaggcggctgcagtttttatttagaatcagattttagcggcgactgagcttgacgacggcttcacagcgcggcgtctgcggcatcatatcgacaggctgaatccagtcgacgcgatagacgctagaaagtcgtgccaggtttttggccatggtcgacatgttgcaggaaacataggcgaacttggcaggcttggctttaagaatctgttcgattaaggcctcatccagaccagtgcgcggcggatcgatgactagagcattgaaccggaatccttcagcctgccagcgcggcatgacttcttccgcggtaccgacttcatagctggcgttttggatgtcgttaagcttggcgttgctgttagcatcggccacggcttctggaatgacctccatcccgcgtacgcttttgacgcggctggccagggaaagtccaattgtcccaatccccgcgtaggcatccaccaagacgtcatcgggccccagctccatggctttggctgcctgttcgtagagcgtttcggtctgagccgggttcagctgcagaaacgaacgggcactgagatgaaaatcaagtcccatcaatgattcggtaatgtattcctgaccggccagatgaatcgtttgctcaccccaaaccagcggcgtatcgccagggttgacgttttgctcgaccgatttgacctcaggcaactgttcagcgatcatggccaagagtggtcccttatgaatcagcttggcagtattggtaatcagggtcacttgcagttcaccggttgctaatgactcccgaatcgcgatcgttttaatgatcccgctgttgctggtttcatcgtaggcgggaatctttagttcatccaacatcttgacgattgcgcgcatggctttcatcgtccctggcatctgaacggcacatgttggcatgtcaaccacgtcatgactgttggcacggtacaagccggcaaccaaatggccatcttgttcgcgaacttggaattgcgccttgttgcggtagccgtattgttctggggcggcaatcgttgggcgtacgtcatagttttgccatccccgcggcttaaatttggccagactgtctaagacgacctgccgcttgaactttaactgctctgggtaggccaggcattcaaattcaaaaccgcctgcttgatcggcatagctgtcgcgcggctcaactcgaaagcggctgggtttgcgcagcttatgaatcttggcttctaggtagcggggatggatggcagtaacctcagctactacgacttcatctggcagggcgccagggacaaagcagaccttgtgtttaaagtagccgattccctggccttcgatccccagtttgcgaatggtcagcgggaagcgatcgccaaggctgacttcgacttggggctgtgggcgtgggcttttttgtggccgacgatgattgaagcgggtgtgatttttttccattgtttttctccgttctgttgcgttccagtggtcttattttagcacattggtagaatggccaaaaattatttgtgatttttattaaaaatgcattgactaaaaattaacattgcattagtatattgttaaaagttaatcatatcgaatgcaatgaagaaagaagagtagtctttggccaccgtcagcgagtcctgctaggtgtgaggggatcggttaaagtcttaggcgaaaatcactttctagttttcatccttaaaccaagtaaggatggatggtcgcacccattaccgtgcacgcgtatcgctccagcttaaatgggggccgtacgtaaaagaccgtgtcagcgatggcatggtgaatcagggtggtaccacgcgattgcgtcccttggccgaattttcggtcaagggactttttattttcggcgcagccagtattcgacatgagtgatttctaattttaattcatttcgggggcaaaaaaatggaacaactcacatcgaaaaaactaacggccaagcagtatctggtcgtggcatcattgctgtttggtctcttctttggggccggcaacctgatctttcccttgcatctgggtcagctggccggcagtcactgggtcggtgcggcagtcggctttttagtaaccggggtcgccttgccgctgctgtcggttctggccgttgcggtaacgcgggctgaaggggtttttgacatcggtcggccattaggagttggttttgctttggtctttatggtcttgattcactttacgatcggaccgctgtttgggacgccacggacggctacggtttcctacacggttggggtcgcaccgtttgttcccaaggctgatcagacgctggccctgttcttgttctcattggtcttctttgctttggcctttgcatttgcctatcgtgaaaatgacatcttgaccaacgtcggtaaggttttgaatccagtctttttagtcctgttgtttgtcgtttttgccgttgcgttcgttaatccgtttgccaatccattccaaacgcaggcaacgacagcttatgtgcatggctcgttcgtcaatggctttctgcagggctacaatacgatggatgccttggctggtctggcttttggggttacggtcgtgacagcggttcgtcagctggggcagaagcgggatagcgacgttgccaaagtggttgccaaatcaggcgtcctggcaatgagtgccgttgctttgatctatgtgctgctgatcgtggttggtgcgatgactctaggccggttcaaggtttcagctgatggcggggtggcctttacgcagctgattaatgcctatgctggccgactgggacaagccgtcttagctgttttaatcacggtcacctgcttaacgacggcggttggtctggtggcagcctttgcgcaggactttcacaagcatttcccacagttgagctatcatgcctggctgttcttgacgactttggcctcatttttggttgccaattttggcttggaacagatcattgcctggtcaacgccaatgctgatgtttctgtatccattggccatggtcctgatcctgctgtcggttgcctcgccgttgtttaagcgggatggtgcggtttacttctttgttgtcttgcttaccgtcgtgccggcattaggggatatggtagtttccttcccaagcgtagtcagtgccagcgcgtttggcaagctggtggctggctggcgggattccttgccactggctgcctatggtctgtcatggctggttccagcgctggttggattggtactgggcttgatggtgcactggtatcgagagcacagtctggcagcagctggtgaagaaaactgatcaagaggtcaatatatttcgtaattaggtttaccagacagttggtaaaaagtaattaaatcattattgaacaaactaagctgttatctaaacgttgagataacagcttttatattgattacaagttattccacttcacaatttgaaattactttcacaaaatttgtgcgaagctatacaatttcgccaaaatttatattaaaataggctagtgcaataatgccaagtatggagagtattatcattaataaggagtgaatgaatttgaagattgttgggattcctggttccaatgccaaccattcgtacaatcgcatgctgcttgaatacatcagcaaagcctatgaacatgatatgacggtcgttgacgtgcgcaagattccactgttcaacgaaagcgccaaagaaacgccggctgccatccaggccatgtcagacgcgatcgatgctgccgatgccgtagtgattgcctgtcctgaaactgatcactcagtaccttcttctttaaagagcatcattgaatggctttcctatcagctgcatccatttaccaacaagccggtgctgctggttggggcttctactgacgcgcaaggctcttcacgggctcaggttgacctgcgtgacgttatgatctcgccgggggtcaacgcgcgcgtctttcaaaaagaagacttctttatgagttttgcccagaatctgtttgatgaaaacggcgatattaccgatcctggtacgatcaagttcttagacaagtgtctgcgcgactttgaatgctttgcgatcgccaatgatcaagaagttaagctggaagaagcagcattggccaaagcggaaaaggaggctgccaagtaatgaaatttgttgcaatcgtcggtacgaacgccgacttttcctacaaccgcgttcttttgcagtttatgaggaagcacttctggcgcatggcagagattgagattgccgaaatcaaggatctgccagcttttagcaaggacgtgccttttgaggaaacgacgccagtttggaaacttaagcagcagatcaacgctgctgatggggttatcttttctactcccgaatatgatcatgccgttccagccgcaatgaagagcgcggttgaatggctgtcgtatcaatccaaggttctgcatggcaagccagctatgatcgtgggggtatcctatggtcgccaggcttccgcacgagctcagcagcagatgcgcaagatgcttttgagtcctgactgcaatgccaacctgctgtctggcaacgaggtgctgatcggcaatgctgccaaggtctttagcaaggatggccgtctgactgaccaggcctgcgttgataatctggaaaaatgctttaccaattttgttgaatatgcggaacttttcaaaaatgcttctcgaggtgaacaactcatgtctgtaaaacgtcctatgattgaagatgcctatgtcagcttcccgaccggccgcctgtcgctgcgagaagtccaagccatcttcaacacgattccatttgaaattgacctgatcgatgctgacgaccgctttgcctactactcagacaagcctaaccgtgaacacgttcgtaacgtcaaccagcttggcgaaacctacagtgaatgccacccaccaaaggctgttcctgcagttaaggccattatcgacagctttaagaacggcaccaaagacgtggttgcccgcccattgatgatgaacggtcaccgtgtcttgattcgctactatgcgctgcgggatgttgatggtcactacctggggacgattgaatttacgggttcagttgatgatatcttgaacctggctgaaaatggtgcctggaatgcggatgcaacctccagcgcctcgcatggccacgctgccccagcaccagttgaagaacctgccccagctatggatgcgacgacgggggcttctgaagataccgatgaggaaccggctgctcccagcgaaccagctgctccggtaatgtcggcggctgctcaacgtgctgaacaggccgaaactgatgccagcacgggtgcatctgaagcagctgatgatccagaagaaacggatgctgatgcgatgacgggtgcttctgaaaactaaaattctgataagatgcaaaaaagagctcgcagctagttgcgaactctttttttggttatttatcaaggtgatccttggtgaattgatttaagttggccgtcgtaggatcaagattttgccatttctgcgacaaaaaggccttattcatatggtagtgaggctgcggctgtttttgctccaagaacggtgcaatgcgatgatcaaagttgacccaaccggcccagccaatgtgaatggtgtcttccataaagccgggcttaccgccatcatgtgaataatcaacgatattgttgaaaccttgcgaacgcagctgatatttgatcttattggcagtctgatagtacatcggcatggaaagaccagtcatcttttcccacttggcattaaccggcgtgatcataaagacgacgttggtattggtctttttaagctgattcaagacgacttccagatcggcatactcgggcgatttaaggtagctgtagtgtttttgactgccaggaacgtccttgagatggcctttgacgcgccgatcatagaactgatttaagatgccaaagcggttgttgttgctggaatgcttggcgtcgctgatggcttctttggtcagggcactgtagttataagtcttaggcagctcgttgatacgtggcttaatacgatcattatagttgtcttttaagaaccagccggagaacagctcatcctcatgcttgagcagcgttgattccatgtcgatacgggtacgatcccatgagcttaggtgcttgccgtcagcgatttttttggcatagttggcaactgagccttccgcgcctaaaagtttaaccaagcgcttagccgtgtagcgatcgtatggcgaatcagggttggcctgtttcagccaggttagattagcgtaagtgccgttgtagtatttaaaagctgatggcatgacgccttctttgacgaaccattgtggcgaaatgatatagacggctttgccattcttcatttcgggggccatcattgtcatgttaaacagctgcggcaaagactgcgtaccacgggaaccgaacaagaatggcgtgtagttgtggtagcgagcagccatcaccgcgggatgatagcggtccattcgattcaactcactggagccgaagaatggaatgtagtttttctttttatcctgcatggctgccactttaatcgagctgtttttaaaaacgcgcggactaagagaatcggcggctttctgcagggttgcctgggaatgcgagctgctccatggcaaggcaaaaaagcccagtaccaataggcaggctacgataaccgggccaaagatcgaccacagtttgcgacggttattcattttccagttcctttacccgatcaacgattttatcgatcgtactccattcgctgcggtcaaattcggaaacgggaacctgaatgtcgaattcgtcctgcagagccagcagcagctgaacggttgccatggagtccagcagaccatcggcaaacagatcttcagtcgtgtcggcaaaatcgctggcgtcacggccggttgcttcagctaaaagttgttgaatttgttcttgcatgatataacctccaaaaataagtactcagattaatgtttgacaaaccacagcgtgttcaaaaagccgcagaagatcaagaatgaaaagacgacaaagttaaacgtaataaacatggccacgcccttggtaaaggcattggtcttgatatgcaggtgcttgcgcttgtaacgcagccaccagtcattgatgaccaatgcgctcccatgcaggaaaccatagagaatgtagtaccaggtaaccccgtgccaaaagcccatgaccagcatattgatcatgtaggcaaccgatgacaggacgttgcggtttttaaaccaatgcttcttgctggccaaaaagacgaaccgcatgaagatgtagtcacggaaccagaatgaaagcgtcatgtgccagcgattccagaattccttgatgtttttggcaacgaacggcttgttgaagttcattggcgtctcgacacccatcaaataactgatggccacggcaaacagcgagtagccggcaaagtcgaagtaaagatcgccggcatagacgtaggccacggcaacgacccaccagcttaaatgcggtgcgtacattaatgcctgatgctcaacaaatggcagccaaacctgaccaaacaggtaggccagcacgaacttgtataaaaagccgatgaaaagatatttaacggccttaccgaccaattcaaggtatttttcacgactggggactttgcgataatcttttgaaaaacgccggtagcgatcaatcggtccggaagtgatggttggcataaacagcaaaaagcggataaacttccaccagttgaggtctttaacggcgccatcacgcgtttcgataattgttccgaccgcccgaaacgttaggtagctgatgcccaaaaagcccagtagcgagttatgaccgaccattgccggcgtgaacttgacgatgatgatcggtaaaagcgatagcagcgtcatcaggtaaaagacgcccgccgcgttcttcttttgccgataatggaaatatcccattaccaggatcgtttgatagactacgtagccgatcagagaaagcatctgcggggcgctggagccatcgaacataaagaagataaacaggaagctgacgatggcctcataccaagccagccgcttgccaaagtacaggctgattcccattggcaagacggcaatcagcaggtagataaagtacgatggcgtgccataagccgtgtagttgggaagactttcaagccagctcattattgattggcctccgcgatcatctgcttaaccgcaatcttgccatttgcggactttgggaagctgtcaacgtagacgaactgggttggcatcatatagtccatgatcttgccagccagactttgacgaatggcttgagtcagttccttttcatctttaaagtcgttgggctgtgcaatcacgtagccgatcaaatgactgacctgatgcttcttgttgtacttcggcacggcaatggcctgcttgatgtattcgctcagttccagactgttgcggacctcatccagctcaacccggaagccgtgcagcttgatctgaaaatccatccgaccgatgatgtggcggatgccgtcttgatcgataaagccttcgtcaccagtgcgatatgactggacgccgttgtatttaaagaagtttttaaccgttttttcagggttgttcatgtagcccttagccacgctatcaccactgatgatgatctcgccatggacgtttggctcatcaacgggctgcccgtccttccagatcgtagtagttacgccaggcttatcgtagccgattggcagccgttcgtgactgttggccattgccggcgtgatttccatgctggtaacggccacggcagcttcggttgggccataggtgttaaagacgcgcgcatcggggaaccgcttgaacagccgcttgacagtcgaggtggtcagctcttcgccacagaagacaaagtactttaggttcggcatctgttcgtgattgaactgaagactgagcagcgccatgtcgccaaatgaaggtgtaccgacaaagaccgtaatgtcaagcttaggcagcgtggtaaacagctgacccaggttttgaacaacggctagtggcagggtctgcaccgtgctgccggacaaaagacccgtcagccagtacatatgcgagacgtcaaacgagaatggcacctgacccaggtagatctggtgagctgggatgtcaaaactgtcgcccagcatccaattggcaaatgaacagatattgtcgtggctgatctcaactccttttggcgagccggtggtaccagaagtaaacagcacgtagaaaggatggtcgccggtgacttcatgcgtaacctcgtatgaagtcttttgggcaaagatctgttccaattcatatttattaatcacggccccgtcgtagttcagcttttcaacgggaaagtcatcgatggcgacgaccagccgcggattggccgcatcaataatcgactgcatgcggggcagagctgagccgacttcaacgggaatgtaggcgtgacctgcttttaggccgccgacaaaaccggccaccatttcaaattgatggtcgccataaaacatgatcggaccatctttaggaacgattttttcttggtcgagccaagctgcgaaagcatttgaatcaaccaataaatcttggtacgtgtgagtctgacccatttcgtcatagacgacgcgcgtggcattttcttttgcgacgcggtcaaactcgcgaacaatgttagaaatcattttttcctccgctagaattcgttatagataaacggtgcctgtccagcgccatagtatccgtataagtagatcaacagcattaagacgataaaataaaagaacgttttaagcagaaatccagcgacagggtggcgtttgagagctgccaacattcactaatcactcctttacctaaatcagatttggaaaggtactaccttactatataccaagtcaaggaaattaaatattaagccttgcttaagaaaaacatgtttaaaatcttgaaataaaactacttttcccaatcaaacgttgatatatcagtatttgagtgagtcttaaccaggggtgaatctaaataaaatattaataaaatacgaagaaagtttgaactttaccatgctgaaactttcacgcgatctgtgctataatgtcatcaacgcgaatgtttgttcgatagaaaggaaggtctcatgagatttttacatacggccgattggcatatcggtaagaaactgcatgatttttcgcttgctgaagatcagaccgcggcgtttgatcagattgaacagctggctaaagactatcaagtcgatgccgttgttattgcaggtgatctgtatgatcggggcttagccagcgagcaggcggttgagcagctgaatggaatgctcaagcagctgaatctaaatgaccatctgccgctattggcgatcagcggcaaccatgattcggccgcgcgcctggcgacgggcagtgaatggtttgagacgaccgatttttatctgcataccacgctggccagtgcgtttgaaccagtcacgattatggatacgcagtttttcctgctgccattctttaacctacaggccgtccgcaattatttcgaacaagatgttaagacgatcagccaggcgatgactttaattgttaatcaaatgaagcagcttttcgatcctgataaaaagcacgtcttggtggcgcactttttcgcggcgggcagtacgcatactgattctgagattcaagttgaggttggaggattggatgccgtgccgaccacgctgttaaaagacttcgactacgtggcactggggcacctgcataatccgcgggcgttaaatgaagaacgcatgcgctacagcggctcgccacttaagttttcggtttcagaggccaatctgcaaaaaggggtctggattgtcgatacgaatccattcaagctcacttgggcccccttgcagcctaagcatgatctgatcattttagaaggctcatttgatgaactgacgcaagggaaaatcgcagctcaatacgatcaaacccaagactatgttgccatccgcctgaccgataccaagctgatcagcgacctgatgaatcgactgcgggatcgttatcctaagattgttgagatcaagcgccccaaccagcaggacgacgccagcatcgcgaccatgacgatggccagtcatgatccgctgacgctgttggatgagttttatgaaaaggtgcatcctgatcagcagctggacgatcagcaacggcagtgggcatcggcagctttgaccaaggttgaggaggaagaaaaatgaagcctttaaaactgaaaatggagtattttggctcatatgtcaatgagaccgttgattttgctcaatttgacgaagtgccgctgtttttgatcagtggcaagacgggcagcggcaagaccacgatttttgacgcgatatgctttagtctgtttggtacaacgactgataataatcgcaatgggcggactgctgaaaaaatgcgctctgattttgccaaggaaaaggatctgacacgggtctcattttggtttgagcatcaaggcaagacctatcaaatcattcgggagccgaaacaggatcggcacaagagtcaaaaagtagacctgttttatgaaaaaaacggtcaaaaagaagaaattaccaaagttaccgacgccaatcaatttattgaagatctaatcggcatcagcgctgatcagtttcgccagatcgttttgctgccacagggtaagtttcgtgagtttctggagtcggacagcaataacaaaaatgaattgctggcggagctgtttggcacgcagctatacgcggactggacccagcaactcaaggatcagctgacggcggcacaggatgccagtcatgacagtcaaaagcaaatggaacatctgatgaccagcattgaagaactggctgaccaaaccgatcccgttcaatggctgcaagccgccgcaacgctgttaaaacagcatgaacagcagctgactcagcaagtcgaggctgctgtggctgcccagacaaaggcaaaaaaactcgatgaacagtttcacgtggaacaaaatctgcagaccgcctatgatgagttggcccaaaaccaaaccgttcaacaacagctggatcagcagcaatcagcaatccaagccaagcagcagctgattgacgagctgcagtgggttcgccatcagcaaaccgattacgttgcctggcagcatgcccaggcgacaatccaagacctgcaaaacgatctgcagcaacagcagacggcggctacggaacttgatcaaaaactgcagcaattgcagcagcgtgctcaagagctgaaccagcagcagccagccatcgattcgatcaaccagcaaaaaatcgctttggcaagcctgctgccccgatatcaagaagcggtcgaacttaaagaacgcattcaaactgagcagcaaaaactggctaaactccaaaaaagtcagcagcaggttcaagccgtcagtcagcagcagacggttttactggagaaaacggcacagcagattcaaaacctgcagcagcaaaccgatcggcagttgattgaaaaaatgcttgaggaacgcagcaccgaacagacattactcaagcggctgcaggatctgcagagcaagcaccagacgataactgatcagcaagccagtctgcagcaggcccagcacgaggagaaactggctgggcagcattatcaggccgcgcagactgcttttcaagaagctgatcaaaagcacgccgcccttcagattgctgaactggcgactcatctggttccgggtcagccttgcccggtctgcggctcaattgatcatccccagccaggcaacctagccactaagatctcgcttgatgagattcaagctgccggtgtggctttaaaacaggcacgccaggctttagacgatgcgcaggcccaaaaagtcaaggctcaggaaaaaacggtcaatctgacccagcagttgaataacttaaaaaccgaatacacgactgagctgacgaaattaagacatgacagtcagctgccggcgaccgatcttgcccagctggccgccaaactgcaggagcgtatgaatgagaccgtccaacggcttaaaaagactcaggcagctattgaagaattaaagcaggcgcaacaagaacagcaaaaacagcagcagacattggatgaattgacggcccagcaacagaaactggatcatgatcagcagctgctgacggctcaactggcaggactcaatggtgagctgacggccaaagtaaagcagctgccgccagcatacgctgatttaagcacagctaaaaaacaactgcatgattggcaaattcagctgcaggattatcagcaaaaaaaagatcagaaccaaaccgaactgcagaatcaacagcagcgcgccgccgcggtagccgcaacgatcagtcacgatcaagaaaacctgacgcagcagcagcaccatcaccagcaattggctaagacactgcagcaagcattaaaagatcatgatcccaatgcccagtggtcacgctatgcagaagactttgcccaactggatcagctggaattgctgcagcagaccgtcaatgaatatcagcaggcggtcaagatcaatcttgaccggcgtcagcacctgctggcagccatcaatgaacggccccggccgcagctggcggagacgcaaaaagctctgcaggcagccacgacaatgcgcgatgaaaagcagcgggaattagggcgcttgaaagaacagctccaacagcagcaaaaaacggttcagcaggttgatgagatccagcaggaacaaggtaaacagcaggccgaacttgatcggctcagtgatctggtcaataccatgaatggcaagaattcaatgcggctgactttggaaagatatgtgctcagacactacttcaaagaggtcctgaacaacgccaatccacggctcagacaattaaccgctgatcgctatgagttctttttggaagaaagcaccggctcaaacaacaaatggagcggattggaagtcggcgtcagagatcgggatgccggcaaggatcgcagcgtgcataccctgtctggaggagagacttttgctgcctcgctggccctggcgctgtcgcttggcgagattattcaacagcaggccgggggaattcaaattgatgctctgtttgttgatgaaggcttcggctcgctggatcaagccgcgctggataatgcattgcaggcgctgcagactttggaaggcaattcgcgcatggtagggatcatcagtcacgtgaccgaattggaagaacggattcccgatcagctcaagatcagttccgataagggccacagtcatgtcagctatcagcacgactttgcaataaattagccgaaaagattgccaaatcaggcaggatgtaataagatagcgatgatataaaacacgaagacattttaaagtagatctcaagagagctgtcgggtggtgcaaggcagcgatcgaaactccggtgtcgttaaatgtgggcgggtaatgccgcacgggttcatggccgttatccatgcagagcgtgacaaatctttgtcgaacttgggtggtaccgcggaaccagagccatttcgtcccaaaatatggatgaagtggctctttttatatacttaggaggaattttagatgctcgatatcaagaagattcgtaaagaccctgaattctttaagcagaagctggcaacgcgcaacgttgatccaaaagacattgacgaagtattggccctggatgaaaagcggcgtgaactgctgcagcagaccgaaacgctgaaggctaagcgtaacgcggcttccaagaagatcggtgaggccaagcgcaaccatgaatcagccgatgacgcgattgccgaaatgcgtcaggttggtgaagacatcaagaagctggacgttgaggtcgaagaaaacgacgcgatcttaaacgacaagctggcgcacctgccaaacgtaccgcgtgatggcgtgccggttggtcctgatgaagacagcaaccgtgaagaatacaaggtgggcgagccgactaagtttgcctttgagcctaagcaccactgggacctgggcgaaaagctcggtatcctggacttcgaccgggcagctaaggtttctggcgcgcggttcgtctactatgtcggcttgggtgctcaactggaacgggccgtctacaacttcatgctggatgaacacatgaaggaaggctacacggaagttctgccgccatacatcgtcaaggctcaatccatgtacggtactggtcagttccctaagtttaaggaaggcgtctaccaggtcaatggcgaggacatgacgctgattccaacggcggaagtgcctttgaccaactacttctctggtgaagagattccaaccgataagctgccagtatacgtcacggcgctgtcgccatcgttccgttctgaggctggttcggctggtcgggacacgcgtggcctgatccggatgcaccagtttaataaggttgaaatggttaagtacgttaagccagaaacctcatttgacgaactggaaaagatgactaagaatgccgaaaacattctgcaaaagcttggcctgccataccatgtcatcacgctgtcgactggcgacatgagctttacttcagcggaaacgcatgatattgaagtttggatgccagctcaagacaagtatcgtgaaatctccagctgctcgaactgtactgatttccaagctcgccggatgcacattacctatcgtgacgaaaacggcaagctgcagctggtccacacgctgaacggttctggtttggcggttggccggacggtagccgcaattttggaaaactaccaaaacgaagacggtacggtaacgattccagaagtactggtaccttacatgcatggcatcaccaagatcacgccagaaaacgcggtgccattcaactacctgcacaagtaagatccaatcagcggtcgcgtttggagtctgctgagaatgtctggtaaactagagacaaagaaagtttcaaccaagccagacacggaaaaaataaagccccttgccgtgtcggcttgctgcacggaaaaggggctttattagtgctttagaaagggtgcatctttatgccacgccaatcaatcaagctcaagtggctgttcatggcgagtctgcttaataatgccggcgccgcgatgctttggccattgacgacgatctatgtgcatgagtacttgaataaatcgatgacggtcgcgggcttggtaatctttttcagttccatggggatgatgtttggcaactacctgggcggctggctgtttgacaactggaagccttacgcggccgcggtgatcaccgtaacggtcgccactttgggaaatatcttgatgattttctttcatggctggccgatgtttccgattctgctggctgtgatctgctttgcggacggctcgggactgaccgtgatcaattcctatggctcggccgtcacgggacacactgctcgctatgtctataacatgctgtacatggcgcttaacgtgggagtcgtagtcgggacgctattggtcgggacgctgttggacctgggaatcgagattgtctttatcgtagccagcgtctgttatggtgcctaccttttgattacggtgctgcactttaacgttgacgtgcggcctaagtcaacggttaaaagccagcaggccgcggcagttaagagtccacgtcacaacgtccacatcgtctatgcctactgtctgtgcctagtaacggtctatctcagctatgccttatgggaaagcgtcatgtcggtgcacattaccgatatgcatattccattctttgcctacagtctgctgtggacgatcaatggggccgtcatcgttttgggccagcccctggttaccagactggccgactatctttcggttaagcggcagattattatcgggattgcgatttttgccatctcgtttccgctattaatctgggtacacagttttgcgatgtttgtcgttgactttgtgatcctgacgattggggaaatggtcgggattccttccgtgccagcttatatcgatgtcttgactgtcgctgaggaaactggtaagtatcaaggaatgcccaatgttgccatgtcgattggccgggcgctgggaccagtgtatggcggttggattgttgaccaggccggctataacttcttgtttgtttcggtctttgtcatgatgctggtgacctggctgtatgcgatcatggtttccagacgctcagtcaaggtaatcaagtaaaaatgtcttgtcgtgcttaggtacggcaaggcatttttttgtgtttgccttattttggcatagataatgacagctatcgaaaattgacgatcccggtagcagctgtcgacgactataatataagtagaaatgaaatcgttttcggaaaaggagtggatatttagaagggaaggcgattgcaatgacgaatccaaaggtacgggataatcaattaagctttgccgggctggtcgcgatctgtgtcagcgccatgattggttcggcaatttttgatctgcctaaaaacatggcgacggttgcgggggcaacggcgcagattctggcctggattacgacggggatcggcatgtggctgattgccgaggtctttatgatcctaagtgccgtgaagccagatttgacggccggcatgtatgattatggcgtgaaaggttttggaccatttgttggctttttgaccgcgtggggatattttgtctccaactgtgcgaccaatgcggcgtttgcggtgctggtcatgaacacgctcaactactttttccctggtacgtttgcaggtggcaacaactggccgtcaatgatcggggcctcgcttttgacttggggaatgacggggctgaccttaaaaggcaccaagtcttccaaccgcatgcagaaaatcgcgatgacgctgctgatgattgtgattaccgtcttgatcatctccttaatgggcaacttcagctgggagaaattcacgactgacatgcaggccaacgtggtgatgccatccgtgcacaatctgaatctgggcagtgtatctcagcagacgctggccacgatgatggttacgctgtggatgttcagcgggattgagggagcagcggtcatggcgggccgtgccaagaagcgcagccaggttagaatggcaacgatggtcggatttctgatctgcattacgatcgatattttgatcagtctgctgtcgctgggagtcttttcttatggtcagttgatgcggctggcctcgccttctacggccgcgatcctgaccagtatctggcacaacgtctggggccgtaacatcatcagtttgaccttgatcttgacggtgctggccagctggatctcgtggttggaaatgatctgtgagctgccacagcatgccgccgaacaggatggtacttttccgcgggcatttgccaagaccaacgccaacgatcagccagtgtttgccattttgattgccacggtaacgattcaggccattattctgatggcgcattttgacggccaggcctatgaaaagctgcttttaatcagcgcggcgacgacgattccgccttatctggttgctgaggcctacttgtttaagatcgccatgcaccatgaatacagcggcaagcatcatccaaagcgggggatgattattgcggggttggcctttgtctacacgctgctgatgggcgtttcggcaggcttaaagtacacggtggccgaattcatcgtctacctggtggggatgccaatgtatctgtacgcgcgtcgtcagcatggccaaatagttttcagtcatgctgaaaagatcctggcagccgtgattatcgtcattgccgttttgggaatcgacgttttgatgggtctgatcaaacagccgtttatgacgctgctttccttgggccattagagactaaaaaagctttgcgcgagttgtgcaaagcttttttgattcagttaggcaaagtaatccagccccatggcatgccgcacttccgccagcgtttggttggcaacctcattggcatcggcacagccttgcttaagcatatcgtaaacggctggaatgtccttggcaaattcttcgcggcgttcccgaatcggcttaagctcgttgttcaagacttcaaacaggtagcgcttgatcttaacgtcgcccagaccgccagcttggtattggtcctttaattcctgcacgtgctctttatcagggtcgaagatgtccagataggtaaagactacgttgccttcaatatgaccaggatcttcaacgtgaatgtgagttgggtcggtgtacatggacatgactttcttttgcagcgtcttttcattgtcgctcaagtagatggcattgcccagcgatttgctcatcttggcattgccgtccagcccaggaattcggccctggccttttggtgggaagacgccctttggttcaaccagaatgtcaccgtagatgttgttgaatgagcggacgatttcccgtgcttgttccatcattggctcctggtcatcgccaaccggcaccagttcgcctttaaatgccgtgatgtcggcggtttggctgacagggtaggttaaaaatccggctggaatcgaacggtcaaagttcttttgctgaatctcggctttaacggttgggttccgttccagccgcgataccgtaaccaggttcagatagtacatgttgagttcagataaagcggggatctgcgactgaatgtacatcgttgacttggccggatccagaccgactgccagatagtctagggcgacttgaatcagactattgtggatcttttctgggtcgcgagcgttgtcggtcaaagcctgttggtcggcaatcatgataaacatgttgtatttgccgctgttttgcatcttcacgcgttcttttaatgaaccaacgtaatgaccgatatgcagcttgccggttggccggtcaccggttaaaacgacttttttgctgggatcaaacttcataagaaaaactcctttcagcacctaaaaaaagaccgtcctctccaaacgagaataggacgatctttgccgcggtgccacctaatttaggggaaagcccctcacttaaatgcttttgattcagttgtcggcaccgctccatttcgcttagccgcgatccctctcagcatttggaatctctctgtcattggcctgactactattgcaccgtgcatgatagctatattataacgcgaaaccagctgcctgggtcaactacttctttacccgtgccagccagtagcgcttcttacccttgcgcacgatcacgaacttgccgtcaaaatgcgtgcttggatcgatttcggcattctcgtccgtgatttgttcgccgttgatgcggatggcgccgttcttgacgtcttcgcgggcttgacggcgggaaggttcgatcttggtgtcgtcaaccagccacaggataatgttctgcttttggttggcaacctcaacggatggcatgttcttaaagccttgttcgatctcgctggcagacagttgggcaacgtcgccggagaacagagctgccgtgatgcgttcggcttcttcaacggccttttcaccgtgcacgaacttggtaacctcgcgtgccagcgccttttgggcctcgcgcttccatggctcggtcttgactttttcagccagcgcgtcgatttcgtccttgctcaggaaagtgaagtacttcaggtatttaacgacgtcgcggtcatcttgattgatccagaattggtagaactcgtatggcgttgtcttttccggatccagccagactgcgccgcccgctgtcttgccgaacttggtgccgtctgctttgagcatcaacggaatcgtcagaccaaaagctttggcgtcgggaccctcaatcttatgaatcagatcaatcccggaagtaatgttgccccattgatcagccccaccgatctgcaggtgaacgtcattatgccggtagagatgcaggaagtcgatggactgcagaatctggtaggtaaactcagtgtaggagatcccggtttccaaacggctggctacgacttccttattcagcatcgtgtttacgctgaacagcttgccgtagtcgcgcaggaagtcgatcatgctcagtttggacagccagtcatagttgttgacgatggtaaagttttccgtcccgaacagcttgatcatctggttggtcagggccttaacgttgtgctccagctgtgattccgtctgcagggtccgttcggttttgcgcccggatggatccccaattgcaccggtcccgcccccgatgatgataacgggatgatggccggccagctggaatcgcttcagcatcataaatggaatcagatggccaatgtgcaggctgtcgccagtcggatcggtcccgcagtagaggccgatcttttcgttttccgtcaattcgcgcaggccttcttcgtcagttacctgattaacggccccgcgccaagtcagttcgtcaataatattcatttaaatacctccaaaaaatgtcatgaggaacgaaaaacgtcccagaaccgcttaacggctctgggacgaattgctcgtggtaccacccatcttcgtgcatgacgcacctcattgacttcagttcagcgacgttgctgcaggattgtaattcgccaaacgactgtgtgccggttttcagctatgccggttttctttgaacagggagtcgctgcctactgagttcctgcgcgtcttaattaggggtatttaaacataaatttgtgcaaaaagtcaagtcgcttaagaatgttaaatcgacagcggtttcaaaattaaaagttaatagttgccaaaaaattgtttaggtgaattttagatttaattaattaagttttctagaagatttaccttatttaattaattttagcggcctaataatattaattgttcatggttttgtgacgattatatttctttttacattaaaaaggtgataaagtattcagtacgcgaatattaataaacggttaaaaaataagtaaaaaggagtgaggaatttgaagaagtcatggtggcaacgcacaatcatcagctgcgcggtaatgctgatgaccacgttcgctggattatttgtcaataagcaggtggcgcatgccgaacagacctacacgatcggggttgtcgacacctttgctccctttgaaattcaaaacaaacaagggacctataccggtaagaatcccggcattgagcctgaaatgattcggatgattgctaaacacgagcatttcaagtatcgatacaaaatcatgagctttaacgccattctgcaggctctggattccggtcagatcgatgccggcatgggtgggatgagtgttaccgacgaacgaaaggccaaaatcgacttttcaacttcctactataaagacgggatcgtgatggcggtcggcaaaaacagcaagatcaccaagatgagccagctcaagggcaagacggttgatgttaagtctggggctgctggggccttgtatgctgaatccatcaaggacaagtacggctttaagatcaagtactttacaacttctaatgcaatgtggaatgatgttaagagcggcaacggggcagctacgtttgatgatggtccggttctgcaatacgggatccgcaatggtatgcctttgaagatcgttactaaacagatcaatgccacgccaatcgcaatcggctttaagaaaggccaaaacaaagaactgcaggccaagatcaacgatgggatcaaatggatgcaaaagacgggccggatgcaaaagctgattgataagtacacgaaaggcagcggtacgaagactgaaagcagcaaggaccggacgatctttgggctgatcaagaacaaccgtaaggcccttttgactggtctttgggaaacgattgaactgacgattattggttcactgtgcgcattggcattcggtttggtattagggatcatgggcatcgcggaaggcaagttctggaagggtctttccagcacgatcatctacatcttccgtgggattccaatgatggttttggcattcttcatctacattgggctgccaaacctgactggtcaaaagattccgctgtttacggctggggtcttgaccttgatgcttgatgaaggtgcctatgttggtgctattgtccgtggtggctttgaagccgttgacgttggtcagtgggaagctgcccgcagtctgggtctgccatactccaaggcattggttaaggttatcgcgccacaagggttgaagatcatggtgccatctttggttaaccaattgatcattacgctgaaggatacctcgattctttcggcaattggggtcatggaactgacgcagaccgggaccgtcatcattgcccggaatatggaagggttcaagatgtggctgatcatcgccgtaatgtacatgatcatcattacgctgctgacttggctgtcgaattacgttcaaaagagaatggaggcatagcatggacaagcaatacaaggtacaagtcaaggaccttcacaagagctatggcgaaaatgaggtcttaaaagggatcgatcttgccgtgaagccaagtgaagttgtctgcatgattgggccttctggttcgggtaagagtacgtttctgcgctgcctgaaccgcttggaagtgccaaacagcggtcatatctacattgacggctacgacattgccgactcgaagactgacatcaacctggtgcgtcaaaacattgggatggtgttccaacacttcaacttgttccccaacatgtcggtaattgacaacatcacgctggcacccgtggaactgaagaagatgagcaaggaagaagcgcaagaagccgcgctgcactatctggatatcgtaggcttaaaggaaaaggccaacgtcaatccacggacgctttctggtggacaaaaacaacgggtggcaattgcccgtgctctggccatgaagccggacgtgatgctgtttgacgaaccaaccagtgcccttgacccggaaatggttggtgacgtgctgggtgttatgcaggacctggccaaagaagggatgaccatgatcgtcgttacccacgaaatgggctttgccaagcgggtggctgatcgcgtggtattcttccatgacggtaagatccgagaagatggtacgccagaacagatctttgagcatccacagcacccagatacccagaatttccttaacaaagtcttaaacgtttaggggttcgttcgatatttctggatttaatgtttgacaaacgttataaaatcgttataatgattagtaacttttaattattggtcgatttacagagacccgctgcccagctgcaagcacgggatcgatcttatggcatcaacgttgaaatgaagggtggttcctctatcgactgctagagcggcgggcatataagatgtctgcaagatgggtggaaccgcgttgaaaaacgtccctgacacaagttagtgtcagggacgtttttatttgcgtcagtgttgccgccctcctgtacaggaatgtttgtcattgagagttttacaggagaaaaagtatggatgaacaacaagaacaaaaactatcgcgggcgctgaaaagccgtcatatcacgatgattgccattggtggggcaatcgggaccgggctgttcttaggttcggggacggccattcacgctgcgggtccttcgatcattttatcttacctgatcgtggggatcttctgcttctttatgatgcgggccttgggtgaactgattttagctgatactaccaagcactcgttcattgattcggtcaaggaatacctgggcgaccgcatggaattcgtggccggctggacttactggtcttgctggctgagtttggcaatggctgatctgaccgcaactgggatctacctgcgctactggttccctaatctgccgcaatggatcggtccgttggtcatcatcgtcttattgatgctggtcaacatgatcaacgtggggctgttcggtgaaatggagagctggtttgcgatgatcaaggtggttgcaattctggccctgatcgtaatcggtttggtgatggtcttcgttcacttcccagtcaagggttctgacccggcctcatttagcaatctgtggtcgcacggcggcttcttcccgaaaggcgtcctaggctttttgatgagtttccaaatggttgtctttgcctttgtcggaattgaaatggttggtctgacggctggtgaaaccaaggatcccaataatgacattcctaaggccatcaattcgctgccagttcggatcggactcttttacatcggttcaatgattgccatgatgtcggtttacccatggaacatgatcaagacgacttccagcccatttgttcagctgttccaagccgtggggattccgggggccgctgcaattttgaacttcgtggtcttgacggccgccatgtcagcaaccaacagctcgattttcagtaccagtcgatcactgtacgcgctggcaacgggtcacaacgcaccgcaaaagtttgccaagctgagcaaccaggctgtgccgaacaatgccctgcgcttctcgtcattgattctgtttatcgtcgtcatcttgaactacatcatgccagccggaatctttaatattgtttccggggtctcaacgatcaactttgtctttgtctggctgattatcttgtggtgccacatcgtttaccgcaaaaagcatcctaaaggcgtggctgctttcaacatgccaggattcccattaaccagctggctgacgatcatcttctttatcggcgttttggtaatcctgttctttgttaagtcaacgcgtttgccgctgctgatcagttttgtctggtttattgcactgtttgtcggctataccatcgttgacaagcgcaagcaggcccaagactaaaaagattttataccaaatcaaaaagcctgtttagatcatttaatttagacgaaaaaaatcggataatcgtataattgagatagcgcttccatcggcttgatgacgcggtttgagttgacttttaaatgtggggaatttataataaaagcatggaagaaacctcatccgttgcaaatgtaaaagtatccagcaatcgcctttaatctgggcgatggcagcataacacaccccacatcacacaataaattgaatttcctgaagaaagcttgttaactaactaaattagtggccgtatctaatgtacaaccttatttgagaacgtcgacaattgaagttgcatagatctcttggcataaagagaccagattaagtaagcaaggtaaataatcgagttttgatattaagtatggcaacggcaagcgcttcttccccaaggcctggtgaatattcaccgggtcttttattttgcacgttttagtatggggttcaagaccagtgccggattgatcgtgggatatcgctagagtctggatatggcaggcgtccagccaatcgagcagtaccaatctcgctgtttcattaaagccataacagcatcagaagtgacagcaaagtcgatcaattgcgctggagaaagcgtttgaaatccgccgccaaagccggtaaactgacagcaacagcaacagcaacagcaacagcaacagcaacagcaacagcaacggcaacggcaatggcaacagcaacggcaacggcaatggcaacaggtcattttcatgaggtgtgatgccaaaagcggctcaaaagccatggaacagtagtacaaagatagagccgcgattactgatccagagcagctgcgtgaagatagagcagtggtggctgatccagaaaggctgcgcgaaaggaggagtgtgatggctgattcaaacaaaatcggcaagtatgaactgacggctttgatcgtgggcgcgacgattggctcgggaatctttggcgtcaacagtgatctggccaacgtggcggcaccgggaccggtaatcctgggctggctgatcgtcggcctgggcgtgtggtgcctgattgccgcgctgaatcatctcttgctccgctaccccaagcaggacgccggaatttttgcgtacgcggggctttcgtttgggccgctgggcgagtttatttccggttgggcatactggctggcttcatggctgggcaacctcgcctttgccacgattgcgatgagcgcgctggggacgttttggccagtttttcaaggtggtcagaacctgccgtcgattctgctggccatgcttttgacgattgggtttaccgtgatcgtcagctatggtgttgaggctaccgcgctgctcaatttaatcggtacgcttgccaaactcataccattgctgatcttcaccatcgtagcggcattggcgtttcattggtcgacatttgtcaataacttctggggcgcggctgcgcagtcttcccgtcccatcctggcagttgccgatcaggtcaagaactcgattatggtgatgatgtggctgtttatgggcgtggaaagtgcctcggtcatggcgcaccgagctaagcgtcagcgggatgccgttgttgcttcatttggcggctggctgattctgctagtcgtctacctgctgatctcgctgcttccttatggcgtaatgacgcgcgcgcaattggctggggccgcgcaaccggcgatgggtacgattctaagtcagttggttggaccctggggcgcggctttgatcagtttgggattgatcgtttcggtgctggtggcctggctttcgtggacgatgctgccggcggaggcgtttttgatgatgactaaagaccgagtgctgccgcgttcgtttggcaggctcaattcgcatcatgccccgacgaccgcgctttgggtaacggcgatcgttcagtgcctgtttctgtgctcgctgttgtttacgacctatgcttatcggtttgcctatacgctggggacggctgcgggactgatcgtctatttctttgttggactggcgcagattaaagatggctggcagcagcgtgcttatggtcaattagtaattggcatcctgctgacgatttttgagttgttgtcgatgactttggctggctggcggcaagtgatgattttatcgctgagtctgctgccgggctttctgatttattggcaggctcggcgcacgcgaaagctgagacttgccaaaaacgaatggctggcgatgggcttgatcagtattttggctgttgtttcgttggttttgattttgaacggtacgattccgatcgaatagggggaaaatttatggttgagattgctccatttggcgtggaagcctggttgaacaagtgggaaaaaagcgcccgctacgatatttcacaaagcacgatcgcttcattgacgatggacgagctgatgaatctggatggtcatcatggcgcggagttttacgagatgctcaatgcccaaaagatgaactacggctggattgaaggctcccccagctttaagaccgaagttgccaagctctatcgccacgtggatccgcacaacatcctgcagaccaatggcgcgacgggagcaaatctcttggcgctctatagtctggtggaacccggcgaccacgtgattgctgaatatccttcctatcagcagctctatgacattccaaaatcgttgggggccacggtcgactattggcagattcatgaaaccgccaactggtatcccgacattgaagagctaaagcagctgatgcgccctgataccaagctgatctgtctcaataacgccaacaacccgaccggcaccgtcttagaccaggaatttctacagcaggtggttgacctggcagctcaggttggcgcctatatcttggttgatgaggtctatctgccattagatcagccagaaaaattcgtttcaatcgtggatctgtatgacaaggggattgctaccaactcgctttccaagacttattcggttcccggcattcggattggctggacggctgccaatgccgaactgaccgagcgcttccgcaagtatcgcgactatacgatgatctgcggcggggtctttaatgatctaatggccacctatgtcctgcgtcataaacaacaggtcctggcacgcaatcgaaagctggtcatgagcaatctgcaaatctatcaagagtggattgccaatgaggagcgagccagcgtggtcatgccgcaagccgtttcgacctcgttccccaaactggatgtgccggttgacattcatcaattctgcgagcagctgctggctgaccagggcgttttgttggtgccaggggatgcatttgatacgccaggccacgtcagattggggtattgtgccccgcaagctacgttaaaagaagggctgaaacgactctcgatagctttgcatcaatacgactgattaacgactttgttcaatttcaaacgattgcatttttcactaattagcgctgttttaaaagtcaaagcgatttcagcgtggtatactaaagttccttggcaggggcagcggggctgactactacttaattgtaagtggttacagtctcgcttttattttgcattatcaaatggtctataaaaaaacatatgaagctttaaacgttttaccgaagaaatcagaaaaaagtttgtgaaatttgaatcacacttctttaacaaatttttaagttttgccttgatttaaaacggtttacttccgaactatactggtaacggtttcatagtttcacaaagtcgataaatgtatgcggtttacagttttacaaaagatgagtatattattatggcacgcaagattttctcggttcgactgcaattattccgctattctgagatactgagaaattgcgattgagaaaaagttagattcagtttttaagaaaggtgttatatccatgtatcttgcaattaacattcttgggttgcttgtcttcttgggtatcggttttctgttctctaaggacaaaaaagcgatcaactggaaagcaattgctatcatgattgtattgaacctggtcctggcctggttcctgactggttcagctgctggtcgtgccggcgttaaggccgctgccgacggttttgcttggatcgtcaacatttctgctaagggtactgtctttgccctgggtggttggtacaatgttaagaacctgaacttcatctgttctgcattgatgccaatcctgatgatcgttccactgttcgacatcctgacttacatcggcttcttgccatggatcatcaagtggatcggtaaaggtctgtcattcatcacgggtcaaccaaagttcgaatcgttctttgccgttgaaatgatgttcctgggtaacacggaagttctggccgtttccggtatgcaaatccgtaagctgaccaaggctcgtaacctgactatcgccatgatgtccatgagctgtgttactgcttcgatcctgggtgcctacatccaaatgatgcctggtcaatttatcctgactgccgttccaatcaacatcgttaactcactgattgctaccagcctgctgaacccagttacggttgatgaatctgaagacacgattgaaaagattggtaactctgacaacggtaagaaggaaccattcttcagcttcctgggcgactctatcctgggtgccggcaagctgatcctgatcatcattgctaacgttgttgccttcgttgccctggctgctctgatcgacgccatcctggctctgttctggaagcagctgtctctggaaagcatcctgggtgtgatcatgttcccatttgcttggctgctgggtctgcctgttcaccaagcatggatgctgtcgcaagacatgggtatgaagctggttacgaacgaattcgttgttatgggtgaagttacgggcaagatcgcttcttacccacaccacctgcaagccgttctgaccacgttcgttacttcctttgccaacttcggtacgcttggtatgatcattggttgtttcaagggtattgccgacaaggaaaccaacgactacattgctcaaaacattggctacctgctgctgtctggtatcttggtatcactgctgtctgcagcctttgttggtctgttcgtttggtaagatctacgactgcatgcgcttaacgcgttttgccagtcaaaaggggctggccgtccattccggttggcccttttgtttcccagaaaagtaaaagcgcttactgacgcttaattgtaattttaaggaggaattcatgatgacgactaagattattatggacactgatcctggtattgatgacgcagctgctttgacgatggcaatcaacaaccctgaaatcgacttgaagctgatcacggcggttgctggtaacgtttcggttgacaagacgacggccaacgcattgaagatcgttaacttctttggcaagcgtgacgagattccggttgcagaaggcgccaaggaacctttgatcaagccatttgaagacgcagctcggatccacggtgcttctgggatggaaggctacgactttggcaatgactacggtacgccaattgaaaagagtgccgttcaagctctgcgcgatgctatcatggctgaagatgaaatcacgctggtgccaactggttcctacaccaatattgccctgctgttcaaggaattcccagaagttaagagccacatcaagcaaatcgttgcgatgggtggttccctgactggtggtaacatgaccagtgttgctgaattcaacgtcttcactgatcctcacgcagctgagatcatgtacaagtctggcgtgccaatcgtaacggttggtctggacgttacgctcaaggccttgctgacgcaggacagtctgaacgccatcaaggacatgaacgagactggtaagatgctttatggtttgatcagccactacaacgatgtcagcgctgaaactggcggtcacccaatgcacgacgtcaacacgatcttctacctgctgcacccagaagcatttacgaccaaggacgtttggatcgacattcaaactgatggtcctgcaatcggtgccatggttggcgacattcgcggtgcctaccatgacggcaagactaacgctaaggtatgtgttgacatcgacgcggctgcctttaacaagtggtttgttgaagaagtcagcaagatgcgctaaaaccaaataatcatctggaaactggctgcccagttttcagataaaaagccgattgattcgccaagcgcgtttcaaccggctttttgcgtatctggaaatgattcgatagcgttgttggacacgggctgccagcgggtttatcgagctggcgcgacggcatctaaaaatccgctgtaaatcgttggatcgcttgaaacaacggcctttttggggtaaagtaatggagtatgtgaaacatcttcctgtttcacaaaggaggatttatgacaccggaagaatttcgacgggcactgcaggatcacggtattgaactgactgatcagcagatgacccaatttgcgatttattatgaagatctggtggccaccaacgaacacgttaatctgacggccattacggatcaaaaagaagtttatctcaagcatttttatgactcgttgacgggagcgctggccgaacctcgtctgcagactgaagccttgacgctttgcgatattggcgcgggtgctgggttcccttcgctgccgctgaagattgcctttccacaactcaagattacgatcgtggattcactgaacaagcggatcaagtttttggccgatctggttgccaagctgggcctaaccgacgtcaatctgattcatgatcgcgctgagaccttcagtgccaaaaagagtccctaccgcgaaagttttgacgtggtcacggcgcgggcagtggcgcgactggcagttttaagcgagctttgtctgccagcagctaaggtcggcggcgagttcatcgcatataaggccagtgccgctaaagacgagctgcaaaaaggcggtaaggcggtcaaggtactgggcggccaggttgagcacaccaccaagctgaccctgcccggtacggatgaggaacgcaatctgatcgtaattgaaaaagttgccgcgacgccgaaaaaatacccccggcggccaggactgcccaacaagcagccaattgagtagaaaagaggattgagacatggcattttcactgtttggccttggcaagcaccagggaaccgccagcgaaaccaaaaatcaagtcgttgagattccggttgccgccatcgtgcccaaccaataccagccccggaaggtttttgaccaaaccgagattcaagagctggcccagacgatcagcgagcatggtctgctgcagccaatcgtcgtgcgggaatttcgaccaggcgaatacgagatcattgctggtgagcggcggtttagagccgttaagctgctgcaatgggaaaagattccggcgatcgttgaaaagatgactgacgcggaatcagcttcattagcgctgatcgaaaatctgcagcgcgcccagctgagtccggttgaagaagcgcaggcctacaagcaattgatggaattcaaccatctgacccaggcaacgctggctaagggaatgggcaagagtcagtcgttcgttgccaataagctgcggctcttgaaactgatcaagcccgttcaaaacgcgattttggatggccggattaccgagcgtcacggccgggccctgctgagtctggatgaggatcagcagcgcacgcttttaatggagatcgtcaaccagcattggaacgttcgccagactgaagatgccgtggcacagatgctgggcaagccaaccagtgcggaaaaggccgcgcaacaggctgctctggaaaaagctgctgccagtcaaagcgatgcgacggccccgtcaagttcggcaaccgaaaatgatgccgttgctgaaccagctaaaaaaaatgctaagcagaagcgggctaagaaaaagcagcctaaatcaatcaaggtcaatgacccgcggattgccgtcaacacgatcaaacactccattaagctggtcaaagacagcggcgtggcggccaaggtcagtgaaaaagacacggccgattcatatgagattaccattcgcattccgaagcactaaaggaaggactggcgaaacatggcaaaaaaacgtggctttagtctcgcggcgctgtttggcgataatgatgccaagcaagaccacgagcaaagcgtagaagaaattgaactaacggcgattcggcccaatccataccagccgcggcgtacttttgacgaagcggccctgcaggaattagcagcttcgatcaaagaatcaggcgtctttcagccaatcattctgcggcagccggatccagagctgaatcgttatgagatcattgctggcgaacgacgcttccgggcttccaagctggctggcaaaacaacgattcccgcgatcgtgcggacgatgagcgactcgcagatgatggaggttgccgttttagaaaacctgcagcgcgaggatctgacgccactggaagaagcacaggcctatcaatcactgatggaccgcctgcagctgactcaggcccaggtcgctgaaaaattgggcaagagccggccttacattgccaactatctgcggctgctgggactgccacagccggtcaaggatatgctggaggaccaccgcttgtcaatgggacaggcccgcacgctgttggggctaaaggatgaacgagcgctcgttaagctggctcagcgcgcggttaaggaaaatctgaccgtgcggcagcttgaacagctggtggccgaacaaaatcaaaccgtcaagcctgctaaacccgcgaagaaaaaggcgactgtcaaaaagccagcctacgttcgtgaagccgaagaacagctgcagagccggtttggcaccaaggtcgtgatgacggcaggcaaacggggcggcaaagtcgagattccgtatacctcggatgatgacctgacgcggattttggatcttttgggagtcaagttcgattagagaggagcagttgcgatgaaaacctatgaactaaacgacattgtgcagatgaaaaagcagcacccatgcggcaccaaccgctggcagatcatccgaacggggatcgacgtcaagctgcagtgcacgggctgcggtcatatcgtgatgatgtcgcggcaaaactttgaaaagcatctcaaaaaggtgctggaacatgccgaaaacgaagcagactaattaaaaaggagcaattatttcatgtctttaactgcaggtatcgtgggactgccaaacgtcggcaagtccacgctgtttaacgctattaccaaggcaggtgccgaaatggccaactacccatttgccacgattgaacccaacgtggggatggtggaagtgccggacaagcgcctggaacgaattcaagaactgattcccgccaaaaagatcgtgccaaccacgtttgagttcaccgacattgccgggatcgtcaagggggcctcaaaaggtgaaggtctggggaaccaattcttggaaaacattcggcagactgacgccatcgtgcatgtcgtacgggcatttgacgacacggacatcaccagtgtttccggcaaggttgatccaatcgaagatatcgacacgatcaacctggaactggtaatggccgatctggatgccgttaacaagcggctggccaaggttcaacgggcagctaagggtcgcgacaaggaagctctggctgaactggaagtcttaaacaagatcaagccggttttggaaaatggtcaaagcgtgcgttccattgaattcaacgaccaagagcaaaaaatcgtcaagggtctattcctgctgacgagcaagccggtcctatacgttgccaacatcgctgaagaagacatggccgatccagatgccaacaagtacatggatgccatcaaagaacacgttaagggcgatggcgaggtcattggcgtagcggcagcggctgaagaacagattgccgaaatggatgaagaagaaaaggccgacttcttggaaatggaaggtgttgaagaacccggcctgaaccggctgattcgggcagcctacaaactgctgggactggaaaccttcttcacggcgggcggaccagaaacgcgggcctggacctttaagaaaggcacgaaggcaccacaggcagccggcatcatccactctgactttgaacgcggctttattcgagctgaggtcatgagcttcgcggatcttgacgaactgggcagtgcccaggccgttaaagaagccggcaagctgcggctggaaggtaaggaatacgtaatgcaggacggcgacatcgttgagttccgcttcaacgtctaatcattaaatcaattaaatagagaggaagaacatcttggctgaatcaaaagaacaacaaccacgcaatgccgctgccggccagcgacaaaaagaatacgccaaagaccagcgtcaagaaacggcgcgggcttttggcaagcagggactgacgcgtaaaaacgaagaattcatgttccaattaaacaagcagctggacgcacagggcgctgacccagccaaaaagccaaccatgcttgaagaaacactcaaagcgctgcaggaaggccaaaagactggtcaaacggcgcgcggcctgtttggtacgccaacgcagcgggcccacgcgctgctgcacccggagccaactgaacaatcccagacgcagacttcattaaagctgatggcactggataacgggatcatgttctttgccatctttacctttatgtttgggctgatggactggatctctccacaagcaatgaaggtttcccataacggtaatatggggatcacttcaatcatcatcgtagccattactggtgggattttgtttggctggatcgccaagtacatgctgccagttaaaaacgaagaaaccggcaagtacgtcaagcggccattatgggcacggatcgttacggtggtcagtggtctggtaatgtggattttgatctacattctgacggccatgatgccaaacagcgtcaacccacgtctgaatcaatggttctacctgattttaggggtggcagcttttgcgctcgacatctggctgcggggacgctaccacattaccagcgccttttcgccacgccgtcagcagcggcaataaaaatcagcatcgcggttccacgtgaaacgcggtgctttttataaattgtcagaatctatcaccgacagatttggtatttagtcctaaaatggtggttaaaaggagttaaagccgaacaatctgaaaaatattattagaattatgttagaatcacgattattcgttgaccaatcgccaaaaacctagtaaggtagtagctaatatttaaagaaggaagtgcagattgatgtcgaattgggatactaagtttgccaagaaaggcttaacgtttgatgatgtgctgctgattccagcggaaagtcatgtcttgccaaatgaagtcgatttgagtacgcagctggcaaagaatattaaactgaacgtgccatttatcagtgccgggatggataccgttactgaaagctcaatggcaattgcgatggccttgcaaggcgggatgggggtcgttcacaagaacatgtccatcgatgctcaagccggcgaagtagccacggttaaaggcgttgaactgcctgccaactcaaacttcaaccgcgctgccgttgacgaaaacggtcatctgctggttgcggctgccgttggggttacgtccgacacgttccaacgcgccgaggctctgctgaaggctggtgttgacgcgatcgtaatcgacacggctcacggtcactcggctggggtgctgcgcaagattgccgaaattcgcgaacatttcccagaagttacgctgattgctggtaacgtagccactggtgaaggtaccaaggcgctgtttgacgctggcgttgacgtggttaaagtcggcatcggtcctggctcaatttgtacgacgcgggtggttgccggtgttggtgtcccacagattacggcgatttacgatgctgcttccgtggctcacgaatatggcaaggccatcattgctgacggtgggatcaagtactctggcgacattgttaaggccctggctgctggtgggaacgccgtaatgctgggcagcatgtttgccggtacgacggaagcccctggcgaagtctttgaagaaaacggcaagaagtacaaaggctaccgtgggatgggttccgtggcagctatggctcaatcgcatggttcttctgaccgttacttccaaggtggggtcaacgaagccaataagctggttccagaaggtatcgaagcccgggttgaatacaagggcgacgttgctgacgtgatcttccaaatggtcggcggtctgcgctccgggatgggctatgttggcgccaaggacattccaaccttgatcgacaacgcgcaattcgttcagatcacgaacgctggtctgcgtgaatcacacccccacgatgttcaaattaccaaggctgctcctaactacaaataatggctaagccttaattcaaaagcgctgctcgattttaagcagcgcttttttgtgttctaaaacgtcatttgatgattgtttgattggctggttggctaaatgtgttaagataacagttagccaaacttcgaaaaaggatgagttatataatgaagaaactgttcattttgttgatgattttagcagccgtttgttttgtcggcgtctggatctatcagacacagcggctcaaaaagaatgcccaggcaccaatcggcaaaggacaggtagtcatgaactggagcttgatcattttatttgtgatcggtctggtgggagcatttgccgcgccgggagataaaaccagtgcgccggctgaacatcatcctgccaatgaatatgccactaaggtcagcaaggcccagtccagctcagagtcagccgcggccgcttcttccagcagctcgcagtcagccagctcatcatcagcgagttcttcatcctcatcggcaagttcttcatccagcagtcagctgcagatcgattttccgactgacgtttccttaaacaagaccggggatgcgaccgtcagctttaaggcgccagccaacacgcagtttgagatcaaagacagcaataacaacgtcgtgacgactttgaacggcaacgcgcagggggctgatcaaacctataactttaaaaagccgggcaaataccacgttaccgctcataatggcgaccagaccattgataaagatttgaccgtgcgcggtatcgggcaataaataataaaaaaatttattaacaaattttgtttcattaaattatttataaaatataaatatacagcgttaacaaacgtaacattgcgtaactgtgtatataaatcaataaattaatcttttaacaattgaggcgttaaaccctagtgcgacaagacgtgcggggcttgacgccttgatttttttggcgtatgcatagataattttaaggtatgtagatgtaaaaattttttaaaaaatgggactatgtaaatatgaatgaagaatcgaagcaaaatcaaccggtgcaccattcgcaccatcaccaccaccatcaccatcgtcggaaacgactaggtttgaagattttgtggtcatttattggatttttggtaattctcgccttgattttcgcgggggttgcctggcgaaacgtccatgttgctaccaataatatgtacagcgaatcaggcgccaagacatatcggaatgctgacaaggtcctcaagcagggcaagccaatcaatatcctgcttttggggactgatacgggggcgctgggccgtgattacaaagggcggacggatacgatcatgatgatgacgctcaatccgcaaaaaaagacgaccacgattgtcagcctgccgcgggacatgaaagttaatctgcccgactacgctgaatattcaccggccaagatcaacgcggcctatacatatggtggggttaaagaaaccatcaatactattcaaaaatactttaacgtgccaattgactactatgtaatggtcaacatgggcgggctggaaaaagccatcaaccaagtaggcggcgtcagcgtaacttcgcctttgacgtttgactatgaaggctacagctttaaaaagggtaagacgtaccacatgaatggtgctaaagccctggccttcagtcggatgcgctatgacgacccacaaggcgactatggccgacaagaacgacagcgcctggtcattaccgctttaatgaaggaagctgcttcatataagtcagtgctcaaccaaaaattcttgaattcgattgctgatcagtctaagaccaatctgacgttcagcgacatgacgactttagccatgaagtatcgcaaggctaatggcaaagtgatttctgatcacgcgcagggccatggcgacaatgaaggcggcgagtcgtttgaagtcgtgccaaccagcgaaatgcagcgcgtatccgatgagattcgcgatgccctgcaacttaaacacgtcagcgtgactgattaaaggaggaaaacattggaaaacagcagtaacaacacgatcgatttgcgtcgcctgtttaatctgtgccgtaaacatctgaagtttttgattacctgtacgattgctctggcattggcgggctttatcgtttctaaattcattatgacgccgaaatacacggcaaccacgcaattattggttaaccaaaaaaatgaaaacaatgccaatggtcaggcctacaacaaccagcaggccgacattcaggtcatcaatacctacaaggacattattaccagtccagtaatcctaaaagaaaccaaaaaagagctggccaacccagttaaggtcattcgtaaggcccagccagccaagtacaagacgctggctgatggaaccaagcggctggtcagcgcggctaagccagctaaggttgaacacactagtcaaggctacagcatgacgaccagccagctgtcagacgcgatcacgatcaagacgcagaccaactcgcaagtcttctcggtcagcgtggaaaccgataatccaaagaaatccgcggcagccgccaacacgattgccagcgtcttcaaaaagcggatcaaaaagatcatgaatatcaacaacgtgacgatcgtggcccgcgcgacaacgccaagcaagccatcatcgcctaacgttaagctgtttacgctggcgggggccgtcttagggctgttgatcagctttatgatcgtactgatgcgtgatctgatggatactagtgtgcgggacaacgacttcatggttgatgagttgggcttgacgaatcttggtcagattacccacatcaacttggatgacggtttctcaatcaagcggcgttcgcaaaacacgcagacgcgccgggtctaaaggagggttatgatgggaatcttcaaacgcaagtcacgaattgacaacaatacgatgaaaaacggcgccaagctgatcacggtggctaagcccaaaagcgtagccgcggaacagtttcggaccgtgcgtaccaacattcacttcatggccgtggaccgacgcttaaagacgattgcttttacctctgccaacatcagtgaagggaaaagtaccgtcgctgccaacctagctgtcgtctgggcgcaagaaggtaagagcgtgctgctgatcgacgccgacatgcgccgcccaacgcttaattcaacttttgatttgaccggtcagtcgggcttgtcaacggttttgagcagtgatcaatcagaagtcaacttaaatgatgtgatccaagaaagcgggattgaaggcttagacctgctgccaagcggggcggtaccgcctaacccagccgagctgctgagctcacagcgaatgaaggtacttttggaagccgtgcaggcccaatacgatctagtcgtattagacgtgccgccaatgctggaagttactgatacgcaaacgattgcgggcagcgtggatggcgtggtgttggtcgtgcggcagggtgtgacgcaaaaagctggcgtgcgccgggccgttgaactgttgcagatgagtcacgcgcatctgctaggctatgtcttgaatgacgttgtaccagaagacgacgcgggctacggttatggctacggctatggctacggctacgaaaaagaatcggaaaactaggctcgccgcatacagcaggaaaggtgaatcaagatggttttgatcgatctgcattgtcacttgttgccaggcgtggatgatggttcacctgacctcgccacttctttaaagctggcccaagacgcggttagtgatggcgtaacgcacgctttattgacgccgcatcatatgaatgggcactatatcaatcataaagtcgatgtattgcagctgacggcggactttcaacaagcgctgaatgaaaacgagattccattaacggtttttccaggtcaggaagttcggatcaatggcgaactgctggaagccttgcaaaaagatgatattttatttgcggatgagggcggccgctacatgctgctggagtttcccagccaagaagtgccacagtacgctaaggaaatggtctttaagctgcggcagcaaggcatcgtgccgattatcgtccatccagaacgaaatgccgagctgttggaacatccggaaagactgcagccgtttttagagcagggatgtctgactcaattgacgtccagcagctatctgggtcggtttggcaaaaagattgaaaaggttacgaccagcatgatcaaggccgggcagggagcaatctttgcctcggacgcgcatgccttgagtcatcgcgaatacgagctcagcgaggcgctgcagaaactgcgcagtgaatttggcgctgagctggctgatacatatgaacaaaatgcgcgcgacataattaatggggatcaagttaatttagattggcagccactgcctaaaaagaagcatttttggttcttttagttaagaaaattaggtggggggaggggtgacctcgcccctcttttcgactaaaaaggatgattaagggaggaggaatcgtgtgatgatggcaacaaaaactaaagcatacgtcaatcagcagcgcgtaaaaaagcggctgttttatccagtctgcaagcgcggctttgatatgattgccagcttgcttgccttactgttgctttcgccattatttttggtgattgcagtacggatcaagcttgaagatggcggtccagtaatttactcacagacgcggctcggaaaaaacgaaaagccgtttaaaatgtacaagtttcgttcaatggtgcagaatgccgatcagattaaacagcagctgctcgaccaaaatgaggttgaaggtgcgatgtttaaaatgaaggaagatccacgagttaccaagactggtaagtggatccgcaaatacagcttggacgaactgccacaattggtaaacgtactcttgggggatatgagtctggttggaccgcggccgccactgccaagcgaggtcgctgaatatactgactatgataagcagcggctgttggttacgccaggctgtacaggactttggcaggctacggttcgcaataaggccagttttgatgaaatggtcagtttagatattgaatacataaataaagccagtttttggtatgactgttggattatctttatgacggtcaagattatgatctttccgaatagtgcatattaattttaagtgagataaaaatggaacatattt

SEQ ID NO: 1836 - DNA, 5157 bp, Unknown
  gut microbiota DNA sequence
atattagatattttgggttttaatttgttttccccatatcaagtggggctgcggtcgtcattatgatggccgtttttttgtgcagcaaaaagtgcaacgattagaaaatttatatatcactatatatcactaaattaagctaatatgcatatttgcgcattataaaaaactatataacattataccaaccttagcttttaatgtttgaaatcattgtttgatggccaacgagcgcgctacaattagcttaattagattcagaaaggaagatggcaacatgacagctttgattaatcgcaagacgcatcatattggcggcgttgagtttcgcaatccgcgcaaatttcagctgctggcagtgacggttgccaacagtgccatggaaggctgggagccaaccgatgagcagatacgggcactggcttgatgcatacgatcacccgcagcctgaattagacgcacaattgaatcatctgcggcattggcgggttccggttgctaagccggcgatcacggatgagcaggccttagctcatacttttttaaatccaaacggcactttgaaaaataagctgggcattcatgataaagcggatcttgatgagcatgagtttgttcaaggttcattggtagggctgagaatgctgcagcgcggttttaagatagccagtgttgacgatctatgccggatcaaccgggccttgtttggcgatctatacgactgggccggtgagctgcgcaactataatctgaccaagcagcagacgttgtttttgccaccgaacgtttttgacaatggcattcgctcggtcaatgctgagattaccgctttaaagcagcagtcacgaccacagatagccgcatacgccaagcttttggacgagctgaactacctgcatccgtttcgcgagggcaatggtcgggccattcgtattctgattgaattattggcaaacgaaaaagggcagtatctttattatgacgctgaggatgatgagtttatccaggcgctgtatgactcaaaggttgacgttctaatccgtaagctccatctaacggctttggcgacagaataatgctataataataaggatattttatgacgaggagctttttttgtgaaactaccaactgcttttattgaaaaataccgtcagctgttaggtaatgaggccgatgcgtttttggccgcgtttgatcagccaagctgcagcggctttcgtaccaatcctttaaaaaacggccaaccggatgccacgttgaaaacagcgtcaggtaagattgaatatgttgaaaatggctggtttggcaaggttgatggtaagtcgctggatcacgttaccggttgggtatacagccaggaacccagcgccatgtacgttggcgaggttgtggatccgcagccgggtgagcgtgtgctggatctatgcgcggcaccaggtggtaaaagtacgcatttaatcgccaaaatgcatgatgagggtctgctggttgccaatgagatctttcgcaagcgggccaatatcctagctgaaaatcttgaacgctgggggactaggcatgcagtcgtgatgaatgagagcccagctgacctagaaaaacagtttccgcagttttttgatcgaatcttagtggatgcgccttgttctggtgagggaatgttccgcaaagagccggctggaattgagtattggacgccggattatccaagtgaatgtgccaatcgtcagcgcaagattttaagctcagctatgaaaatgctcaaaccggggggcacgctggtttattccacctgcacgtttgccccggaagaagatgagcaaaacgcggcctggctgttggacaactatgatctgaccatggagccgatcaagaagtatgccggtatggacgatggccgaccagaatgggcagaaggcaatcctgaattaagtcgtgccgtgcgtctgttcccgcatcatatccaaggcgaaggccattttattgctaaattccgtctgcagggcggttcagtgatgccggtatcagctaaaaagaaaagcaagaaaaagggcaagcagcgcgctaaccataattcgattaccaaagagcagcgaaccttatttgaaaagtttgctgctcagacaatgcccagctatcaagctaatcagctgctgacttatggtgaccagctttatgatctgccaaagggaatcgatgagatcgcgcagatgaccattctgcggccgggactgcatttgggaacgtttaaaaagaatcgatttgaacccgcgctggcctgggccttagccagtcagcccactgataccgaccatgtcttgtcgattacgcttgatcagtggcgccaatacgtgcatggcgatacgctgcagctgagtggcgagcctggctggcagctgctggtttgtcaggggcatgtctgcggctggggcaagctggttggtcaaacgcttaaaaacttttatccaaaagggcttcgattctagatcgctttatttacttgaacgatcatgcaatcagcctaacgagagtcgtaaataaaagcggtgctgtcccaaggtgaggacggcaccgctttttaagattaaaaaaacctcatctcatcggttgagacaaggttggaggctaattgtaggccagctgcatggcttgacttgagccgcgaccgttaagcttgcccaagagttgcgacagttccaggcgccgctgctgatgaggaaccaaaacccccatcttatcagcattgaaacccgtcagcattttgtggccactgacgattagcggacttttaaggatctgtggtgtttcttgaatggcatcaatcagctgattcatcgttggcgcgggatgtttggcgtaaagttctttggttgccttggaacgttcggataccagcgtttcagtgccatcgggcgagagttccagtaattggagaacttcatcgcgcgttaaaggatctttattcaggttgcgggattggaagtcaaggccatgcttggtcagccatttttccgcgcgccgtttggcaggattatttgtgtgaaagtaaaatttaatcattggcaatttcctttcataaactagtttcgtgtttttcttcttcaaacaagccattaaccgaaatgcggacgactcttttgatctgtgcatcgtcgacttgcgtattgttgagctttgcctgacgcaaaagccacatgattggtcccagcagcagggcgccaaccagaaactggtcgccaacgactgctgcttgactttctttgcacagacggcagtatagtccgctcagactgttggtaaacgtggcgccttcctgcctggcagttggcgtaatcaattcgggagcggcatgaatggccatgatgtagttggcctgcagaggatattttatatactgccgagcaaaatactccaggcaggtgattagttgttctttagttgagtcggtttgggctagctgttcgtctagcccggattccagctgctgtttagtagcaacatagatctgtgagagcatgtccgttttatcgcggtagtacacataaggggtgccggaactgatgccggcccatttggcgattttaccaaatgacagccccgcgagaccgtcacgatccacgatttcaaaaacggcttggataattttagcttttttagattggtctttttctctcatgttaatcatactaaatgatcatttagttaaagtcaatgaaatcttgaaaaaaaccggaaaaacttgttgattaattaagaaagcgttattattgataaacgaataacaataataggacaattttaacgagcgagggattaattttatgatacttggtagtattgaagccggcgggaccaaatttgtctgtgcagttggcaatgaaaattatgaggtaatcgataaggcaatcttccccacgattgacccagcaaccacgattggcaactgtattgcattcttcaaaaaatatccggaaatgcaggcgatgagcgttgccagctttggaccgatcgatatcgacaagcattcggccaaatacggctacattactgatacgccaaagatcaagtggtcaaactgtgattttatcggaatgctgaagcgtgggctgggacaaaacctgccaatctactttacaaccgacgttaatggctcggtttatggcgaatacgtcaatctaaaggatcagctgcctaaagccgacctggtctactatacgattgggactggcgttggggccggagcaattcaagatggtcactttattggcggcgttggggcaccggaaatggggcatgtcttggtaaagcggcatcctgacgatctgaactttacggggatctgtccttatcatggcgactgtctggaaggcctgctgtgcggtccgacctttaaagcacgccttggtaagcgaggtgaagacgtaagcgacgatgatcatgtctgggacattatggcttattatgctgctcaggcagtaatgcaggcaacgtcaattctgcggcccgcccgcgtgatttttggcggcagcgtttcacgaccacactttatggaaaaggttcgcaatcagttcagacagctctacaatggctatctggaagtcggcgatctggaagaatacatcacgaatccaagcgttcctggcaatggttcggcaacgctgggcaactttgctttggcagaaaagatgcttcatcaataaaaatgagatcacggtgcttgaacgggcatgcgtgatctttttgataacgggttttggttttcccaggaaataatcaaagcaagccggtcgcattacattgaaaacgaaaactgcacgggtaattgacgcgttgttggcaagtgcagtctgggagttagctagggcttaacgtggcttggctgtcatttgatgataaagtaaatgatcgggcgttgatgctttcaagcaggcttgtttgtgaagaaaatcgaatcttgagcagcttacaggactggatttacctactattcttcgtttttggaccggaagtaggtaagtgaatattcaattcgccaaacattacctacttgagacgaattttttccgaatcgtaggtaaaaatgcatatttagaaactgataggggttgattggatcagaccgactttgtgaattacctactattgcgcgatttttat

SEQ ID NO: 1837 - DNA, 119913 bp, Unknown
  gut microbiota DNA sequence
gttcccatgccgaacacagaagttaagcttcaacgcgccgaaagtagttgggggatcgctccctgcgaggatagggcattgccatgcattattccggcatagctcagttggtagagcacctgactgttaatcaggttgtcgtcagttcgagtctgactgccggagtcattgaaatactgatcggtatttcttttgccaacttagctcagctggtagagcatctccctcgtaaagagaaggtcgtaggttcgactcctatagttggcataataaacattcgttaaatgttacaaagcttgatttatcaacgtttttcgtcggtatatcaagctttgtttttgtttattgcgaaaagtgctgcatacgttttgataagaaaaactcgaatctgctagttgtaactgaaaagctccgtgctgggctgatgcccgagatacggagctttttattttggccaggcttgactcatcgcttttaacagtggctggacggtgcgacgctcgctttttagataggtaccataaatctccatttgattattgggatcgtcaatcttgaccataacgcgatccccacctttaaggcgctcaacagtgtctggcaggttttgagatagattggaaacgaaaaatgggaaacgagaatactgactgatggttgtcatagcgttgacgctgttttgggataaaaaatcagcttgtgggatgttgtcttcaacgattccacgccaggtgccaacatcgcgcagtaccaagaaagtcaatcccgttaaatctttaaacgtaacggcttctttttgtgccagcggattgaatggatcaatctctaatttaagatattcacgtcctagatatagtgattcgaattcttcattgatgatttcgtgatcagtaaaaatcaccttttcttttagattcgatagttcagcagcaacgctttctggattaaccaattcccagttaatcactggctgaacggcaatctgatctttaagcgcgttcaaaaagcctagtggaccgggaatcattgagccaacggtaaatttgtcttttagacgatcaaagttaagaatcttgtcggtaaagtcatcaacttcttttaaaagcttggcggcttcattagcggccaataagccggtatcattgagcttgatatgattgctgatgctgcgatcgaacagggtgacgcccagttcttcttccagtcgtttcatgccgcgggtcacggttggctgcgtaatcatcagatgttcagccgtggcgctaagcgtaccatagtgtttaaaggcaaccagttcggccagcagttcaagattgactttcaaagccattcctccaatcgttgctatactatatctgtatagtaacatgcttaatcagtaatttttattttttaccccgacctttatactgatagacataatcaagctaacagaacaaggagaaaaaattatgcaatacgtaactttaaatgatggcaataagatgccgcagttaggctttggggtttttcaggttcctgatctgaatcaggctgaacaggcagtcagtgatgcacttgattctggctaccgtctgattgatacggcagccgcctatggcaatgagcaagcagttggcgcagccattaacaagagcagcatcaaccgtgatgaaatctttgttacctctaagctctgggttgatcatttcacatatgaaaaggctaaacaggggattgacgaatcactgcgcaaactaaacctggactatctggatctgtatcttttgcaccagccttatggtgatacggctggtgcatggcgggccttagaggaagcacaaaaagcgggcaagctcaagtcgatcggggtttccaattttgcgcctgatcagctgatgaatcttgaattgatggctaacgttaagccagctttgaaccagattgaagtatcaccttggtatcaggaaacggctgaagtgaaatttaatcaggatcagggaattcaagtcgaggcttgggcgccatttgcagaagggcagcatggcattttttccaatgaaaccattgcgtcgattggtgaaaagtatggcaagtccaatgggcagattattttacgctggctgctgcagcgtggtatcgtggtaattcctaagtcggttcacaaagctcggatgcgtgaaaacatcgatgtctttgattttgagctgagtgaggccgacatgcagctgatgagcagtttggacaaaaatgagagtcagttttttgatcaccgtgatccagccgcaattgaaagcatttttggccaaagcctgaaagcattacgcgactaactcggtttaaggaggaattttatgaaagcagcagtatttatcgctccaggacagattgaggtccaagagactgccaagccagaaatcgatagtgaaaaccaagccattattcgtgtcgttcgagcaagtgtctgtggctctgatctgtggtggtaccgcggcattgccaaacgagaagccaatacgctggttggtcatgaggcaatcggggttgttgaacaggtgagtgcagacgtcagccagattaaagtgggcgactttgtaatcgtaccgtttactcatggctgtggacattgcgtggcctgtctgaacggctttgaaggcaactgtctgaatcaaaagccaggatctaacggcggctatcaagcagaattcatgaaatatgaaccagctgactccggactcgtaaagattcctggtacgccagccgactacacggatgagcagctggcctcgctgcagacgctttctgacgttatggcgaccggctttcatgcagccaaaaatgctgaggtcaagccaggcgatacggttgcagtgattggtgatggcgcggttggcctgtgtggcgtaatcggtgccaagctgttgggcgcagaaaaggttatcctgctcagccaccacgaaaatcgagcagctttaggccgagaatttggtgctactgacattgttgcccaaaaaggcgccgctgccgttcagcaggtattggccctgactaaagaaaatgccggtgttgacgctgttttggaatgtgttggcgcggctggggccattgatcaggctggccagattgcacgaccgggagcagtgattggtcgcgtcggcgtaccgcatgctgaaccaaaatccaaccagctgttctggaaaaacatcggtttgcgtggcggaattgcctcggttaccaagccggataaggaactgctgctcaaggtcgttttggatggggagattaacccaggcaaggtctttaccaagagctttgaccttgatcacgctgctgatgcctatgcagcaatggatcagcgccaagccatcaaatcgctgctggtaatcgattagtcgttggtttgccgtcttgattatgtcttaaacattattgatggtctttcttaagcacaattaaaatttgatgatataatcacttaaaagacataagagaggcgaaaaacatgagcgacgtggatattgaagagattcgcttgctaacgaaaaaaggactcaatgagctgctggaacaggcccatctggaatcggatgatctgttcgtcctgggcttgagtaccagtgaggttcaaggcaagatgatcggcaagcattccaacattgaaattggccggacgatcgtcaaaacgattattgagactttaaaaccgttgggcgttcatttggccgtacagggatgcgagcatttaaaccgagcgctggtggttgaaaaagcggttgccaaggctaaaggactcgagatcgtcagtgtctttccccagatcaatgccggtggcgccggtcagattgccgcctttgaaaactttactgatcccgttgaggtcgaacatgtcgttgccaatgctggcatggatatcggtgatacgtttattggtatgcatgttaagtttgtccaggtgccagttcgtacttcagttaaggagattggtcaggcccacgtgacttatctgcgtacacggccaaaatatattggcggaccacgggcaaaatatgagtgggatccgttcaacgaaaaataaaacgggacaggtgcttgaaattgtgcatgtgcatgattttaagcactttttttagttaaaatctcaacagataattgttatcgcttacaattgtatttaatgataattttattaactaacagtatagattagcattcaattttaaaattttgtgaacatttattactttttaagatggtgcgcaaacgattccaaaatgccttgatatcacgatttacctcttggaataccggcacttggtttgacggaatgaagataaacagtatataatagtaaacgttattttaaggaaattgttactttcctttaatcttttgactttttcaataatttgactgagcttttattagatccaatcaaaatttggaggaaatggaatggataagcaaaaacaattagacacgtccttcttcgggcagccaagaggactggctacgctgttcttcactgaaatgtgggaacggttcagttactacgggatgcgtgccatcctgctgttctacatgtactacgccgtcagcaaaggcggtttgggcatggaccaggcaacggctgcttcgatcatgtcaatctatggttcgctggtatatctttctggggtgattggcggctggctttctgaccggctttggggaccaagaaagaccgtctttattggtggggttttgatcatgtttggtcatattgctctgtcattgcctgctgggacgacggcactttatgcttcaattattttgatcgttatcgggactgggcttttgaagccaaacgtttctgaaatggtcggtggcctgtacagtgaagaagaccggcgccgggatgccgggttctcaatgttcgtcttcgggatcaactttggggcggctatttcaccaatcgcagttccttgggctgctggtggttttggtctgcatctgtttggtaatgaaatgaacttccatgctggtttctcactggctgcgatcgggatgttctttggcttgctgcaatactacattgatggtaagaagtatctgccaaaagacagcctctacccagacgatccaatcgacaaagaagatcttaagccaatcatcaactggacgatcgttgccgtagttgtcttggcaatcatcctcggtctgatgggagccatgggtcagttaaacattaacagcatcatcaatttgattacggttattgcgattgctttgccaattatctactttatcatgatgctcaactccaagaaggttaccaaggtcgaaaaatcacgggttgtagcttacattccgctgtttatcgccgcggcaatcttctgggcaattgaagaatctggttcggttgtgctggcactgtttgctgctcaacggacggttctgcacattgggggctggcactttgcagctgccaacttccagacgctgaacccactgtttatcatgattctgacgccattcttcgttcacctgtggagtcactggaagaaccagccgagtgctcctggtaagtttgctgccggtctggtaatcgttggtctttcatttgcttggatggcactgcctggcttgattcacggcacgacttctggacgggtcagtccgttctggctggtcggctcatggtttatctgtgaaatcgccgaaatgctgatctcgccaattggtctgtcaatcacgactaagctggcaccagttgcattccgttcacaaatgatgagtatgtggttcctggccgattctgcaggccaagccgtcaatgcgcaaattgttaagttctacacgccaggtacggaaattcaatacttcctgatcgttggtggtgtagcaatcgtcttcgggatcgttctttgcttctttgttaagcgaattcacggcttgatggaaggcgttgactaataaaatcaattaacgttcgcgatttatttcgcgggcgttttttaattcatctgggattatgttatccttactttcaaggggggttaagaatgattaagctggcagtcagcagcgataatcacctggatgtcaaccgaatcatgtcaacgcgagccttgcacattcaagcaagctggctgttaaggcatgatatcgactactatctatatgccggtgatctttacaataattttggacgaacgcggcgctattttgctgctttacagcgcttggttggcgaacgggttcagatctattatatcctgggaaatcatgatatgctgtcgcatgcgtcataccaagacgttgagcacctggcggatccaatgtacctgcacaatcaatatgttgatctgccggggacggactggcgcttaatcggtaataacggctggtatgactattcattttctgactacgctcagcagccgcagcaagtagcccaatggaaaaaggtctactggattgatgccgccatcaaacagcccatgtctgacccgcaaagaatgggactggtgctgaatcaggttgaacagcagctgacaatggctcaagcggcgggcaaaaaagtgatttttttaactcacttcgcaccaagaaaggctttgctgagtcccaaaccgtcatttgtccaaagtcaaagacagttgaaaacctaccagatgatcaatgcaatgatgggcagcgagcgcttaggcagactgctggaaaaggctccgcacgtaaaatacgtcttttatggtcatctgcatggtattcatgatccactaaaagcagcccatctggtttatcttaatcaggctgttggtgtcaagaaagccaagcggactgagtggcagtatgataagtttgcggagcaatgggagcatcgtttgaagataattgagttaaataattaaaaaagggcttgcttttattggctaaattagttatcatatttattgttgattgttactgattgttttcaataacagttaagctcttatggaggagtagcgaagtggctaaacgcgacggtctgtaaaaccgttccttcgggttcggcggttcgaatccaccctcctccattattattgggctatagccaagtggtaaggcaacggtttttggtaccgtcatgcgctggttcgaacccagctagcccaactgatgaagcatcgcgctggcggtgctttttttgtacgcttttttagtttttgaaaagaggattaagatgccaaaacaaggacagtttgccaaatcagttcgccaaaaaaagctgaatgattttaaggttaagcgtcatgatcaaggagccgtgattgatgaaacgcagctgacggattttttaacgatccgttttgccttgacgattaaaaagaagctgccaagcgttcagcgcgagtcggcacaacgactgctgcaagagattgcaccgcgtttgcggaatcaagatggtcggttggctgatttgatggctgaattgatcgtcgagcttaatgccaagacgccatggcagtttttctggcaaatcagcgatttttggccagtgctgcagaaatttctgcaaaaagaggtcccagccgttccgctcagtcagcgtatcttgatcaggcaggtgctgagtcagactgagttggaacgcatgttaggacaggcgctgactcaaaaaacagcggctgcaatgctgctgggacagggccaggctgaggcagctaagattaatcagctgagtgggctgctgatggccgatttgtaccaggaaacgcatctgaactggcaaaaggttcgccaattgctggcgccgtttgctttttcgattgatgaagaactcgatgaaacaaccagacagtggctgcgagatttgacagcattgtgaaaataaaaacgtgcattctggcttaatttgatttataataacaacactaattttaagtaagttaatagagggctgtggcggagctgattgccatagccctttttgcgtgctttttaagttttaggagggattttttttgcacggcaggcatccatactgggccattttttcagcggccttaatgacttttattggtgttttaaacgagacctcgatgaacgttgcctatccggtcttagccaaggaatttggcgtctcacttgatgtcgttcagtggattaccggcggctatctgctgatggtgacgatcgtaatgggaactacggcttattgcttaaggcagtgggcagcgcgctggctgcatctggcggcagtttcggcatttgtgattggtgatctgatctgcgcgttggccgtcaattttccaatgcttttagcagggcgattgattcaggcaattgcaacgggcttttcaacacccatgatgttctttttgatttttactcagatcccgcgtgagcgcttaggtgtaatgaatggcgtagcgggaatggtgatttcgttggcgccggctttgggcccgacatatggcggcgccgtgctggcagctggatcttggcgcgttattttctggctgattctgccgctggcactgttaagtctgattgctggtcaattgacgattcgcaaccagccgtttggcaattcacagccgttcagctttgggctctgtttttgctggccggcagtctgttcagcctcgtcaccggtattgctaggtttggcaaatcaggctggacgagttcatgctggctgctcttattgctgggcttgattctatttggcggttttgtttggctaaatcagcacggtaaaacacggttgtttgatctgggcgtctttgcgcaatcgtccgtgcgactttcggaatggacttatttcagtctgcagttcatcaacatcggtgcatcattggccctgccgatctattgcgagtatgttttgcatgcctcatcactgactgctggaatggttctattgccaggatcgcttttaggggcggtgatggcaccgttgtccggttttttggcagatcgttatggctatggcctgccgactcgtctgggcagcattttgatcgttttaggaacgattggactgctgatcttccagtctcagctcacgccactatccgtaatggtacttttcatcgtaatgcggctgggctttaatgcggccttttccaatacgattgccaatgcctcgaccttggtggtaaaggaaaaatcaaccgacgttaattcaatctttaatatgacgcagcagtttgctggttcattaggcgttggcatcatgactgccctgattgcgctcagtcaaaaccaagggcaaggatcaatggcgctgagaacgtttaaaggcagccgcctggatttttggctgctggtgatcttggcattcagcgtcttggtcgcggtctggcttaatttttcccgccagcagcaattgaagaacgcggccactaaatgatgcgtcaataaaatagtcaagccgttcgcttgatgatcatcaaaatgatataattttattcgatacttaaatcggcaaaagcttgccagaaagaagaaaaattaccatgattgcgcagatacagcattttttggttgaccagcagatttttacattgtttatctgtctggcgctcggttatgtcctgggaaatatcaaactgtttgggaccaattttacgcttggctcaaccgtgggcacgctggcggtagcattggtggtcggtcaggctgggagctttccgcgtgataagatgctgggaacgatcttttttggcgctttcatgttttccatcggttaccggatcggtccatcttttttggtcagtatgaagctgtttggtggacggatgattgccgtgagtctgttttggctgttggccgcttttctaacctcgtggggctgttttgtcctgtttcatctgggaccaggcgtggctgccggaacgattgccggttcattgacgcagtcggctacggttgccagttcgctgcaggccttggagaatctgccgatcaccaagacgctgcggctgtcctatgaagctcagctgccggttgcctatgcgctgacctatgtctttggcacgctgggcgtaattatcttgctgcgcgatgttgcaccgcgtctgctaaaaatcgatgttcccaagcagggagatcggatggccagaaaataccactttcacgcgcccgctcctgatccgacctggcgtcgaacctaccgtctggctgctgagtcgccactggttggcaaaaagattcgtgagattaataagttctttgatttacgcttgattgcgctggcggcctttcatcaggatcgcatgaccgacaagctggaatatgttctgcaggcaggtgatcgcctgactttgattggctatgcgctgcattttgatgatttaacgggaattaccgggttgacagaggttttaacgccaaccaatgccccgcgcgaacgaaaatttgtccttggcaaaaactttgatcccagcactttggccaggattcggcaaaatggggtctttgtaaacattcatgatccattgagtggtcaagagcatctgatcaatcagctaaaaccgggcgatgtaatctcattgactggtaataccagcaaatcagcaccattgctaaaacagattggacgttggcataccagtgaacaggccatcaactatacggtgttctctttgggaattgctggggcctcgcttttgggtctggttggtatcaaggtcaatggcatgccgctgcagcttggcaacggcacggcagctttgatcatggggcttttgctcagcagctggattgatcggcatcatgaatgtcgctcgattccggcaacggtaacttctttttggcagagctttggcttgactgtttttgtcggcagcgttggtctggagtcggctcaagcttttactggtgcgattaagtcactggggtttgggattctgctgattggtgctttggtctcagtggccccacatctgttgaccttgctgtttggcaggtttgtactgcgcgttgagcccttggccttattaggagcgctgtgtggttcgggaaccgtggcagccgcaatgaatgatctggctgagcaagcgggtctggaaggtggggcttaccttgcttctgcatttacgccggcatttgttgttggtaatataggtattacgttattgggacctttgtttgtggcaattttgtcatgatggtcattatcagaaaggttgatttttatgaaacagttctttaccgttttaggcggcatgggtacgctggcaaccgaaagctattgtcgactgctggatgagcgtacgccaacgcaccgcgaccaggattatcttgattacatcgttttgaatcatgcaacggttcccgatcgaacggaatggattttggatcaccaaaagcctgactataatccgcttttaattgaagatatccaacagattacgcctctaaaaccagaattttttgtcttgatctgcaatacggctcactatgctttcgaccgcttgcaggcagcaacttcaattccgattctaaacatgctgcaggaaacggttaatgagatcaaaaacatcgcaccacatgccaagcgagttggggtattggccacgcggggcacgattgcgtctggtctgtacgattcttacattcaaaatgccggctatgaagaggtcaagcccacgccagcaattttggacgctacagaagatctgatctaccatgacattaaagaagctggtcattcagatggcaagaagttccatgaattggtccggacaatgattgaggatcaaaagtgcgatgtagtaatcttaggatgtaccgagctttcctatgccaacgaaatgaatccagaaacggaatttcccgttgccgattcacagtcgatcattgtcaatcgttcgttggcgcgagctttggcaattcgcaacggtaatcaataagctaaaacgacagtccatgcaaagtgactgtcgttttattttcgttccaagatttaatgctaaattggtctaggctaacttatattcgtgttaaaataaaaaagacaaaccgtgaatgaatggtctgaagaggggaaataagatatgggatcaccggtatatattcaaattcataatcaattacgtgaaaatattgaaaatggtcattggaaggttggacaaaaaatcccagctgaacgtgaattggcagctgaatttggcgtcagtcgcatgacgctgcgccaggctattcaaacgctggttgatgaaggggtcttggaacggcgggttggttcaggaacctttgtcgccagccggaaggtccaagataagatggctggggtaaccagctttactgaattgatgattgctgctgggaaaaaaccttccagtaagacgatttcctatcatttaacaacaccttcgcaaagtgaaatcgaacggcttaaattagaaccagatgagcgcgttttgcgaatggagcgcattcgttatggcaatgagattccaatctgttatgaggttgcgaccgttccggcaaaactggtggaaaacttcagcaaaaccgagatcacctcatcgttttaccgcaccttggaaaaaaaggccaacctttatcctggtcatgctgtgcaatgggtttcggcaatcagcgctactgaaaagattgctgagtatctgcggattcggcgtggtgacgcgctgctgcatttgattcagctttcctatctgcaggatggccggccttttgaatatgtccatactcaatatgtcggcagtcgctttgaattcgtgttggaaaaataaaaggagtttatatgaagtttgattatccagatgacagtatcgctctgcataccgatgcctaccagctgacgatgatgcagacctattggcaaaaaggcattgccaatcgtcacgtggtttttgaggcctttttccgtaagatgccgtttggaaatggctacgcagtttttgccggtttgagccatatcattcgctatctgaacgctctgcatttttcagattctgatattgaatacctcaagtcgacgcagcagtttgatcccgaatttattgagtatctgcgcggctttagatttaagggaacgctgcgcagtgcggttgaaggtgatctggtatatagtcatgaaccgatcattcaagttgagggcacgcttttggaatgccagctggtagaaacggcacttctcaatattattaattatcaaatcatgattgccaccaaggcttcccgaatcaagtcaatcgttggcgatcagccagtgatggagtttggctcgcggcgggcgcaggaatttgacgcggcaatctggggcacgcgggctgcttatattggcggattcgatgctaccagcaatctaagggccggcaaactgttcggcatcccggtatctggtacgcatgctcacgcgcttgtgcaggcataccgcaatgattatgatgcttttaaggcctacgcgcagacccatcatgactgtgttttcttggttgatacctttgatacgcttaaaagcggggttcctaatgcaatcaaagtcgctgatgagtttggagatgccatcaatttccagggtgtccgaattgattctggcgatatggcctacctctctaaaaaagtacggcagatgctggatgaagccggctatcccaacgccaagatctttgcttccaataatctggatgaacgaacgattatggacctgcagcggcagggtgccaagatcgacgtttggggaatcggcaccaagctgattaccagttatgatcagccgacgctgggagcggtctataagatggtttccttagaagatgatcatggtcagatggttgatacgatcaaactttccaataatgccgccaagatgtcgacccctggcaagcatcaggtttggcgaatcaccgatcgaggcagcgaaaaaagcgagggcgattatgtaacgctggctgatgaagatccgcgtcagctggactcgctttatatgttcgaccccaactatccgttcctgaataaaacggttgaggacttcattgctcggccgcttttaaaggatattttcgtcgatggtcagcaagtctaccaagagccaagcatgaacgagattcggcaggctcgccagcggcatctggatcgtctgtgggaagaatataagcgaaacctcaatccagaagtatatccggttgacttatcgcaaaagtgctatgacaataagatgaaaatcatcaaagacgttaaggaatacattaagcatttgaactaggatctagactaaagagggaaagaatatgcgcaagctgcaagaagaaatcattaataccttggccgtaacgccatcaattgatccagcaatcgaggtcaagcgacgcgttgaatttttaaaggactatctgaagaagaccggattaaaaacactggtgctgggcatctccggtggtcaggactcaagcttggcgggacggctttcacagttggcagttgaaagcctgcgagcagaaactgcagacgatgcctatcgttttattgccgtccggctgccttatggcgaacaggccgatgaagctgatgcaatgctttcgatcaatgaatttatcaagcctgatcagaccatgcgagtcaacatcaagccagccgttgatgcaatggttgccgcggttgaacaaaatgggctgcagatcagcgactttaacaaaggcaacgtcaaggctcgagagcgaatgattgcccagtatgcaattgccggtgagttccgcggggcagtcgttggtaccgatcatgccgctgaagcagttactggcttttacacaaaatttggtgatggcggggctgacatcacgccactgtcacagctggataagcgccagggacgccagcttttggaatatctaaaggcgccaagagtactttatgaaaagacgccgactgctgacctggaagaagatcggccagccctgcctgatgaaaaggcattaggcgttacttatcaagcaattgatgactatctagaaggcaagccggtttccgatcaagcagccgccaaaattgagggctggtatcttaaaaccaagcacaagcgtcacctgccagttagtccgttggatacctggtggaaagactagccttaatatagggcccaggctcggccattgccgaacgctgggccctataatggttaatcgactaacgcagcaaaaagattaaaaaagaaatgagttatggatcgctatggaaaaaaatgatcttaaattaatgagccagcagctgccagaattaagagatcggcagattgaagccgccttgagccttttggaagagggcaatacgattccattcattgctcgttatcgaaaagaggcaaccggcagcctggatgaagttcagctgcagggaattcaagaacagtggcatcgggtaaagaatctgcgcgatcgtcaacagaccgtgatcaaagcaatcgaggaacaaggcaagctgacgccggctttaagaatgcagattgaaacggctaccgaactgaacgttgttgaagacctgtacctgccttataagaaaaaacgccgcaccaaggcacagattgcccgtgaacagggcctgcagccgcttgccaactggatctttatggctaaaggaaatgatctggacggcaaggctgctgaatttatcagtcaagacgttcctgacgttcagacagccttggagggggccaatgagattctggccgaaacgatcagtgaaagcagtacgattcgcgcttggctgcgcaactatactaagcagcatggcgaactgatcgcgacggttaaaaaaggcggtcaggaacttgattcagagggcgtctatcagcaatattatgatttttcggcccctttatccgcaatgaattcctaccgtgtcttagccattaatcgtggggaaaaagctaagatcttaagcgtcaagattcttgccgatgagcagatcgtccaaaattatctgaatttccggctggttaaaaaaagcagtgctcaaaacgctgctgagtttatcaaaaacgcggcttccgaagcctacaagcgtttcttgggaccagcaatcgagcgggaattgcggcgcgaactgactgaccaggccaatgagcaggcaatcaaggtttttggtgaaaatctttatcatttgctgatgcaggcgccaatcaagggcaaggtggttttgggatttgacccggcatatcggacgggctgcaagctggcagttctggatccaaatggcaagctgctcaaagtggccgttatctacccacacaagccggcaccagaaaatcagcgtcaacaggcggaagggcagctgctgcagctgattgaggactaccaggttgagatgattgcaatcggtaatgggacggccagtcgtgagtcagaacgctttgtggctcagacaatcaaaaaaatcaagcgtcccgtttattatgtaattgttaatgaatctggcgcgtcagtctattcagccagtcaggacgcgcgtgacgagtttccagagctgacggtggaaaagcgcagtgccatcagtattggccggcgtctccaagatccattggccgagctggtaaagatcagtccggaagccattggcgttggtcagtatcagcatgatctgcctaaaacggcactgaaagttgaactggatgccgtcgttgagcgagccgtcaatcgagtcggcgttaatcttaatacggccagctatcagctgctggcacacattgctgggttaaacgccacgctggcaaaaaatatcgtgcggtatcgcaatgaaaatggccgttttaccagccggatgcagctaaaatcggttccccgcctaggacctaaagccttccagcaggcagtgggctttttacgaatcgtggatggcgatgaaccattggataacactgatattcatccagaaagctatgcaattgctcgtcagttgctgcaggcagccggcataaccagtgaacttggctcaccaacggctgcccagcagctgcggcagttggatattaaacagttcgtcagtgaaaaagtcggcttggcaactaaagatatcattgcctcgctttgcgaaccaggacgagacctgcgtgactcattgccagcaccgcttttgcgacaagacgttttgacgattgaggatctaaagccgggaatgcagctgcaggggacggttcgcaacgttgtggatttcggtgcctttgttgatgttggcatcaagcatgatgggctggttcacgtctcgcatctgaccaagaagttcattcaggatccgcgtcaagtcgtagcagttggcgatatcgttgacgtctgggtgctgagcgtagacttaaagcgccagcgcgtacagctgacgatggttcagccaaatgagtgaccagatgactgacgaagagctgcagagactgacccagatctggtcgctgcaggcatttcagcgaccgtttaagcaccgggtctggtttaatcgccgcttaaagacgactggcggccgctatcatttaaaagaccatcatatcgatatcaatcccttgatgtatgaagagtttgacctggccaatctgcgcggcgtcgtattgcatgagctctgtcactatcatctgcatctggctggtcatgactgtcatcatacttctgaattcaagacgcttttaaaacgagtcggcggtctgcgctatgctccagcagttaggcaagccgagaagcaatttaaatggatctatcaatgcagtggctgcggcattcggattggtcgcatgcggcgctttgacgtgcagcggtttgtctgtcggcgctgcggcagtcattttgaacttttaaccaaaaaatagtttgccaacaagtagcatttctggtaaaatgttatttgttgatgcggcagtggcggaattggcagacgcgcaagattaaggatcttgtggtcgttttagaccgtggaggttcgagtcctctttgccgcactcttattgcacttggcgttagtcaggtgcttttttattgcttttaagttcgctcttgaaaaacaggagcggactttttttgagcagatttttaattatgcctgcagtggcttttcaattaatttagtaaattttttagtgaaataatactgttttatcgttcatgaaagcgctatactaaatagacagagaataatttgatttgaggaggcgctttttaatgcaagcagatttaaaatggctggatgatccgcagacgttccgggtcaatcagctgccagcccacagtgatcatcaatggtatcttgattatgccgaggctggtcagcaaagcagcagctttactcagagtttggatggtcagtggcgctttgcctttgccaaggatccgcaaaaccgcattaaggaattttatgcaccggactatgatgtcagtcaatgggatctgatcaaggttcccagcatgatcgaattaaacggctatgctcaaaaccaatacaccaacatctggtatccatgggccggtaagatctatcggcgcccagcctatgccttgagccctgatgatctgcaggccggctcattcagtcagggaactgataacaccaatggctcatacgtcaagcactttgatctaaacgaatcactgcgcggaaaaaaagttcgtgttcggtttgagggggttgagcgcgcgatgtatgtctggctgaacggtcatttcattggctatgctgaagacagctttacgcccagcgagtttgacctgacgccttatttaaaggacacggacaatattttggcagttcgcgtatataagcacagcacggcttcttatctggaagaccaagatatgttccgcttttcagggatctttagaagcgtcaagctgttgggtcagcctaagctgcatttggaagacttggatcttaagccgcgcgtaactgatgactttaaaaccggaatctttaacgtggatctaaagctgcagggacaagatggtcaggttttgattaaagtctttgatgcacagggcaatctgatcgttgatgaaagcaaagcggctgctgaacgggttggtgtacatgacattaaagttaaggatgctcatctctgggataatcatcatccttatctctaccaattgtttgtcgagctgcgcgatcaaggcggtcagcttttagaggtcgttccttatcgattcggcttccgacgcgtagaaatcaatgctgatcacgtggttctgctcaacggtcagcgcttgatcatcaacggcgtcaaccgtcatgaatggaactgccggacgggacgctgcgtaacgatggccgacatggaacaggacatggccacgtttaaagaaaacaacatcaatgccgtgcgaacctgccattattcagaccagattccttggtactacatgtgtgatcaagaagggatctacatgatggccgaaaataatctggaaacccacgcaacctggcagaaaatgggccaagatgagccgtcatttaacgtaccaggctccatcccgcaatggagagaagttgtagttgatcgggcccggaccaactatgaaacgtttaagaaccatactgcgattttattctggtcgttgggcaacgaatcatatgccggcgataatctggtagcaatgcaagaattctacaaagatcatgacgacagccgcctggttcactatgaaggcgtcgtgcacacgccagcctatcgcgatcggatttctgattttgaaagctggatgtatctgccgccaaagaaggttgaggaatatctgcagaataatcccgacaagccgtttattgaatgcgaatacatgcacgacatgggaaattcagatggcggcatggggtcatacattgaattgatcgacaagtatccgcaatacgttggtggatttatctgggactttatcgatcaggcgctgctggttcacgatgagatcagtggtcaagatgtaatgcgctatggtggcgattttgatgaccgccacagtgacaatgagttttccggtgatggactgatgtttgccgaccggacgccaaagccagcaatgcaggaggtaagatactactatggactgcacaaataagattcacgtcgtttatgatgatggcctgttgggactgaacggtcagaactaccaatatctgttcagctacgaaaagggcggtttggagtcaatgcgttttaacggtaaggaatggctgtaccggccgctttatccaacctattggcgagcaacgaccgataatgaccgcggtaacggctttaattttaagagtgcccaatggctgggagcagacttggcgcctaagtgcatcaatattgatctgaccgttgatgaccgtcactttgatcagctgccgattgcgccgttgaccaatcagttcagcaatcatgaatttgctgatcaggttaagattgagtttacttacgagacagcaaccaatccagcagcgcaggtcaaggtagcctatgcgattgatgctagcggtaaatgtcgtattgcagcccattactttggtcaggctgggctgccagaactacccgtctttggtgtgcggctgattatgccgactttggcaactgaatttgaatacgatggcttgtctggtgaaacctatcccgatcgaatggcggggggagtcaaagaaacctggcatgttgatggagttccggtaacgccttacttaacgccgcaggaaatggggatgcacatgcaaagctcacggctgaaaattgtccgcaatcaaacccaaaataacgccgaccatgacgagcggccgtttgcgctgactgtcaagcagaccgagcagccattcaactttagtctgctgccatataccgcttcagagttggaaaacgcaacacacattgaagaactgccgctcaaacgtcgcaccgttttggtagtagcgggagccgtacgcggtgttggcgggattgacagctggggtgccgacgttgaggaccagtatcacctgccagcagatcaagactatcaattcagttttgcaattgaaccaacaattgaatagtttgaaaaatgggaatttgattaaaaaattcccatttttaattttttaaagcagccagcgggtgtaaaattaattatgttaatttgcattagagagaggctgaagatatgttaagcatattctggtcaagtctgtcgggagtcttgatcattttaatcatgattgcagctgggtttgttatgaatgagcgccattggtttacgcccggttcacctaaggttatttcaaagatcgttacccaggttgctttaccaacgtatatgatcagtacgattacaaccaaatttacagcggctgagctaaagacgcttttgccggatctgcgctacccggttttatcgatgctgatcctgtttgcattgtcgtttgccgtcgctagagcattggccatcaaaaagagccacattggtctgttcagttcgatgttttttaattccaatacggtttttattgggctgccgatcaacctggctttgtttggcgcgcgttcggttccatacgtgctggtctattatatggccaatacgactttcttttggacgctgggtgtttggctgattcagcatgacggtatgaaggaagccaagattgatttcaagcaggcgctgggcaagctgttctcgccaccgctccttggctttatgctggcggtggttctggtagctttgcatatccgactgcctaagttcatcatcagtacctgtgcttatctgggtaatttaacgattccaatgtcaatgctgtttatcggcatcgtgctgtccaatgccgggctgtcaagaattcgttttacgcgcgatgcctgggggattttgctgggccggttcttattggcaccactgctgatgacgattttggtgttgccgagcaacatgccgctgatgatgaagcaggtctttattctgcaggcagcaatgccggtcatgaccaatgcgccggtcgtttcgcgaatgtatcatgctgactacaactatgctgcaattatggtaactgagaccaccacgctttcaattattgtaattccaattttaatggtggcaattaaaaccttggtccactaattaatggttaaagttgccgaatctccaataaataagaaatgagcggtcagcctgtcgtcgaatccagacgagctggccgtttgacgtttatctttaagaaaaagttttattgatctgattagtcgtttcgatcggtgatttgcgttatagttaaagcagcagcataagggggaagtttattgatgacggcaacactggtaatcgttaggcatggtcagagtcaggccaataaggataacgtttttacgggatggagcgatgcaccgctcaccaaattgggaattcagcaaggcaaacaggttggtgatcaattggcaaaattaggcctgcagtttgatgacgtccatgtttcctacatgcagcgggcaattattacggccaacttgattctggaaaaaatcgatcaactctggctgccgatccataagacctggcgactgaatgaacgtcattatggagctttaagcggcttaaacaaggacgcggtcaaaaaagaggtcggcgcggcaactttgcatcagtggcggcgcggctttttaaaacgaccgccaatgcttaagaaacgtacccacgagcgacgctatgaccgtttaggagtaaaggtgccgcttagcgaaagcctcaagatgactcaggagcggttgttgccatattggcaggatcagatcgccccacgacttctggatggcagaaatcagctgatcgttgcgcatggcagttcgctgcgagccttgatcaaatatctggattcgattgctgacgatcagattgatcaagttgaggtgccaaatggcgagccgattttataccggtttgacgatcacttaaacattatcgagaaaaaatttattacggatggtgaacagcatgtcaattaaagaaatctccaacaatcctacactggccggtcaagtcagactgattgaagatatcgtctattcagcagctgatggcgaggcacagaaaatgtcgattctggcaccatggacgcagcgctacaaggatctgccgcaaaccaagcgaccactgctggtttttgttcaaggcagctcttggacgaccccgactttaggtgaaaagattccgcaattagtccagttcgtccatgccggctatatcgtggcaaccgttcagcatcgcagcgccttggatgggcatgcctttcctgcgtttttacaggatgtcaagactgcgattcgctatctgcgagcccatgccgctgaatatcaaattgatcctgatcgggttggtatctggggaacctcatctggggccaatgctgcgcttttaaccgcgctgacgccgaatgatccgcgttatgagacggctgactatgctgatcagtcagatgccgttgatgccgtaatcagctgttttgccccaacggacgtcgctgatacgtttgctttttccaaaaacgtgcctggctcggatgccatgcagttttgtctgtttggtaccgatccaacaaaatggccggccatcaagcgggaaatgagcccattatatcaagtcaaggataatcagcaatatccgccatttctgctgatgcacggggatgccgacaagaccgtgccatatcatgaaatggaagacatgtatcatgagctggaaaagcatcatgtcgccgttgaggcctaccgggtacggggcgccgttcatgagcgcgacttctggagtcagcagatttatgatattgcccgcgagttcttggatcgcaacgttaaatagacaaaaaaactcattgcctgattagacaatgagttttttgattgcagctatcaagtcgttgttaggccaaagttcccattggatcccatggcttgaggacgattggttcttgagcctggtcagccttgagctcatcactgagatattttttgttgacgacaatttgatagacgtattgatccatccattcatcactcatgacaaagtagcctttttcgccgacttttggtccccatgaattctcaaccttccatttggctggcttgccatcaaccagatcaaccccggtcaagaccatggcgtgatccatcattgactggtgatagtccagcatgtcagccttattcatggtcagctttgtatcaaacagatcttcatagccatacgtgttgagcgccagaatccccagcttggtttcggaatacttgacaacgtcagagccaaaccagacactctcgccgttttgcagctgcttgatggccagttcctttaattccgtcattgaaaggtttaagtgcttgacttgacgaccgccaaccacgtttcccaacatctcgatcgtgtaggtcttgtggtaggccttgtctttggttggtgcctgaatgatggagacgtattcgctcagatcccagccaacgtacttatcaaagaatgctaccggtgtcagattgctgtcgcgatggaactgcttgtcttttttagttcgatattcaaaatcaaaggtctgtaccggttcaccaaaagcatatgccagcatgcggtagacggtgttgagcatttctttgcgcgtggcgttgatctgggattcgctggcctgttcatgaaccaattgacgcagaattacggcatcatgacgcaattgattgttcaaaacagcattgatttcgtttgagcggctggaattgtaggtttcgggctgagccgacttaggtacgaccccatacttttcaatcaatgcacacagcatgtcccattgaccgccatcagattggggtgcatccaaaagccaagctaccttgcgatcgtcaatatccagatcggcagtctgaatgatgttttcataaaaccagttggccttttcgaacttgtcccagaagaaggcataggattgtgacaactcgaaatcatccggcagattgaaacggttctgcatgttgtgacgcatcgtgtttaaagcagcaaacagccagcagcgtcccgactgtttttgatcggcgacgtcaccggttgccagatcaattgagaagtgctgatcattgtcggcaatcgcatgccagtcaaagctggcggccttgaccccatttttggcgacggttcgttcaagaatccgagtctcttgacggttggcatagtcttgcttgaaatctttcagttggtcggcattaatgacaaaactcaaaaaaatcactcctttaagataatgacttaattatagtcgaatgtttgattcacgccaaaaaagtaatcaaaaaaggctcgccgggcattctgcgcggctgagcctttttaattagcgggcatgcaggatttctggcccattttgccgaccaacgataacgtcattgactcggtttaagaataagccgtgctcaacaacgccaaccatgtgaatcagttcttcggccatggcttgcgggtcatcgattttgcccaggtgcagatcgatgatgtagtcattttcatcggtacggtagcgctgatcgccatccatccgccaagttggctggtagcccttagcagccagcttgttaaagacatgctgagcaccgaacgggattacttcaactggcagtgggaaggcccccagctggtgaaccatcttgctttcatcaacgatccacatgtaatgctttgagatgtcggcaacgattttttcccaaagcagggcgccaccgccacctttaatgccctggaagtcatcgctgatctcatcggcaccatcaatcgtaaggtcgatgtggtcgacttcatcaatgtctttgatggtgatgccaagactttgtgcctgtttggtcgtgcgattggaggttgtgacgccgatgatgttcaagccttcatttttaacgcgttcgcccaacgcgtcaaccatgtagcgaacagtcgagccagtccccaagccaacgatcatgccgtctttgatatattcaacggcagcccggccaacaagcgattttaattcattttggtccatatagaacgctcctttattgattaaagcgatcctccggcaatagcagatcctggtattccggatgatcacggaatgccgctttaacatatggacacatcagtttaactgtcagatggcgttcatgggcataatcgacgaagcgcttggtaagctcggccgccagtccatggccacgaccttcaggagcgacaaaaacacgctctgcgacgacgcggtcaggatagccggcaactggcggaaagctgatgtcgccgacccatttgccattatcatcgatagcactgatgcgatgcggttccgttacaaattgcatttttgtcccctccatcattaataaatttaatccaacttgattttccatggttctgaaatgattgtcaaggattaacatgctacaattaaatgctggacaagtttaaagataagttacgattaaaaaataaaaactgaacgcatgaattttagaggtgaagaaatgaaaaaaagaggatttgagattgttgccaagtatgctgatgccggcctaaacctgccgcagcggcaaaccaagcaggcagctggctatgactttgaggccgctgctgattttgtggtgccttcaatctggaaacagggcctttttaaagcgctgcatgccatcaaacatgctgccaagccgggagaagaagagctgacggctggcgatcaggcgctcaagccggtgctggtgcctactggaatcaaggcctacatgcagccagatgaggtgctgatgctcttcaatcgttccagtggtcccttaaagcggcgactgattctgcccaatggcgttggaatcattgatgctgactactataacaatccagccaatgaaggcgagattttcgtacagctgctgaactatgggctctttgactaccatgtaaaaaaaggcgagcgaatcgcgcagggcatctttatgccatacttaacggctgatgatgagtcaatgcctaaaaacgatcgggcaggcggctttggctcaactaaaaaataattccagctaaccagcttttatcaagaaaggaaatgcctatggcgaaagtcaagacccagtatatttgtcaaaactgcggctataattcgccgcgttaccttggtcgctgccccaactgcggtcagtggaatactctggttgaagagcgtgtcgagacggtaaatgcgcaaagcacgacgcggcattcgtcgactttgacgggaatcgttgccaaaccgcagcgcgttaaggacatcgatgcgcaaaagctgccgcgcgtcaagactaagctaaatgagctcaatcgggttttaggcggcggcattgtaccaggatcgctgattttgattggcggggatccgggaatcggtaagtcaacgcttttactgcaggtttcgggccagctcagcgatgaagggcattccgtcctgtatgtttcgggcgaagaaagcggtgcgcagatcaaaatgcgtgccgaacggttggcagtagccggcgatgatttctacatctaccctgagaccagtatggacagcattcgggcaacgattgacgatctgaatcctgaatacgtggtgatcgattcggtccagaccatgcaggcaaccgatgtcaacagtgcgattgggagcgtgtcgcagatcagagaggttaccgcgcagctgatgcagattgccaaaagcaagaacattacgatttttgttgttggccacgttactaaaggcggcgcgctggcaggacctaaaatcttggaacacatggttgataccgttttgtactttgaaggcgatctgcatcatacctatcgaatcttgcgggcagttaagaatcgttttggctcgaccaatgaactgggaatttttgaaatgcgcacggcggggctggcagaggtcaaaaatccatctgagatctttttggaagagcgactccaggatgctactggctcagccgtcgtggtttccttggaagggacgcggccaatcctggttgagattcaggccctggttacaccgactgtctttggcaatgctcaacgcacggcgacgggcttgaatcgaaatcgggtctctttgatcatggcagttttagaaaagcgtgccaaccttatgctgcagaatcaggatgcctatcttaaggcagccgggggcgtaaaattggatgaaccggcgattgatctggcgattgccatcgcgattgcctccagctaccgcgacaagggaacgcgtcctgatgatgcctttgtcggtgaagttgggctgaccggtgagattcgtcgtgtcagccgtattgagcagcgcgttgctgaggcagctaagctgggttttaaacgaattttggttcctaaaaacaatctgcagggctggaatccgccagctgatattgaagtggtcggcgttacgactataaatgaggcattacgactcgcattagcgtaaaatagaaattacgacaccataacgatttatcaaaggagggctgcaggtgagaaagagaattattagactgctgttcgtaatcgtgggggcagcagttggtttttactatctaccaccgatttggattgccatgcgcaatcagcttggcgttcagctggcacggccaattgagtcagcaattgattttttgattggagcacttgttttttggctgatttcactgctgctgactgactggacgatcaagatgctgaaacaggcagaaaatgcactgactaaaaagagtctgacctatctgctctttggggcgatttcaacgatctttggcttgatcttggcgattttgatctcaattccgctgtggcgattgagtattcccgttgtcaacaatgtcttgccggtacttttgatgatcctgttcagctatctgggttttcatctgggaaccacgcgtcaggatgaatggcgcaggcttttaacgcggcgtggacgagatgatcaagaagctcaggtaatcaagcgtcaagatgaaaactatcatcactataagattttggataccaacatcctgattgacggccgcatttacgatctggtcaagactggctttttggaaggaacgcttttggtaccgaatttcgtactttatgagctgcagtatatcgcggatgccggcgaaagcatcaagcgcgtacggggacggcgcggcttggatatcttaaacaagctgcgcagcgaaaagatcgttccagttgagatgtataaaggtgattttgaagatatcaaagaagtcgatgaaaagctgattgctctggccaagaaggtcgacggcgtgatcgttaccaacgactacaatctaaacaaggtcattcaattccaaaacgtacaggtgcttaacatcaataacctggccaaatcattgcggccacgcgtgattccaggtgaacagctgacggtcgtagtcgttaagaaagggaccgagcgccaacagggggttgcctatctggatgatggcacgatggtcgtggttgaagatggccgctactacatgaatgagcagctggacgttgaggtaaccagtgcgctgcagactgatgccggccggatgatcttcgcgcgtccagtacattcagcgtcatcgcatggcattgacggcagcgagcgtcaggatcagaaacgattggcagaatcaaccaaaaagactgatcataagaataacgatcgtaataatcgcaaaaactagtatttgcaatttaagcattgcacggtacactagaatagaaatattttcaatttttatgaaagaggcggaacaacttgtcaaaaaacgaaattcgggttcgctatgcgcctagcccgactggacacctgcacattggtaacgcacggacggcactgttcaactacctgttcgcacgtcactaccatggtaaattcatcattcggattgaggatactgatacaaagcgtaacatcgcggatggcgaacgcagtcagctggacaatctgaagtggatgggactggactgggatgaaggtcctgacatcggcggcgactacggtccatatcgtcaatcagaacgcaaggacatttatgaaaagtatgttcaggaattgatggacaaagacctggcctacaagtcctacatgaccgaagatgagctggctgagcaacgggaacggcaaaaagcagctcaccagatgcctcattatgaatatgaatatgctggcatgactgatgaagagatcaagcaggcacaagcagatgctgaagcaaaaggtttaaaaccggttattcgtttccgcgtgccaaaggatcacacgtacgcttgggatgatatcgttaaagggccattgtcatttgactcagcttcagttggcggcgactttgtcatcatgaagcgtgatggcatgccaacctacaactttgccgtcgtcgttgatgatcatctgatgaagatcagccacgtcttccgtggggatgatcacgtttctaacacgccaaagcagatgatgatctacgaagctttaggctgggaagcgccaaagtttggtcacatggcgctgattatcaacaacgaaacgggtaagaaactctccaagcgtgatgaatccgtgctgcagtttatcgaacagtaccgcgacctgggatatctgccagaagctatggataactttattattctgctgggctggtcaccagttggcgaagacgagatcttctcgctcaaagaattcgtcaagatgtatgatgaaacgcgtctgtccaagtcgccggctgcctttgaccgcaagaagctgcgctggatcaataaccaatacatgaagaattccgacgttgatgaagtcttcaatgttgccatgccgcttttgatcaatgccggcttgattgaaaaacatgctgatccatacaagatcgaatggatgcggcggatcgttgaaatcttcaagcgggaaatctcgtatggtgaagagattcttcaatatgctaagccatttgtcgaagaaccacagatcctgactgacgaagctaaagaagaaatgagtgcggaaacggttgctgtagtgctgcgtgatttccgtgacaagattgctgccttggactttatggatgccacatccattctgcgctgcatcaaaggcgtgcagaacgataccaaggttaagggacgtaagctgtggatgccgctgcggattgcaattacgcatgaaacgcatggcccacaactgccggaaagcattgagctgattggtcaaaaagctacgctggctcgactggacgatatgattgaccgggtagaaaacggcaagctttaagattttgatgactgacgaccaacttggcgttagctcaaactaaaaatgggatccgatattcggcttgaccgaatcaggatcccattttatttgactcgaatgtttagataattcaagatgatgcgaggtcaaaaggaggaagacatgcgaatcactcccgcacaaaatgatgcgctgcagatgctggcagccttggcgaccttgatctttatgagctggtctttaaaatactggccggctttttatcatttggatcaaagactgcatgatcaggtacctaatcggcaaaacagtttcttttggcgcggcgtggcttggattggtcagcctaagctcacggtcggctatgcgtttgtcttagccggtgttttatggctgactgctgattcaatcacggcgttttgggtgttggcaacgctgggcagcctggacgcgctggggattggcgttaaattgtattttaagcgcaagcggcctgaccagcatctgccaggtgacgatggctatagctttcccagtggacatgttttgggaaccacagttttggtactgatgatctgggcactttggccgacgccatggacaggaagcttaggcctgggctggctaatgttggttgcggcatccagattggtcttaagagctcactacccaagcgatgtcttcagtacgatggtgatggctgccggctgggtggcgctgttaagaagattgtatgcaccattggctgagctggtgaccaggctgttttagcattaggcaaaagaaaaagcagcggccgggggagccgctgcttgaggagtattacgaagatcttgggggagatttcgtaaaaatgtgtatttttcggttactattgggaggagtaattgaaaaataataggtttcggttaaattgattgcagccaagctatctcgtttgactacatccgtaatattagcacccttttatgaaaaaagtatgaataaagacttaacaatttatttttaatgcgccaaccaggaatcggaatgaattgtggtaaaatactgttattgcaattacttttaaaggaggattacggcgttatgttgactatttataatacgtttacccgtaaaaaagaagaatttaagcctttgcaccctggagttgttaacatgtacgtctgtggtcccacggtctacaactacatccatatcggcaacgcgcgcagtgccattgcttttgataccgtacgccgctatttggagttcaaaggctatcaggtcaattacgtctccaactttaccgatgttgacgacaaaatgatcaaggcagctgctgaacaggggattacggttcctcagctggccgacaagtttatcaaggcctttatggaagatacggccgccttaaatatagaaccagctaccaagcgaccacgcgcgacagaaagtattcctgaaatcattgactttatcaaggtcctgattgaaaaagactatgcttatgtcaaagatggcaacgtttattatcggacgcgcaagtttaagcattatggcgagctttccggacagtcgatcgatgatttggaaaccggcgccagtgagcatattacagctgaagagattcagcaaaaagaggatcctttagattttgcgctttggaaagctgccaaaccaggtgagatcaactgggattcgccatgggggcaaggccggcctggctggcacattgaatgctcggttatgtcaacgcgctacctaggcaaaacgattgatattcatgcgggtggtcaggatctgcagtttccacaccatgaaaatgagattgcgcaaagcgaggcagagactggtcagcagttcgtccgctattggatgcacaatggctttgtcacgattggcaaggacaatgaaaaaatgagcaagtcactgcataacttcattacggtgcatgacatcatcaagcatgttgatccgcaggtgctgcgcttctttatggcaaccactcagtatcggcggccgattcaatatagcgaggccaatctgcaggatgcacaaaacaatctggaacatatccgcaacacttatgacaacctgacctatcgccagcgtgatgctcagaatggcaatgacgatgaagttgctcagcgagtagcggcatttacgcagcagttcattacggcaatggatgatgacattaacgtccaaaatggaattgccacggtctatgagctggtcaaatatgccaacgtctatgctcaaaagccggtcgttaaggctgaggcactcaagacgataaaacaggagctggaaacgctgctggggatttttggcgtacgtttggaaacatctaattgtgaaattgatgatcaagccatcaaagatctgatcagcaagcgtaatcaggcacgggctgctaagaactttgccttaagcgatcagattcgcgatgagttaaaggcgcaggggattattctggaagataccccgcaaggaacgcgctacagaaaggaataaaatggaaaaagccgactatcagcaactaaatggcattgccctggcttatctgggtgatgccgtctatgaggtatttattcgtcaacatctattggcactgggaatgagcaagcccaatcgtctgcagcatcaagccactcactatgtctcggccaaggcgcaggctgctttgattgagctgatgaaagccgatgatctcttgactgaggatgaatggagctattttaagcgtggccgcaatgccaacagctatactcatgccaaacacacctcggttctgacgtatcgcatgtcaactggatttgaagccttgtttggctatctgcagctgtcaggacagtttgagcgaatcaatgaattggcgcaatggtgcattaagcaagtagaaacaggaagaacaaaacatgaaaactgatgaaccagaatttattattggccgtcacccagcagtaatggccttgaaatctgatcaggaaatcaacaaggtctttattcaaaaagatttgaaagccgatattattggtcagatcgtcaaattggccaaggagcggcatttggtgatttcaaacgtccccaagaacaagttggatcaaatgaccaatcaccaaaatcaccagggggttgcgttggcaatagcggcttaccggtatgcaacgattgacgatctgtttgccaacgctgaaaaacatgacgaggcaccgtttttcttgattttagatgaactggcagatccgcataatctgggttcaatccttagaacggctgatgcagcgggagttcatggcctgatcattcctaagcggcgttctgttggtctgacctcagtcgttgccaaaacgtcaaccggagcaattgagcatgttcccgtggcgagagtaaccaatctggtacagacggccaatgagttaaaagaacgcgggctgtggctgtttggcacggatatgcagggaaccgattaccgtcgctgggatgctaagggtccagttgccttggtaattggcaatgaaggaaaagggatttcgtcgctgctgaaaaaaacatgtgatgaaatgctgacgattccgatgattggccatgttcagagtctgaatgccagtgtcgcggccagtcttttgatttaccaaggctttaattcgcgtcatccgctttaaaatcatgccgcagtgttggctgacactgcggttttatttttattgaaaaattgaggtgattattttatgaaacgacgcagactggtagtaatttctctcgattcaatggggtttcgcgatctaaacgagctgcgcgagctgacaccgaatctggcacgcttgattgaacaggggacctgggttaaaaaagttcgtggcatctttccgaccttgacctatccatcgcacacatcgatcattactggccaatatccggcagttcatggaatcgtcaacaataccaagctgcagccgaccaggcagtcgccagattggtactggtatcagcgaaaagaaatcaaggctgcaacgctttatgacgttgctcattctgcgggactgaagacagcagcctttttatggccagtaactgctggcagccgcatcgactggaacgtagctgagatttttcccaatcgaatctggaccaatcaggtactggtctcattaaaagccagttcaccatggtttttgtatcagatgaatcataaattcggtcatttgcgcaaagggatcaagcagccctggctggatgattttgtgacggcaatggcatcctggacgttaaaacacaaaaagccggatctaaccttgattcatctggtcgacatggacagtatgcggcatcgctatggcgtaagatcagatcaagccaaacaggcactgcagcgcttggatcaaagagtcggtcagctgatttgggcaactaaggatgctggaacgtttgaacaaaccaattttgtctgtcttggcgatcattatcagattgacgtcaaccagatgattcatcttaatacgctgtttgctaaaaaaggatggctgactccgattaagaaccagcaaacctttaaaaacaattggcgggtaatggccaaaacctgcgatggcgaaacctacgtctatgtgcggtcagaaatcgatcgtgatgaggtcagacgagaaattgccggggttaagggaattgagaagatctatgacggtgctcaggcagttaaactgggggctgatccgcgctgtacttttttggttgaggccaaagccggttggtattttactgatgaggcccagcgcccggcagtcgttgaatcggtcttgccgtcaatgatgggcacaagcgatcgctaccgtggcgtacatggctatggggctgataagccagactattttacgaccgctgttttttatggaccggatatcaaaaaaagagcccaggttgagcatgctgagttggtagatgaagggccgacttttgctgagctgcttggcttaagctatcccagaccaactgccggcaagccgatcaaaggaatctttaaggaagtgaaacatgaaatttaacaaacagcagtggcaatgggtcttttatgactgggcaaattcgggctatggcattttggtcgtaaccgcagtcctgccggtatattttaaggcagctgctcaccagaacgggatctcagccgcgctctcaacggcattatggggatatgccaacagcgcggggactttggtcgtttcgcttttagccccttttttaggagcaatggctgattatccttatgccaaacgacgctggctgaactggtttgctggcttgggtattattatgacgatgattctgggtgttttatcgccaaatgcctggcaatggttgctgatcatctatgttttgtcagcaatcggctattcaggcggcaaccttttttatgacagctttttaaccgatgtggccgactatcgccaaatcgatgctctgtcagcaactgggtacggtatggggtatctaggcggggttatggctttttttatctttttgacagttgagctgggtcatggttttggctggctgaacgattatggaattgcgcgcttcagctttatcttggctggcctttggtggatcatttttggcttgccgtttctaaaaaatgctcatcagcgctatagcgtgccaaaagaacaaaaaccgattgtcgccagttttgcccgcgtgataaaaactatgcggcacattcggcaatatcgagccacattttggtttttggttgcgtatttcttttatattgacggcgtcgacacgatttttacgatggctacttcgattggatccgatatggggattgatactaccatgctgatggtcgttttattagtcgtgcagctgattgcctttccgttctcaatctggtatggctggctggccaatcgcacttcaacacgacgggctctactgctggggatctgcgtctacttgtttatctgtctgcaggccctgcatttaaagacgctgcgtgatttttggctgctggccgttttggtcggtactagtcagggcggggttcaagcgttgagtcgttcttattttggcaagttgattcctaaagaaaacagcagcgagttttttggcttttacaatattttggggaagttttcagcaattattggtccggttttggttggaatcgttacgcagttgacgggtgagtcaaccaagggagctgcctcattagccgtcttatttgcagttggtcttttgatctttttgaaactgcctgcaccttcagattagtttaactttctatttataagtaaaaacggcataaatgtaaatatatgaaagtatatttatgtcttgtaaccgttttacttatcatgtatattaaaaataacaagcaggggtgcagaccttaggcggaaatcgccggagcaatgcatcaggtaaagatgcactgcttttctatcagtttactgatcagtcaaggcaacccgaatccatttgctaacgagaggaagaaaatgacgaaaacgagaattggtgacgctgattttctagcgtcagccgctgaaaaagcaattttacgcgaagcaaaaagtggcaatccactggcaattcaaaaactgttcgttagttatcaaagacttttttgctatgcatggcaaaaatatcatccagctgatctgtctttacatgattggctttcaaatatgtatcagctgctttaccaggtcgttttgcattatgatgatcaacagaatgcatcgtttggccactatctctatcgttctttggaaaactttgccaagggtcagtatcgtaagtgtcgtgcccaaaagagaataccggcagattgtctggtgagcctgagtgatcagctgccaatcgccagtcaagagtcaatggaagaacgaatctattgtcgtttgatttttgaaaactttttagattatgatctttcaaattttgaacgtgaggttttagtagccagtttgtttatggacatgccggcgttgtgcaaaaaattcggctgccatcagcgtacgatccaatctgctttatcacggtgtcgaaagaaattgattttggctttgcaggcttaagtgagttgcttttatacctgggtccatgataggctagacaggtaaaattggaggcatcagatgactcagaaaaaagcggcactggaatgtaccaaatgcggtgcgcgcaactacacgataacggtcaagcctgatcgcgaatcgcgtctggaactaagcaagttctgcaagcactgtggtgaatatactttgcatcgagaaacaaaataagggacgatttcaatgaaacttacaaaattcgtaaaggacgtcaatgctgaaatgcataaggtagtctggccaactgctaaagaaacgcggcgggacacgactacggtagtttcgctgacgattttctttattatcttttttgcgattattgactggctgctgcaccagttcatgctgctgattgttggctaattattggtcaaattgcacagaatctggtatactgctgtttggttaaggagacttcgctttaggcggagtttttattttgaacttttttggttttacaaaaatggaggaacaacgtggaatcaactgaaaagcgctggtacgtgctgcacacgtattctggctacgaaaaccgagttaagagcaatttggaatcccgagctcagtcaatgggaatgcaggactatatttttcgggttgtcgtacctgaagaaaaggttcgtcaggttaaagatggtgaagctaaggaaattgaagaaaaaactttccctggctatgtcttagtcgaaatggttatgactgatcaagcatggtacatcgctcgaaatactccaggcgtaaccggctttttgggttctcacggtggtggctccaagccaactccactgctgcctgaagaagtcgatcgcattttaaagcggatggatgactcagaagagacaccacgcactgatattgacgttaaagtcggcgatacggttaagattattgctggaccatttgctgacatggttggcaaggtaaccgaagtcgatcatgataagctgaaactgcgagctgagattgaaatgtttggccggctgacttcagctgaggttggctttgatcaaatcgattcagtcgaataatcaagatatttttaatagctgactattgaaaaaacagtgatttagtggtattcttctcgagtatgctatttaacgcatacagtgggaggggcaaatcttactaccccatcattaccacaacacggactaaggaggttttgtctcgtggcaaaaaaagtagctaacattgtcaagttgcaaatccctgcaggtgccgctacgccggctcctccagtgggtcctgcacttggtcaagcaggtattaacatcatgggcttcactaaggagttcaacgcacggactgcggatcaaaagggtatgattatccctgttgtaattacggtatacgaagaccgttcgttcgaattcattacgaagacgccacctgctgctgtactgctgaagaaggctgctggtgttgaacacggttccggtgaacctaacacgaagaaggttgctactgtaaccaaggatcaagttaagcaaatcgccgaaactaagatgcaagatcttaacgccgctgacgttgaagcagcgatgcgcatgatcgaaggtacggcacggagcatgggcttcgtcgttgaaggctaagctttctcgtaccggactgattcatgaaagtgaacagtcttagtgggaggtatacactccgttagaccacatttgcaaggaggaaaacatcaacatggctaaacatcgcggtaagaagtaccaagacgccctgaagaaggttgattccaagaaggaatacgctgtcagcgacgcggtacaattagtaaaagacattgactttgcaaacttcgactcaactctcgaagttgcatttaacttaaacgtagacacgaagcaagcggaccaacaattgcgtggtgccgtagtgctgccaaacggtactggtaaagaccaaaccgttgttgtgtttgcaaagggtgaaaaggctaaggaagctgaagctgctggtgcagacttcgttggcgaccaagacctggttgacaagattcaagacggttggctggactttgacgttgccatcgcaacgccagacatgatgccactggttggtcgtctgggtcgggtattgggtcctaagggcttgatgccaaaccctaagacgggtacggttacgatggacgtagccaaggccgtttctgaatccaaggccggcaaggttacctaccggactgaccgtgacggcaacgttgctgttccattcggtaaggcatcctttgacacggacaagctggttgaaaacttgaagacgattgaagaaacgatcgttaaggttcgtccagcagccgttcgtggtgcttacatcaagcacatttcggtagcttcgactttcggtcctagcgtaacgattgacctggctagtttctaaacgtcaggaatatcctaaaagagccaaaatggtaaaatgccattttggctctttttattttatagaatagaaaggaaaatcaaagataacttttagctttgacatgattaaaaatgattcattaatgtacttaatcatcaatatcagaagctaagaaattaagttatgattttgggataggtaaatgttttttattcaaggattaataataggttttagctggtcagctccaattggaatgcagaacatatatatgtttaacaatgcggtctcaaatccacgctggcgggcattggctgctaatttttttgtttggttagctgatgttttgctttcgttgacagctttttttggcattggcttgataatggcaaaatatcagttgttgaaggtattgataatgctgctaggcggaatgcttgttatctggattgggttcttaattgtccgttcagcgcgtgaagtagatttgggaacacaagcggtatctaaaccgatgacaaaattaatcagtggggcgtttatggttacctgggccaatccgcaagcaattattgacggtacgatgatgttgggagctagcaaggcagttttgcctaatgtgatgtctgaattttattttatgcttggtgtagcaatggcttcggcaatttggaacttttcaatgacgatgttgctgagtaatgctcgcgctaaattatcgtctcgctttatggttagggtcaatctgataagtggactagtcattttggcttatgggatccgcctgattataaaaggcttgctaatatccttaaaaatggtgtaagcgctaacattatatgttataatatagatgtagcaaaggtagcaaccaaatgaggtgatgcctaatggttaagatgattcgagcagtaacaaaatagcttcaccacgggataaagaaatggagctgataccgatgggctgtgaaaatagttagtcattttaggtgagcgaccgaggtggtatctgatggttaagatgattcgagcagtaataagatagcttcaccacgggataaaagaatggagctgataccaatgggctgtgaaaatagttagtcattttaggtgagcgaccgaggtggtatctgatgattaagatgattcgagcagtaataaaatagcttcaccacgtgataaaggaatggagctggtaccaatgggctgtgaaaatagttagtcatcgcttagctgatcgggtaggattgatgtccatttaaaacggggcgatcttatgtttaaaccaccataaaaattaagatgataaaattgacaaatcgatgaatcaattagaaagtaatatgataaaagaaactgaaatcaaaaagcgatcgtgagtagaacacgatcgcttctttagtttatttaagactaatcattagctgattgatcaagttttttaacaatccagaacacgggcagcccgattacgaccacgccggcaaaaagcatgacaccggctggatcattgatgatttcgctgatcaagacaaagatgccgccagcaattgcaataattggaatccaaggataaagcggtgtggagaatggacgaggtgcttcattggtcttgcggagaatgaagatgccgaagaaagccaaaatgtaaaaacagtagacggtaaatacgcatagatccgacagatgatcaggatcaaagaacagcatcatgatggtagccaacagaataatgaaaagcgttgcgacaaccggtgattttcctttaggggtcaggtaagacaaggcccgagaaaatggaatgtcgcgccgtttagccatggcatagacgattcttggaaaagtcagcatcttaccattgatcgttcccatcattgaaatgataataccaatggacaaaagcttgccgccaatcgttccaaaagctttaaccgctagataggcagtcgtgttctccccaagtcggtggatcgtttggactggcaaaaagcggagaacgccaattgtaattaaggtatagatcaataaaacggcactgattcctaaaatgatcgctttaggcagcagcttttgtggatttttcatttcaccacccaaattggcgattagaatccagccatcatagccaaataaagttgctaggatagcaacaccgaaattgcccgccgattgatgtacttgactgagcgtctggccaaaagcgtgctgatgtccccaaaataagccaaaaataataattgcagcaattggaatcattttggcaatcgtagtaattacagaaaatgctgccccaacgcggttttccagcatgttcatagcaccgatggcaagaatcgttatcacagcgaggggaattcgccaagcggagctgagaccgaaaagattagccatcaaaatactcataaatcctgctacagaagcaatgattgcaggaccataaacgataatctgcatccagccggctaaaaagccccagatgcgaccgtaaagattctcgatataaacatacaggccgccagtatatggcatctgcgaaccgatttcagcaatcgttagaccagccgttaaagtgataatccctcctaaaacccaggcgaggatggccatggttgaagatccggcactatccaggaccgaaccttgtttaaagaagatgccggaaccgatgatggtgccgattacgatcgaaagtgctgagccgaaccctaacgagcgtttcagctctgtttgtggctgtttttccatatagaaatcctccattcattgttgccaacaaaaaaaccgagctgctcaactgcagagaaagttctaaagcagttaagcatactcggtgctgctggtgatttgagtacgtcaaaattcctcaactgcttttaaattggagctgaggatgaggattgattgattttagaataatgttgaatcattaaacgcacctcttgacgctggaaaaatttacaaagcttacaataacatgagaaaaaattaaacgcaactaattatgattgaaaataatttggagaaatgttattgcaatctcgatctaatcctgttatactagcaaggttgattaaatatgactctgtctaagactcaggtggcactagccttaattaatgcctgccgaggaagaaatgaaatgttccttctctatgtctgccggtcatagggatttttttaaatccgatcaaaatacatcgcaggaggtgaaattcatgagcgaagcaacgattgctaagaaggctgaagcagttaagaacgtcaacgaaatgctgacgaacgctgaaacggccattgttgttgactaccgtggtctgacggttgccgaagttacggatctgcgtaagcagctgcgtgatgctggcatcaagatgatggttatcaagaacaagattctggaacgtgccgttgaaggtacggactacgaagatctgaagagcacgttcgttggcccaacggccgtagccttctctgacgaagatgctattgccccagcaaagattctgaagaagtttgctgacgaccacgaagctctggaaatcaagggtggcttcatcgaaaagaaggttcaaaccctcgacaagatcaacgaatacgctacgctgccaagtcgcgaagacctgctgtccatgctggcaagtgctctgcaagatccaatgcggaagattgcccgtgcagtcaaggctgttgccgacaagaagagcgaagaagaagctgcctaagtttctcagcgtacccgctaaatttaaagatctgcgcctaagcgcataaaccgaaatattggaggaaaataaacatggcttttgataaggatgctatcattgcttctctgaaggaagcatcaatctctgaccttaacgacctggttaaggctatcgaagaagaattcgacgtttctgctgctgctccagttgctgttgccggtgctgccggtggcgaagctgctgctaaggacagcttcactgttgaactgacttctgcaggttctgcaaaggttaaggtcatcaaggctgttaaggacattactggtctgggcctgaaggacgctaaggacctggttgacaacgcaccatccgctgtcaaggaagacgttaaggaagacgaagccaacgacatcaaggaaaagcttgaagccgcaggtgctactgttacccttaagtagtctcagcttaataataaaaaaagacgatcgcaatgcggtcgtctttttttattatcataatctaatgtctactagtaaattacaattttatttatataaaaaatacctttgtaaataaatttacctaatattaacttgattagtggggcgtttctttactttgacagtctatcctaaaacttgacaggagggattgatttgagtgaagagaatcaaaagaagctgtttggcatctcagcaattatttgcattattttattaacgattgcctattttggtgatttagccatcagcaatactttaattaattatcacagctgggtagggacgttttgccagacttttggcgagtttccggtttatcttatttttgccttatgtggacagattgcgatgacttatgcctggcgaggcgactgtgaaaagctgctggcaggaccgttgtttgttggcgggcttgcactgtcgctttggcagagcaagcagtatgtcaatgaattcttgggctatctgtattcggcacaaactaaccttaaaaacggtacggcgatagcaatggccaacagcgactcagcaacgggcggttatgcaggctcaacgattataatggtctggctgctgtttttcgttatatttacgctgttggtacaatggtggctgaaaaacaaaacgactaaacagctgacccgctatatgaaaattgcgattttggcgtcattgacggtttggtttgcattggaagttaatctgaccttaaaagacctgtggggacgctatcgcccatatgaactcacgagcggcaatcatgaatttaccaattggctgacaatcaatggcgttaatgggcataagtcatttccatccgggcatacgatggcggcaacgctatgcatcgttttttcatggttcgtttccaacaataagcgtaagagctttttcattggtggcatcgtttatggtgtcgtgattgctataagtcgagtaatcgtgggcgcacatttcttttcggacgttacgttctcgtttttcctgaccgcactgatcatctttatcatgaatggtcttggtaaaaagctaattgaagatttttaaaaataagggctgtgattatcgaaaggtgaccacagcttttatttatgtgttaaatagctcaatggtgagctaatttgtgaggaatcgagacggattttagagattatcatacaaataatccctgttttgactattaaaaataaaaaatagctgaaaaaagttgtgaatcagcatacaaaaagcgtgaggaaaaatcgcttaaaaccattataatggccccaaataaaaatatttttaggctttattcctactgcggcaagggttgacattatagtgttgtaatcgctttctataatgtcggaattgttatttatttcacaaaaagtatttacaaatctagaaaaaagagtatagtaataattgttcaaaggataacaaagttgttgaaaagtaattaatcgagaaggagctagtgcaatgacagttaaagctaaagccactgttaaggccactgaaaagcctaaagacaaggaacaaaccgctgaagaactgattaacggcttgattgataagagtgaaaaagctcttgatcaattgcgcacatttagccaagaacaggttgacaaaatttgccaaaaccttgcattggccgctgaagaacatcatatggatctggctatttcagccgctgaagaaactggtcgtggggtagctgaagacaaggctatcaagaacatctacgccagtgaatatatctggaacaacatccgcaatgacaagacggttggcattatcgatgaagatgatgaaaaccaaatgattacgattgctgatccactgggggtaattgctggggtcgtaccagttaccaaccccacgtcaacggttatctttaagtcgatcattgccttaaagacgcggaacacgattatcttctcattccacccacaggcctttaagtcatgtctgaagactggtcagatcttggaagccgctgctgaagccgctggggcgccaaaagacgtaattcaatggattccacaatgcagtcgtgaaaatacgacggcactgctgcagaatcctcgtatcgccacgattttggctactggtggccctggactggttaaggcagcctacagttctggtaatcctgccttgggtgttggtcctggtaacggtcctgcctacattgaaaagagtgccaacattgatcgttccatctacgacatcgtattatcaaagacctttgacaatgggatgatctgtgccactgaaaactcggttgtcattgacgacgaaatctacgaccaggttaaagaagcctttaagaagtggaactgctacttcttgaagccaagcgagattccaacgtttaccaatggctttattgatcctgatcggcaccaggtccgtggcccgattgctggtcgttctgcaaatgatattgctgaaatgtgtgggctgaagaacgttccagctaataccaaggtactgattgccgagctggatggggttggccctaagtatccattgtcagccgaaaagctttcgccagtactgacaatgtaccgtgccaagagtcgtgaagatgcattccggatctgtagcgaactgctggcctacggtggtgaaggtcacacggcagccatccataccaacgatgatgaattgatcaaggaatactcactgaagatgaaggcttcccgaatcatcgtcaactcgccatcaggtcttggtggtattggtaatgtctacaacaacatgacgccatcatttacgctggggacgggttcatacggcagcaactcgatctcgcacaacgtttctgactgggatctgctgaacattaagaaggttgctatgcgtcgtgataatccacaatgggtacagattccgccaaaggtctacttccagcggaactcactgaagtacctgaaagaaattccaaacatcaacaaggcatttatcgttaccggtccaggaatggttaagcgcggttatattcagcgggttattgaccagctgcggctgcgcaacaaccgggttcaatacgagatcttctccgatatcgaacctgacccatcaacggatacggttgacaagggtgttgcctggatgaacgacttccagccagacacgatcatcgcactgggtggtggttcgccaatggacgctgctaaggcaatgtggatgttctatgagcacccagacacgacttggaatggggttcggcaaaagtaccttgatatccgtaagcgggcctacaagatcggccggccaaaaaaggcacaatttatcgggatccctacgacttctggtaccggttctgaagttacgccatttgcggttatcaccaactccaagacgcatgtcaagtacccactggctgactacgctttgacgccggacatcgcaattgtcgactcgcaattcgttgaatccgtgccagccaacacgacggcctggactggtctggacgtcttgacgcacgctacggaatcatacgtttccgtaatggcaactgactacacgcgtggctggtcgctggaagccatcaagggcgttatggaaaatcttgaggcatccgtcaagggcgacaagctggcccgcaagaagatgcatgacagctccacgattgctggtctggcctttgccaatgccttcttggggatcacgcactctttggctcacaagatgggtggggcctttgatctgccacacggtctggtaattgcgattgcactgccacaagtaattcgtttcaacgctaagcggccaaccaagctggcaatgtggccacattacgaagactaccgtgctgacaaggactatgcagcgattgcccgtttcttaggcttgaagggcgatacgactgaagagctggttgaagcatacgtacaaaagattatcgaattggctcataagtgtggcgtaacgctgagcttgaaagctaatggcgttaagcgcgaagactttgacaaggtcgttgatcaactggccgttctggcttatgaagaccaatgtacgactgctaacccggttgaaccactggtcagccagcttaaggaactgttggaacgctgctacgaaggcactggcgtcgaaactgaagaataggctgttgatttccaagcactctcaattaatcttctcaacttaaaatctcaactttaaaagacggtcgcggatccatgaccgtcttttttgatttcaattaaaaaaatatgagaaaaaggttgacaatttattaagaaggatttagagtattagacaagttaatcaacggaacaaaacacgatgatccggagagtaaggttatggttggctgatcagcgaccccgatgaagtgtgagcggggacaggagccataactggaaagtagccggtgagtggccgatgcgacgtaagaagtgtcggacgggtgcgcccgtgatcgcgccagcgtatgaacacgtacgcgttaaggcttaattggcgacgattaagcaaaaaaaggtggtaacacgcgaaagcgtccttttcaaatcatggtctgatttgaaaaggacgcttttattttccgttgatcacgaaatcttagctaagatctctttttaaaattcatttgttgattgaaaggggattgatttttatgaatacgaataaactgactttccgtaatgctttattgattggatcattaatttttgggatgctttttggtgccggcaatctgatctttccggttcatttgggtcagatggcaggggcgcattggctaagcgcggctggcggctttttgatgtcgggggtgctcttgccgctgatggcgctgctggcaatcagcattacgcgctccaatggaatctatgatctggcgcgtcctaatggtgcctggtatgcacttatttttctgattttggttcatgcaacgctaggacctttgttcgccacgccacggacggcaaccgtttcatatgcgattggtattgcgccgcatctttcggccagtgccaacacctggggaaccttgatctattcagcagccttctttggcttgacgtactacttctcaactcgggaaggacgaatcactgacacgatcggtaaaatgcttaatccgctgtttttaggcttgatgtttattattttctttatggcatttatcagccccatgggacatgctggttcagctgccatcacggctgcttatcgtcacgcttcatttaccaacggctttttgcaaggctacaacacaatggactgcttggcttctttggcctttgggattacggttattacggcgatcaagggattgggtatcaagcgtcagcgcgatatctcctgggcaacggctaagggaggagctttgggtatcattggtattgctctgatctacattgccttgatctggcttggtgctaccagcctggcgcactttaagatggctgataacggtggtacgactttggaacagattgccaactactacttgggcacggcaggcgatgcaatcttggcagtcttggcaacgacgacctgcatgaccagtgcaatggggctggtagttgccttttcacaagatttccaccggcgttttcctaagatttcctacaaagccttcctgcgcttcaactgcggtctttcattcttggttgccaacctgggcttggatcagattattgcctggtcaacgccgatcttgatgttcttgtacccattggcaattacgctgatcatcatggggatcatgtcgccgctctttaaaaatgatccgttggtttaccgcatcacgactggctttacgctgattccggctttctttgacatgatgaacgctacgccggctattttgcataatacggctgccgttcaggcaatgatcagctttgcggctaaattcttcccattcttcggtcttggcttcggctggctttcatttggcattgctggcctggcactgggcttgatcattcactttgctaaggaacggatggcttcaccggcaatcagtgaggactaggattactgaaatagcaagcaaataaaaacgtgcgaatgcagcagctgcattacgcacgttttttatatattagtctttttcgttgatgtctttgccggcattgggatcagcaacatggtagtcgctgtcatgcatggcctcaacctcaccgagtcggtagccattgccgacctgactgaagaagtcgtggttggaggttgtcgttgaaataccgttcattacgacgggattgacatcactggccgtatctgggaacagcggatcctgtcccagattcatcaaagctttgttggcattgtagcgaatgaacgtcaagacttcatcggtccagccaacttggtcgtacagcaggtgagtgtatttttcttcattatcatagagttcgtataagaagttgtacatccagtctttcatgtcctgctgctgtttttcggtcagatccttcatgccgacttggaacttatagccgatgtaggttccgtgaactgattcatcacgcaggatcagcttgatgatttctgccacgttgttaagcttattgtgacccaggtagtacagtggcgtgtagaagccagagtagaacaggaacgtttccaaaaagacgttggcaacttttttctttaaaggactgacgcttggatctaagtaaagattgccgatccgtgtcgccttgctttgcagatattcttcagtatcagaccagtcaaagatctcgctgatttcttcaggagtgttcagcgtggaaaaaatcgtggaataagacttggcgtggaccgattccataaattgaatattgttaagcacggccgtttcatgctgagtcttaacgttttctttcagggccgtcaaaccagcttccgactgcagcgtatccaaaagcgtcaggcccccaaatacgtgaccgacgacccactggtgatcagtatcaagctctcgccaatcatccatatcgttggaaaccgggatccgggtatccagccagaactgttcggttagtttttcccaggtggctttgtcgatcatatcagagacttcattccaattgatcgcctggtagtttttaagcggtacaaaattctcaatcttcattattaagtggggctcctttagtctttaatgattccaataagttagataacgcagctttcgcattggttggcaccgatctcatcttgatcatcggtaaacgtccgaatatagtagatggatttaatgcctttttgataagcataatggcgcagaatgtttaagtcacgcgttgtcatcttatcagttcgattatttttccattcgtacatcccggctggaatcgtggaacgcataaacagcgtcatcgccagtgattgatcaatatgttcctgagcagccgcgtaggtatcgattacgctgcgcatgtcggtatcataagccgacttgtagtatggcatggtatcgttgctgaggtatggtgccgggtagtagatcttgccaatcattttttcctgacgctcttcaatccgattgatgattgggtgcaggctggaagtcgagtcgccaatatacgacgtcgatccattcggggcaacggctaagcgataggcgttgtagagaccatccttttgcacggctgctttgagctcctgccagtccttgataccaggaataaagatgccttcaaacagctgcttgaccgttgccgacttaggcccccagtcttgactgacgtatttgtcgaagtaggagccatctgcatacgtgctcttttcaaattcggcaaacgtttcatgacgttcacgggcaatgtcgttggaggctttgatcgtccaatagttgagcagcataaagtagacactggtaaattccagggcgactggcgagccatattgaatgtgatgcttggccaggtagccatgcagtcccatggcaccaagaccgattgcgtgagccatgtcgttgccgtgctcgattgatggaacgacgtcaaggtgctcaatgtcgctgatatgggtcagtccccgtaccatggcactaactgagcggccaaagtctggcgtttccatcatgttggcgatgttggtggagccaaggttgcaagaaacgtcggtccccagcttggcaaacgtctgatcatcgttaacgattgacggccgctgaacctgagcaatttctgaacaaagattgctcattacgatcttaccgtcgattggattggcacggttgacggtatccagattgacgatgtatgggtagccggattcctgctgcagcttggagatctcatcttctaagtcgcgagcgttgactttgtatttggtaatggcgtcattagcgaccatgttctcatattcattggtgatgtcgacgtacgagaatggcacgccatagatgcgctcaacgtcataaggactgaatagatacatctcttgattggcttctaccagctcgtaaaatttatcgggaacggtaatcccaagcgaaagcgttttgattcggatcttttcatcagcattttctttcttagcagacaagaaggccacgatatcgggatgaaagacgcttaggtagactacgccggccccctgccgctgacccagctgatttgagtaggaaaaagagtcctccaaaagcttcatgactgggacgaccccactggcagcacctttgatctttttgattggtgcgcctgcttcacggaggttggaaagattgatgccaacgccaccgccgatcttggaaagctgcagggcagaattgatcgtccgtccgattgagttcatatcatcggttgcctgaatctcaaaacaggatacgaattcgccgcgccgtttgcgacctgcatttaaaaaggttggcgtagctggctgatagcgctggtggatcaattcgtcggccagctgcatggccagctcctcattgccgtcagccaaaaacaaggcgttcatggcaacgcgatcaatgtagttttccaggtagtattccttgtcgttggttcgcagggcatactgggcgtaaaacttgtaggctgccataaatgaatgaaaatgaaaatcctgggcctttaaaaagtcgtagagctcttcgatgaattcaaagcggtacttgtgcataaagccggtttcgatataatcgtttgcctccagccagtcatagcgttcctttaatgaagcaaagcgtttggtgttgggcaaaacgttttctttgataaaatcagctaaggcttcatgatccttatcaagctggatttgaccgtctttaggaatgttgagttcattattgaggtcgtagtattttactttggtgaggtcgatatctgatagtgccatggataactcctttttccagtgcaataaaaagcgggcatcgtgcaaaatgattgaacgatccccgggaataacgcggtataattgacaattaagccaattgcttcagcatgtcaggacggaagccagtaaaggattgaccgtcaggcagcttgattactggcgtcgccttaaaaccgtcagctttcagttgatcaacatattctggatgctcatcaatattgtgttcaacaaagtcaacgtggtgctgcgttagaaacattttggtcatcttgcattgaatacagttgtttttagagaaaacagtaatcataaatctcaatcccctttaacttttcgttgagttaatgttttatagtatagcgggttatgaagaaattacaagcattggcatactatataatgtacgcttacaaaacgtcaatacaacatgtagtggctaagtgataagggattgaggtgctgacagctgcggcaaattttttattttcaatgaagattgcttcataactcacacggtagaaaaatcacaaaaaccattatacactgattaataataattgataagggagaaaaattttgcaaccggaagattatatggaaatggcgctggcagaagcaagacaggctgaattgatggatgaggtaccgattggggccatcgttgtctatcatggcaaggtgatcggtgccggtcataacatgcgggagagatttcaaaatgcagcctatcatgccgaactgctggccattatggaagcctgcgagtatctggggagctggcgactggaggaatgtgatctgtacgtaacgctggagccgtgtatgatgtgcagcggtgccattatgaactcacgaattcgtactttatattatggagccaaaaatcccaaagccggcacggtcgagagtctgtatcacctgctgagcgattcaagattcaatcatcaagttgagattagatcaggggtcaaagaaaacgagtgtcagcagctgctcaaacaattttttaaacgggttcgcaaagcacgtaaagccgccagaaaatcagctcagcaaaagaattaacagaagactggcatttagttttaaaatagtgtaagatattatttgccgtaaggtcatggggcaaggttgtgcctacgaatcgtgtcaggtccggaaggaagcagcactaagttcgctacagcttgtgccccatgttttttatgaagattaaccgctgtgtggatcgtttcgcacggctttttttatgtacaaaatatttttcaatcgaattgcaacgattttactagtataataacgataatacggatttttaccagaaaggaagcagtcaagatgagctatcaggcgctttaccgagtttggcggccccagcgatttgacgagatcgttggtcagcaggtggttacgcagactttaaaaaacgcgatcataaccaagcagatcagtcatgcttatttgtttgccggcccaaggggaactggcaagacctcagcggcaaaaatcttcgccaaagccatcaactgtcatcatcggcaagacggcgaaccctgcaatgaatgcgagatctgccaggcaattactaatgggcagcttggcgacgtgattgaaattgatgctgcttccaacaacggggttgaagaaatacgcgatattcgcgacaaggccaagtatgcgccaactcaagccgactacaaggtttatatcattgatgaagtgcacatgctttcaactggggcgttcaatgctcttttgaaaaccttggaagaaccgcccgctaatgtgatttttatcctggcaaccaccgaaccgcataaaattccgctgactatcatcagtcgggtacagcggtttgactttcggcggatctcggctcaggatgcttttgagcgcatgcagtatatcctggatcaaaagcacgttgaatatgaaaatgacgcgctttgggtaattgccaatgctgctgagggtggcatgcgtgacgcactgagtattttggatcaggtcttgtcgtttagcgataatcaagtcaagctggatgatgcgcttttggttaccggcagcgtcaccaagcagctgctgaaaaaatactttgatgagacgaccagccatcaaagtgccgcggccctgcatacaatgaaagaaattctggatcagggtaaggacggccagcgctttatcgaagacttgatctcatttattcgcgacgtactgctttatcaagaatcgccacagttggtcaatgtcgcgggatctggacttaaggaagccgattttcagcagttgagtcaggctgccagtgccgatgagctgtaccaaatgatcgacgagttaaatgagattcaagaagaaatgcgctttacgacgcatcctgacgtctatttggaagtcttgacggtcaagcttagtcaaatcaagccgcaagataataaaacgagtgcgacggatccccgactcaatcagacaattggtcagctgcagcaagagattcagcagctgcaggcagcaattgccggcttaagacaaactggcagcagctcggcatcccggattgtccgacgagcgggtggcaatgctggcaataaaattcagcctaaggtgacggttaagctggatcgcgtctatccaattctggaacatgccactaagcagaatctgcgtgggctgcaggagatctggggtgatctgcttaacatgctggatacgccgcagcgagctctgatcaatacctcccagccggtagcggccagtccgcaaggcgtcgtggtttcatttgacagcagttttttgctgcagcgtgccaacagcggcagcttagcagcagatatggaagctggcctgcagcgtctgtcaggcaatgagatgcgcgtggcattcgtgccgatggatcagtggccaaagatccgccataactatttggtagagcatggctatttgaatcaaggcaaaaccagtactgataaaaaagattcatcagctcagtcagcaccagccacgccagttaaaactgatccgctgattgataaggccaagcaaatgtttggcgatttggtaaagatagaagataattaagcaataacataagtaaaggatggataataactatgatgcgcggaatgaacatgcaacaaatgatgaagcaggctaagaagatgcagcaaaagatgatggaagagcagcagaatctggctaaggaagaatttattggcgtctcgcctgatgaaatggtcaaggcaacttttaccggcgacaaaaagctgactgacctgcagattgatccgcaagccgttgaccctgatgatgttgacatgctggctgatttggttttggcagccgttaatgatggcctggaaaaagtcgatgccgccacgcagcaaaaattcggcaagtacactaagggcttgaacatttaaggaggcttggcgatgcagtatcctgagccaattgccaaactgatcgacagctatatgaagctgccgggaattggcgaaaaaaccgcgactcgccttgctttttatacactgggaatggaccaaaaagacgttgaggattttgccaagtcgctcttaagcgtgaaaaaagatctgcattactgcagcatctgtggctttattaccgaagacgatccttgtccaatctgccgagataagtcgcgtgaccgttcaacgattctggtggttgagcattcgcaagatattatggcaatggagcggatgcacgaataccatggcctctatcatgttttgcacggttccatatcgccaagcgaaggaacagggccaatggatatcaacatcccggctttgcttaagcgcctgcagaaaaataccgaggtcaaagaaatcattgtggcaaccaatgcctcgctggatggtgagaccacggcacaatatctggccaagctgatcaagccggcgggcatcagagtcacccgtttggcccatggactgtcagctggcgccaatatcgactatactgatgaggtaaccttgttcagagcagttcaaggcagaacggaaatgtaggtgaagatcatgttttttaagcatcgcaatccccatgccgttgaagagctgggtaatcaaaagctgttggaactgatctacaatgtcaaggatagttgggatcatgccaaagaaaccgagcacgctgtctatgaagggcaggttgataatgagctctacagtcgaaccaagctgcaggagcaaaaatatctgtacctttatactaaagcgcgtcgcaatcatctgcatggctatttaaacgacagcgtaatcaagcagtagttgaggaacgacaatggacggtaaatttatttcatttgaaggaccagacggagcgggtaaaaccagcgttatgcgccagattacggctgacctgcaaaaacagctgggattggatggcgttttgtataccagagagccaggcggcaaccatatcgctgagcagattcgggatgtcttgtttgacgctcgcaatatcgacatggatccgcgcacggaagcactgctgtttgccgcagcacggcgccagcacctggttgcggatatcatgccagcgctcaaaagcggcaaggtaattctctgtgatcgctacgttgacagctcaattgcctaccaaggcgctggtcgcggactgggcgaggataacatctggcagatcaatcagtttgcaattgatggcttgatgccggaactgacgatttatctggatattgattccgaactgggccttaagcgaatcgcgcagaatcgtgctgatcaggtcaaccgcctggatgaagaggcactgtcttttcattgcaaggtcagaagtgcctatcagaagctggcgcgacaaaaccctgatcgcatcgttacgattgacgccagtcagccgctgacacaggtgatttcagcaactcgtttggcaattcatcagcgctttgagcaactgttttaactaacgcgactttttaaggagggcttattatgaaaatgattatggcaatcgttcaaccaaaagatgccggcaagctgcgggatgcttttatcgacaacaatatcggtgcgaccaagctgtcatcgacgggtggcttcttaagagaaggcaacaccacttatatggtagtcgtagaagatgatcgggttgatgaagtattggaaatcatcaagcataatgccaagtcgcgtgaacagtacatgaccccggcagcccagatcgacaacggttcatcggccattccgattaacgttcagattgggggagcaacggtctttatcctgccagttgaaaaatttttacagttttaagttgcaaaccggtcaagacgaggtgatccaaaatggcaaatgccacgcaatcaaaatggcaagctgaacggctgcagccagcaatcagtcagcgtctaaaaaaaaccatggttcaaggtgaactggcacatgcctatttgtttgcaggcccgtctggatcagggaaaaaagcattggcgcagtggatggccctgcgccttttttgtgaacagccgcaagctggtgagccggatggaacctgcagcgaatgtcagcgaattctttctggcaatcatcctgatgtggttactgcagcgccagagggtcggcagatcaaggtcgatacgattcggcgcctaaaggcagaatttaccaagagtggcgtagaaggcagtcaaaaactgttcatcattgaagatgccgaaaaaatgacgacaagtgctgccaatagtctgttaaaatttattgaagagccgctgcctggcatttatattctgcttttaacaaccaataaaagtgccgttttgccaacgattcgttcgcgcacccagattattgagctgcagccactgcctaaaaagattctgaaggagatgctggatcaagctgagattcccgttggcctgcagtcgattgcattagggttaaccgattcaacggcgcggattaaagaatggatggaagacgactggctcaatcaagcggtgcaagctgtcatgcagtggtacaaagaatgtggtcgggctgatctggtagcctttgtcacggttcagacaacgcttttgaaagtggctggcgatcgtgaaaaacaaggattgatcctggatttgatggctttgatctggcgcgatacgctgatggtagccaatggcgctgatgaagtcgatgatctgcatttcaatgaccaattgacgatgatcaaagaaatcgcgcagcactatcgactggatcaattactgaaggtcagcgaactgacgcttgaaaccaggcatttaatggatcaaaacatttcatttcaaaatacggccgagcagctttcactgcgcattatcaatgtcttgcagcgatagaaatggggaaagacacaaatgagtgagcgagtagacaaaagcaagatttatgaacgattcaccagagttaccaagcaaaccaaggatctagtcgacagcatggaagaattgcagtcaatgatgacggcggttctggaagaaaatgctgagctgtcgattgaaaacgagcatctgcatcaaatgctcaaacaaaagcatcagcaggcaaccaaagacggcttgaccgattcaagacgcaacctgcaaaagttgtatcaagaaggctttcatgtctgcaatgaatactatggcaagcgattggatgaagacgattcatgcgcgttttgtctggatgcaatctatgggcgccacgatcagccgcaaaagtaagggtgatatttatgcaacagattcgcagctttactgataatgaaacgggacgactctatttggtgccaacgccaatcggcaatcttgacgatatgacgtttcgagccgtcaagacgctggcggcagttgatttgattgcttccgaggacacgcggcatacgcagatgcttttgaatcattttgagattgataccaaacagatcagctttcatgagcataataccgaacagcgaattccacagctgattgagcttttaaagcaaggcaagtcgattgcgcagtgcagtgatgccggtatgccatcaatctctgatccaggtcgggagctggttgcagcagcggttgaagaaggcttgcaggtcgttgcactgcctggcgccaatgcagggattacggccttgattgcctctggtcttaacccgcagccattttatttttatggtttcttaagccgcaagcatcagcagcagattgtagaattgacgccgttaaatcaacaccaggaaacgatgatcttttatgaggcgccacatcgactggccaaaacgctgagttcgatggccgaggtttttgggttggatcgcaaagcagtcttggcaagagagctaaccaagcgttatgaggagttttgtcgcgggtcactggaggaattgattcagtgggtagatgagcatcagattcgcggtgagtttgtgattctggtggccggcaatgatcatcccgaccagccagctgatgatgcggccaacctcagcctaaaagagcagatcgaccaagagattcagcatggtctttcaaccaatgcggctatcaagctggttgccaagcgcaatcagatcaagcgccaggatttgtatcggcagtaccatgagctttaagatgaggtgaaacgatggcattgaaagcccctttggtatatgaaaccaagcatcatttaagttactatgaatgcgatgcaaccggtcatcccagcttaagcatgctgatcagtatggccgtgcaggtatcagaagaacacggcaattcgctgggcctggatacagcagccattcaaagctatggcggcggctgggtgattaccagctatgaaggatcctttgccgcacgacagccgattaatggcgaagagttgattctgggcacgcgggcgattgccaataatcgtttctttgccctgcgcgaattttggattcaatcagctgatcgtcaagttgagtatgttcgcttaaccgggctgttcgtttatatgaacctgcagacgcgtcatttaatgtcgattccgcaagcagtcattgagccttatcatggtccggaaaagaagcggctgcctagattggctaaggctcgcgaactccaagacgttagatttaaaaatgactatcatgttcgattctttgatattgattcaaatcgtcacgtcaataatgctcgctactttgactggatgcaggatccgttgggggcagagtttttaacgcaccatcagctaaagcatatgacgatgcgctatgaaaaagaagtgcgctacggtcaaaccgtcaccagtgagatcagcagtccctatcgcaatgaaaatggcgagttgaccactgatcatcgaatcgttgtcgatggccagctcgcggcagcctcaacgatgatctggtatgaataaaattacgtaaaatcgcgtctgccaagctgacagacgcgatttttagtatgacgaatggctttgaagcgatatgcttttggcttttcgtattatttacactgcaaaaaagttttaaggcccaaacaggctgaaattggtggtattctttatatataacagataaaaagggcattcaatgaataaaatcatgtgaggagtgttaatttgaaaaattcgttatttgggattattttcctagagccggatcgcttgacgcttcggattgtagagctcccaacccttaaaatcattaccgaggtccaatcaggggccttgatcgttggcagtcataacgttgccaactatgcacaaaacatgcaggctattgttgataatcttcaaggttttcaacgaatcttgcgtgaatatcaagttgaaaaattcgccttttatggctctttagaagacttaaacatggtcgaggcccgctatattgccgatcaattaaaagtcaggactgatttgaatattgaatggctcagcaacaatcagctgatggccagcgccttggcagccgtaatggcccagatgccgcggttcaacgagcttagtaaaaaggcgttgtatattttgacgattggtctgaacacgacgcggctttcctatttccgccacggcaagtttcagacgtcatgggatatcgacttgggcgaggcgcgcgtcaatcacctggcccaaacgctgcgccagacgacgacgacgccaagcgagattattctggactatatttcaagcaagctggaatacctggtaccagaactgcggcatgtcaaaaattccaatctgctgattcataacgtgggaacgatggctcaaagctacgttaagccagatgagatgctgggcaaggtgccgcgtgaagactttgaaaaacgctaccaacggatcgtcagctcgtctaatcagttcattatcaatcattacaatgtcgatgagcaaagcgtcaactgggtattgcccaactacctggtgatttcgcgtaccattcatctgctggatgcacagcgaatctatgccaccagtctgcgcattttggatggtctgacgattatgcagctgggtgatcgttcgctggtcgccaatatgattcgaacctcagcagccaacatggcacaacgctatggagctgatacggcgcattcaacgtttgttaccagagttgcgctgcagctgtttgatgccctgcagccgattcaccggcttgatcggcatgatcgcctgcttttagagattgcctgcaagattgaagatatcggcaactttatcaatccacaagggcactatcggcattcgcaatacatcttagaagctaatccgctgattggtctttcagctgatgataaccgtacgattgctgaagtagcgcgctatcacagttctgagagtcccgacgttgcgcaggctcactatcggcatatggatgatgatattcagatgccggttgccaaattggcagcaattcttagggtagcggactcgcttgatgactcacgcctgcagaaaatttcacgagttgagctgcgcctgcaggatgaacgcttgctgatcacggcccatgccaatgacgatctggtcttggaaaagtgggcctttcaacgaaaaaatcagctgtttaccgatgtctatggcctaaagccagaattaattgccaaggaaggggaatgaaatgatgtataaagatttttatcagccgcaaaactacgtcaaccgtgagctttcttggattgactttaatggtcgggtcttagaagaagcgctggccccagaaaatccgctgctggagcgggctaatttcctggggattacgcaaagcaacgtggacgagttctttatggtacgagttgcctcgctgcataagctttcggccgccaacgttacgacaaccgatgcttcaggtatgacgcccaaagagcagctggacgcggttaatgaaaaagaacacggcatggttgagcagcgctatcagatttataatgatcagttgctgccagaactggcatcacaaaatattcaaattctacatgtcagaaatttggatgctgaacaatatgaatacgttcgccgctactttaatgaggaattgatgccggtactgacgccaatggctgatgatacatcgcggccatttccttttatctccaacaattcgctcaacattgcagttaaattggagcgcgatccggaaagcctgcacgttaaagagcacgaaatcctggaaggcgatcaggagattcaaggccgctcgcaagaacctcatgacgagaatactgaaaatgaagagaaatttgcgacggtgcgtgttcctgagatctataagcgtctggtcaagctgccgggtgaaaataagtttgtcttattggatgaattgattaaggaatttttgtcggtgctctttcccggctatcgcatcatttcttctggtacctatcgggtcatgcgggacatggatctggacgttgccgaagaagatacgtctgatctattgcgggccgttcagcatcaactgcgggagcgtgaacatggtcatgtcatgcgcctagaggttgagcgtgatattgatccatggctggaaaatcatctgatcaagaacctgcatgtaaacgaaacggcagtctaccgcgtcaatggaccagtcgatctgacgtttttaaagaagctttccggcatggtcaaaggacacgatgagctgcgttatcagccgttcaaagcgcacctcgatccgcgctttgatatggatcataatatctttgaggcaattcgcaccaaagatcatctggttcaacatccttatgatgattttcaatcggtcgtcaacttcattcatcaagcggccactgatgaccaggttctggcaattaagatgaccttgtatcgtgtttcgggcaattcgccgatcattaagtatctggggatggctgctcagcaaggcaagcaggttacggttttggttgaagtcaaggcgcggtttgacgaacaaaacaacgttcgctgggcgcggcgtctggaacgaatgggctgtcacgttatctacggtctggttggcttaaagacgcactgtaagctggcattggtcattcggcgcgatgaggacggcatccggcgctacatgcatctggggactggtaactataatgatgttacggctcatttctacaccgatatgggactgtttacgtgtgactacgaactgggcgaagacatgactaacctgttcaatatgctttcaggatttgctcggccacgctacttccataagctgcgagtctcaccagatggcattcgggagtttattgatggcaagattgatgagcagatcaagattgctaaggccggcagtccagccttgattcgcatgaagatgaactcgctgtctgacaagcagattatcgcgcggctttatgaagcggctgtagcaggcgttaagattcagctgctgattcgcggaattacctgtctgcgcaatgatctgcctcagctgcatgaaaatatcgaggttcattcaatcgtggggcgttttttggaacactcacggatctattacttcaagggcaacggtcatgaagaaatctatctggccagtgctgatatgatgacgcgcaatctgaatcggcgggttgaggagctgttcccagttttggaaagtgatactaaggcacgggcaatcgatatttttgacaagatgtggcaagataatgtcaagacacgaattctgcacggcaacaagtatgaacgaattgaccgcggcaagacgcagccgtttagctgtcaagaatactttattgcgcaagctcaggcagctaaccgggctgataaaaaggaaacggaacagcatcaagcagccagtgcctttcaaccaatgacgcgtcatgtatccaagctgcatttgaacgatgaagaggacaatgcgcatgattaatctagcggttattgatctgggctcgaattcggttcggctgcgaattaccgaaattgacgagtctggtaattataatttggtaagctatgaaaaagaatacgttcgcctttcagaaaacatggggccagaaaaaatgctcaagccagcgccaatggatcgaacgataaaagcactgcagcattttaagcagctctgcatggcgctggaaaacgttcgggtgattgcggttgccacggctgccgttcgtcaggctgccaaccagacggaattcttaaagcgggtcaaggcagagaccggttttagctttaaggtaatctctggtgagcgggaggcttatctggactatgttggcgttaccagaactctgccgattaaaaacggattgattatcgatactggtggcgccagcatggaattgatctatgtcgatgacggacaggctgaagaaatcatcagtctgccgatcggtgcggtgctgctttctcaagaatatcatctggatgatcagattaactctgctgatttgtttgatgccatcgttagggttgatcacgcgctgggacctcagcactggctgcagcgggcccgacaccaagaagtcgtggccctgggtggcagcaatcgagctctggctaagatctatcgctggcagctggaggctcagggcaaaggtcgtcaacccgttcatggtctaaaaatgtcgacagctgatgccaatcgcattatgcactcgctgcttgcgatggataaaaggcagcgggccaacgttcatggcattgcttctgaacgggctgatgtaattgttggcggcctgctgccattaatggcgattttgcggcagttggacgtcaagcagctgacatttagcaataatgggctgcgggaaggcttaatgtttaagttcttggatcatgagatcatgagcagtatcgttcagccgctgacggattaaatttttaaagattgatatcaaatgggtttttactaaaattttatgttataattttactaagagagaaatgaagaggtaaacccgtcaagataagggaggaaaacactttggctattttagttgcaggtggggccggatacattggctcacacatggttaaagatttaattgaacatggttatgacgtggtcgttgcagacaacctttcaacgggacacaaaaaggccatcaatccaaaggctaagttctactatggcgacattcgcgatcgtgcctttctggatcggattttcgttaatgaagagattgaagccgtagttcactttgcggccttctcaatcgttcccgaatcaatgagtgagcctttgaagtactttgacaacaacacgagtggcatggttacgcttttggaagccatgcgcgactttggcgttaagtacattgtcttcagctcaacggcggctacttatggtacgccggaacacatgccaattaaagaaaccgatccgcaaaagccaatcaatccatatggtctgtccaagctgatgatggaacaaatgatggcatgggctgacaaggcttatggtattaaattcgtggcgctgcgctacttcaacgtggctggggctgctccagacggtacgattggcgaggatcatggtcccgaaacgcacctggttccaatcatcatgcaggttgctcaaggcaagcgcaaagaactcagcatctttggcgatgactacgatacgccggatggtaccaacgtgcgtgactatgttcatgttatggatttagccgatgctcatattctggctttgcagtatctgaagaagaacaatcaatccaaccagttcaacctgggctcttcaaccggcttttccaacaagcagatgctggaagcggctcgtgaggttacgggtaaggagattccagctaagatggcgcctcgtcgtcccggggatccagactcgttggttgcggccagtgaaaaggcacgtgaagtcttgggttggaagccgaaatttgatgacgtgcacgatatcattgcaacggcttggaagtggcactccacgcatccaaagggctacgacgaccgcaacaattaaaaatcaaataataattgcttaattaaagatgagtacgctaagagctaaaaagcttgccgtactcattttttagttgtgtgataaaattgctaagtacgaaaggaacgagaaactaatgaaaatacttgcaattgatacctctaatcacccaatgagcgtggcattggtagaagacgaccagcttctagccacaacgacgcttaatatggtccgcaaccacagcatttttcttttaccggtaattgatgatctgtttcaaaaagttcaatggcagccccaagacttggatcgggtcgtagttgcccagggtccgggatcatataccggcatccgcattgcagtaactactgccaaggtgcttgccgatactttggacatcgaattgacaggcgtctccagcttaaagacggtggcggctaacctgccttcagcaactgacgcgttgatcgtgccattttttgatgcacgacgcggcaatgtttttgcgggggtctatcagtggcaagatgatcagctggtcagcgtattgccagatcagcacctgtcaatgcaggccttgctggatcagttggcaaaacttgaaaaaccggtcttaatggcaggcgagctgactgaccgtttgcaaaagcagctgaaaaccgtgcctgagcagctgaagtttttaccgactgcatttagtattccgtcaacctatcagctggccttgctgggggaaaaggcagcaccggttaaaaacattgatgcatttgtgccgcaatacttaagaattaccgaggccgaggcagtttggcaccaccagcaccccgacgctccacagcaggattatgttcgagaagtttaagaattggctggaacaggttggcagcactgaccggatgccaatgacgtttgccagccgttcgatcagacttaatcatcaatctggtacgatcagtcaggctaaggaagcagatattgctgccatggtgcatattgaggaactgatctatggcgtggcaccgtggaatcgagcggcatttgcagcggatctgaagaaaagtgatcggctgtatctggtgctgaaaaatgccaatggggacgtcctgggctttatcggctgttcatttgactggaatcgtgctgatgctcatatcaccaactttggcgtgcatccggcttttcaaagacagggactgggaacctacctgctgcagacgaccaggcagattgctctggcacaagcaatgcgcacgatgagtctggaagtcagagtctccaactatcaggcacagcggctctatcgacggatgggttttatggatggcgagctcaagcggcattattacctggacaatcatgaagatgcgttagacatggttgcccagcttgaagaagtgaaaggatagaataaagtggcaaagaaaaatttgatcttggcgtttgaaagcagttgtgatgagaccagtgtggcggtcattgaagatgggcaaaagatcctaagcaatatcgtagcaacccagattttgagtcatcagcgttttggcggggtcgtgcctgaggtggccagccgtcatcatattgagcagattaccaaatgcattgataaggcactgaatgaggcagctgttgactatgacgacttaagtgcagtcgcggttacgtatggtcctggtctggttggttcgctgttggtaggcgtgacggctgccaagatggttgcctgggctcatcaactgccattggtaccggttaatcatatggctggccatctatatgcagctcgttttgaaaaccagtttgcctatccacagctggcacttttggtttcgggcggacacacagaactggtttacatggccagtgaacacgaatacgagatcattggcgaaacgcgtgatgatgcggctggagaagcttatgacaagattggccgagtattaggcgtcaactatccagccggtaagacgattgatgagtgggcagccaaaggatccgatacgttccattttccgcgggcgatggaaaaagaggacaactatgacttcagcttcagtggccttaaaagcgcctttatcaacaccgtacacaatgccaatcagcgtggtcaaaagctggataaatatgatctggcggccagctttcaacagagcgtagttgacgtattggcagaaaagacgatgcgggccttgagcgactaccctgtcaaacagctgatcttggctgggggcgtagcagctaaccacggcctgcgtaagcgtttagagcgcgacttaaaagagcagcatccagaagtagagcttttgatggcgccattgaaactatgtggcgataacgcggccatgattggggcagccggttgggtaaactatctgcatggtgatcgcgccggttgggatcttaatgcagttcctgggctctcgtttgcaagaagcaatgccaacccggatctggcaataaaataaactagacagtattaaaagagcttgtgttttcgttacgaaacataagctcttttttgttaataaattttgataatcaaaatatttttataaaatttttccacaagatatgactaataattcatgtttattaacgggcatcatacttgtgttcaataatggtattttgagacatcaaaggatattttgacgtcttcgataaccgctttcatcgagtgagtgaaggttgactaaaaatttgaatgacatataattcgattatcgaatactttgatactcgaaatacttttttgaaggcaggtgacaaaattggcactgatgacggcacaagaaatcatggatctgattcccaatcgctatccgatctgctatatcgattatgtcgatgccatggaacctggaaagagcattaccgcgactaaaaacgttacgatcaatgaatcatttttccaaggtcactttcctggcaacccggttatgccgggagtcttgataattgaaacactggcccaggcagcatcgattctgattctgaaatcaccagagtttttcaagaaaacggcatatctgggagcgattcacaatgctaagtttcgccggatggtgcggccgggcgatgtcgtaaagcttgagatcgaaatgattaaaaagcggcggcaaatggggattgtcaaggcagtagccaaggtcttggacaaaaaggtctgcagcgctgaattggtctttgtagtggcggatcgccaagctaagatttagccgcggtttagtctataatgtattttgataatcaaactatttgagctgttaagcaaaggagaaaatacattatgaatgacgactaccaagaaattaaccaggcattggtgcgggtctataacgggattttatgggttgaagaacacgagctgcgtaaaagcatgtttcgtgatttgacgatcaaagagatgcacgcaatcgatgcaatcaccatgtacaatcaccagactgtttcgcaggttgcgcaaaaactgcatgtctcaccaggcacgatgacggcaacggctgatcggctggtgaaaaagggctatgtagaacgctatcgtgatgaagaggatcggcgcgtgattcggcttggcttgactcataagggccgtgtactgtttcgtgcgcaccgtgcctttcacaacatgatggttaaaggctttttaaaagatatgaacgatgaagagctgaaagtcgttcgcaaggcgttgcgcaacttggaagattttctggatgaacatgcctgagaggatgagaaagcctttggaagacttaaaaatcgtacagacggccagctgggttcctgatcaggtcattgataatgatgacttgagtcggattatggatacctctgacgattggattcaatcaagaaccggaatcaagcggcggcatatcagcaagcacgagaatacagctgatctggcttctaaaaccggtcagctgctcttagaaaaaagcggctggcaggctgaggaacttgatctgattttagtagctaccatgtcgccggatgcctatacgccttcaacggccgcgatcgttcaaggccggctgcaggccaaaaatgcagttgcctttgacgtttcagcggcctgctcgggatttgtctatggcttggcagttgccagtcagatgatgagtacgggaatggtaaaaaaggccatggtaattggcagtgaggtcttaagcaagctgattgactggcatgatcgaacgactgccgttttattcggtgatggtgctgggggcgtcttattagaaaaagtgccggttaaagcaccaaccctattaggactgcagctaaagacctttggcgaactgagcaatgagctgagtgccggtatgacgagttcgggaaatacttttcctaaaccgctgactgaactgacgccatttaagatgaatggacgcgcggtctaccgttttgccacgcatgaggtacccgaatcaattttgcaggccagtgctcaaaataagctgacgctggatcagattgatgtttttttgctgcatcaggccaatgcccgcattatcaggcaggtagccaagcgcctcaagcagcctttagaaaagtttcccatcaacattgctgaatatggcaatacttctgctgccagcgaaccgattcttttagacgaatgcgttgaaaaaggaatgatcaaacgaggcgatattttagccttgagtggttttggcggcggtctgacgacgggaacgattattttaagatactgattttgaacaaataaaaagaaatgaggataaacaaatgactaaagaagaaatttttgcaacggtaaaagaaatcgcagctgaagaactggatatcgatgaagccaagatcgtgctagatgccaaaatcaaagaagatctggaagcagacagtctggacgtttttgaaatcatgaacgaactggaagacaagtttgacattgaactggatgttgaagatggtgccgaaacgattaacgatgtcgttgaactggtagccaagcagctggcagccaaggaagactaagatgcagctagggattctgtttagcggtcaaggagcacaaaaaccaggaatgggctgtgacctgctggctgatgagacgttttcaaagacgctggagcaggccagtgaggcagctgaacttgatatcgtcaagcttttgaagagcgaaaatggcgagttgaatcaaaccagatacgttcagccggcactggcagcttttagcctgggaatctggcatatgctgcagcgtgacctgcccaacttgccggcagctggcatggtcggcttgtcgctgggggaatatccggctttgatggcggctgaatccttggcgatcgatgctggctttgctctgcttaaggatcgtggccaatatatgcagaaagcagcggatgaggttgccagtacgctggcggcagtcattgatccggatatcgaacaggttgaaaaaatctgtgcgcagctgccagatgtctgggttgctaattacaattcaccacgacaactggtgattggcggtactcaagcagggatcaaagaggcggtggaacggttaaacgcaagtcaggcagccaaacgggtaattaagctcaatgtcagtggtgcttttcatacgccgctgtttgacggcgctcgccaacagatgaaagcccgcctgtgcgacgttgagtttagccagccaaaggttccggtgatcagcaatacgatcgtggctccgtttcaagctaaagaaacagcagctattctggaacgtcaactggcggtgccaactcattttggccaggatctgcagtatctgattgagcatcaaaaaattgaaggaacgctggaaattggtcccggcaagacgctcagcaaatttgccaagcaggtcgacgctggcttgaagcgggaacatatcgaaacgtggctggattatgagaactttgtaaaggagcatgtccaatggagctaaccaataaaacggtattgattaccggcagctcaagaggaatcggcgcggcaacggcactggcatttgccaaggcgggcagccgcgtgatcttgaacgcccgtcatgaattgccagcctcactaaagcagcagctggatgagcttggtactgaatattgctttttgccaggtgacgtcagtgatgaacatgtcgtcaaggaattgaccaagaccgcgtgggaaaagtttggcggaattgacgtattgatcaataatgccggcattacgcgggaccgcctgttgattggcatgaagacggcagattttgatgaagtcctgcaggtcaacttgaaaggaccgtttttaatgattcaggcactgcttaaaaagatgtataagcagcgggcaggggtcatcatcaatctggccagcgtcgttggtctgcatggtaatgccggtcaggccaactatgctgccagcaaggcgggaatcattggcctgactaagacggtagccagagaaggcgcgctgcggggaattcgctgcaacgctatcgcaccagggatgatcgccagcgatatgacggctgctatgccgcaaaaagcgcaggaccagattttagcgagcctgcctttaaaacgctttggcgaaccggcagaaattgcgcagacggctttgtttttagcccagaatgattacgtaaccggtcagacgatcgtagttgatggcgggatgacgatttaggagaagcttatgacaagagttgtaattacagggatgggggctgtttccccaaacggcaatggctttgatgagtttgttgagaacactttagctggaaagatcggtatcaagccaatcaccaagtttgacgccgcgccaaccgggattacggtagctggtcagattgatgattttgatcccagcgaggtagttggcaaaaaagcggctcgccggatggatctttattcacaatatgccattcagacggcagctgaagcagttgcgatggccgggatcaatgaagaaaatacggcacctgaagatctgggcgttatctatggctcgggaatcggcggtttgaccacgattcaagagcaggtaatcaaaatgcatgacaaaggtcccaagcgagtttcgccaatgtttgttccaatggcgatcgccaacatggccgcgggcaacattgcgattcgcttcaatgcgcaaaatatctgtacgtcgatcgtaacggcctgtgcaacgggaaccaactcgatcggtgaagcctatcgtcagatcaaggaaggccgcgcgcaggtcatgatcgccggtggctcagaagcttcagtcaatgaaatcgggattgccggttttgctgctttgactgcacttagcacgacgacggatcctttgaaagcttcccggccatttgataaggatcgcaatggctttgtcttaggtgaaggtggcgcggcaatggttttggagagccttgagcatgcgcaaaagcgagacgctcaaatcttaggcgagatcgttggctatggcgcgacgggcgatgcttatcacgttacttctccggatccagcaggccgtggtgcatcaagagccatgcagcaggcaattgacgaggctggaattgctccagaaaaagtcgactacatcaatgctcatggtacggcaactcatgctaatgatgctggcgagtcactggctgtcaatcaggtctttggtaaagacagcaaagtgctggtcagctcaatcaagggcatgaccgggcatctgcttggggcagccggagcaattgaggcggtcgttaccgttgccgcgttgcaaaaaggcgtgctgccgccaaacgttggctgtgagaatcaagatccggcctgtcaggtcaatctggttgatcagaccaatcaaaatcagcctgatgccgaatatgccctgagcaactcatttggctttggtggacataatgccgtattggcttttcgaaaatggaagtgatttttaattggaattaaaagacgttcagcatttaatgaagacgtttgaggcctcagataccagagagcttaagattgatgacggctcgttccatctctatctgagcaagaatcagcaggcaaatgccaaaactgatctaagtccgcagccatcccatgccgagccggtacgttccgtggctgctgcaagcactcagcagatcaaggcgcctttggttgggacggtctatctgcaggccaagccagaacagccagcctacgtcaaggttggcagtcaagttcacaaaggcgatgtcgtctgcattattgaggcaatgaagatgatgacagaggttaaaagcgatcaagacggcattatcagtgcagtcaaggttaaaaatggcgagctggtagaggttgatcagcctttgtttgaagttacggagggttagtcaatgactgaaacgattttggattcgaacgcgattcaaaagatcattcctcatcgctatccgatgctcttgatcgatcgcgtaatcgagttggaaccaggccaaaaagccacggcaattcgcaatgttaccatcaatgaagaagtcttcaacggtcattttccgcaaaatccggttctgccaggtgcactgatcgttgaatcattggcgcagacaggagccgtagcacttttgtcagagcctgaattcgcaggcaagacggcttattttggcggcatcaagtcagctgagtttcgcaaggtcgttcgtcctggcgatacgttaagacttgaagtcgagctggaaaaggttcgcggtcaagttgggctgggcaagggcgtagcaacggttgatggaaaaaaggcctgcaccgcagagcttacctttttgattggctaggtgaaaagcatgttttcgaaagtattagtagccaatcgtggcgagatcgcagtacgaatcatccgctcgctgcgggaactgggcatcaaatcggtggccatctattcaaccgcggatcgcgacagtctgcatgtccagttagccgacgaggccgtttgcgttggcggatcgcggccgcaagactcatacctgaatatgcagaatatcttggcagctgcaatcggtacgggcgctcaggcaattcatcctggctttggctttctttcggaaaatgcagcttttgctgagatgtgtgaagcctgtgggattgtctttatcggaccgaaagcattgacgatcgatctgatgggcaataaggaacatgccagagagcagatgaaaaaaagcggcatcccggtaattcctggcagtgatggctatcttagcaatgttgaaagcgccaagcaggctgccgcagcaatcggttatccggttttattaaaagcagcagcaggcggtggcggtaaggggattcggcgcattgagaatcaagatcagatgcagcaggcgtttgatgaggctcaaagtgaagcacggttgtcgtttaatgatgatcgcatgtatctggaaaagattctggaaaacgtcaagcatattgaggttcaagtcttttgtgacgattttggtcatgccgtctggttcccagaacgtgactgctctttgcagcgcaataagcagaaggtaatcgaagaaagtccatgctcgttgatcagtgaagatgagcggcaatatttaggaaaactggcgcttaaggccgttcaggcgattgactatcgcaataccgggacgctggagtttttgatggatcaagcgcatcatttttactttatggagatgaacacgcggattcaagttgagcacaccgttacggaaatggtaaccggcattgatttggtcaaggctcaggtaatggttgcagctggcgcaaaactgccttttaaacagtccgacatcaagctgcatggtacggcgattgaatgccgcatcaacgctgagaatccgcaaaaaaacttcatgccttcaacggggacgatcaactacctatatctgccagttggcaatctgggcatgcggatcgataccgcgctttatccacaggccaaggtaacgccttattacgactcaatgattgctaaagtgattgcgcttggccatgaccgcaatgaagccattgaaaaattaaaacggctgttaggcgagatggtgattacgggaattacgaccaaccagaattttcatctggcgattctcaacgatcctgaatttttgcgcggaacgatgacgaccaattatcttgagcaggactttatgcctcgttggaaaggagagactcagcagtgaagctttatgtgcagaagaaaaacacgctaagcgaacgccatgttaaggcggatcaaaaggcagatgccaaggttccagatgatctgctgcgcaaatgcccgcagtgtgggctgacgattatgagtcgccagttggactgctacgctgagtgtccacagtgtcattacggttttcgcattggagctcggcagcgcttggcctggctgacagatgagtttgacgagctggacatggatctgcagactaaggatccattggcttttccaggttatcaagataagctgaagaatgctcagaacaagactcagctcaacgatgccgttttgactggcgtggctaggattggcgaccagcaggcagctttaggcatcatggatccaggctttatcatggggtctttaggaacggttgctggtgaaaagattacgcggctgtttgaacatgcaacgcagcaccggctgccggtcatcatggttacggcatctggcggggcccgaatgcaggaaggaattcattctttgatgcagatggctaagatcagcaatgcggttgccgcacatgatcaggctgggctgctttatgcagtcgtcttaaccggaccaacgacgggtggagttacggccagttttgccatgcagggtgatattaccctggctgagccgcacgcattggtaggctttgccggccgacgtgtaattgagcagacaatgcaccaaaagattcctaatgatctgcaggctgctgaaaatctgctgagacacggttttatagattcaatcgttaaacgaacagatgaaaaggcaatgctggaacgcttgcttaagctgggaggtgccatgcgtgtctgaaaaaacggctgttgaaatcgttaaggccgcgcgcagtgaagaaaagatcaccagtgctgaaattttaacgcaattattttctgattttattgaattgcacggtgatcgcagtggaactgatgatccggctattaaaggcggcattgcagactttcacgggcaagcagtgacagtgatcacgactgatcgcggtcaaagtattgaagaacgcatggcctgtcattttggctgtccggaaccgggtggctatcgcaaatcgctgcgcttgatcaaacaggcgcaaaagtttggtcgcccggtcttttgctttgtcaatacaccgggtgcatatcctggccaatcggcagaagaaaatggtcaaggatcggcaattgctcagaatctactggaaatcagcaagctggcgattccaatcatcacggtggtctttggcgaaggcggcagtggcggtgcattggcgctggcttgtggcgatgaggtctggatgcttgaaaacagtacttattcaattctttcgccagaaggattcgcctcgatcttgtggaaagacagctcacgcgcggctgaggcagctgagatcatgcagttgacgccgcaagccttgaaaaagcagggcgtcattgaggggatcattgccgagccagccgatcatcaagccgtcattgccaatttggatgcggttttgacccgcgagctggctgcgctgcagaaactaacgccagctgaactgcttcagcatcgtcagcaacgttttagaaagttttagtgagggaaaacaatggaaggaattttaagcaataagcaaatcgtcgtcatgggcgtggccaacaagcgctcgattgcgtggggatgtgctcaggcgatggaaaaacagggagcaaccgtgatctacacctaccaaaacgaacgtatgaaaaaaagcgtcagtcggttggttggcgatgaaaaacgtttggtcgaatgcgacgttgccaacgacgccagcatccagacggcttttacgacaattaagcagcgattcggcaaagtagatggactggttcatgccattgcctatgccaaaaaagaagaattgagcggctcgattctaaacgtcagtcgtgagggctatgcgctggctcaaaacatttcggcgtattctttgattgctgttgccaaggcagctcatgagcttgacttgctcaacgatcctgccagcattgctactttgacctattttggctcagagcgggcaatttctaactacaacgtcatgggaatcgccaaggcagccttagaagccagcgttcgctatctggcgcgtgacatgggctcgctgggcgtgcgggtaaatgccatctcggctggggcgatgaagactctggcggttaccggaattgacaaccacagtgatcttttgaagatgtcacaggagcggacgactgatgggcagtccgttaccttagaagaaatcggtgggacctgcgcctttttgatgagtgacctgtcaaaaggaattgctggcgacattatttatgtcgataaaggcgttcatttaatctaacttgtaaaaggattcagaactctgaatccttttaatttttgctaaaaacaggaaagttatttaaaaaattaaaaaatggttcggcttttattgattgatcttagcgatttctcattttttagtcaatcaacctaaaaatttatgatataattttgccttgaggtagggagaaagttcgttactgttgacgattgatcaaggtggtgtatttcgtgaagaaagttttaattgccaatcgtggcgaaatagcagttcggatcattcgtgcctgtcatgagctgggcttgaagacggttgctgtttatgccaaggaagatgaatacggcgtccatcgtttccgtgcggatgaggcctatcagattggtgcaggcaaaaagccaattgaggcttatctggatatggatgatattattcgagtcgctaagcagactggtgccgatgcagttcatcctgggtacggttttttagcggaaaatgaagagtttgcgcaaaaatgtgcagacaacggcattatctttatcgggccaaccgttcgtcagctgcagctgtttggcgacaaggttgcggccaaggaagttgcggtcaaggctggcttaaagacgattccgggtacggatgagccggttcagtcaattgatgaagttcgcgaattcgcgcatacgcatggctatccgatcatgatcaaggcagccatgggtggcggcggtcgcgggatgcgaatcgttcacgatgatgatgagcttgatggcgcctacgatcgagcccgcagcgaagccaagcagtcatttggcgatgatgagctttacgttgaaaagtatctgaagaaccctaagcatattgaagtgcagattctagctgaccagcatgggcacgttatgcacctgtttgagcgtgactgctcggttcagcgacggaatcaaaaagtgattgagtttgcgcctagtctggccttaagcgaagaacgacgccaggcaatctgccaggcagccgttaagctgatggaaagcgtgcactatcaaaatgccggtacggttgaattcctggtcacggatgaggacttttactttattgaggtcaacccgcggattcaagttgagcataccgttacggaattgattaccgacgtcgacatcgtacagtcgcagattctgattgctgatggtgccgatctgtatcaggatcttgagctgccggctcaggatcagctgaagtacaacggctatgggattcaatgccgggttacgactgaagatccagaaaacaactttatgccggatactggccgcatcgaaacctatcgttcacctggtgggatgggcgtacggcttgatgggggcaatgcctatgctggggctgtaatcacgccatactttgattccttgctggttaaggcctgcgttcatggtcgaactttcaaatcagcggtccggcgtatgattcgagtgctgcatgagttccagattcgcggcattaagaccaacattccgttcatgctcaacgtcttgcatcatccagtctttgcggctggtcaggcgcatacgacgtttattgatcagacgccagagctgttcgacttcaagcatgaaaagccggatgccgccaagcagctgctgacctatgttggtgacgttaccgttaacggctttaatggcgtcaaggcacgcgaacaggttcatgctgctgaattaaaggcgccaaagatcaatcttgagcgtcataatggactgccaatcgtcaatgccaaggatatcctggatcgtgacggagctgaggcggcaatgaagtgggtcagcgcccaaaagcgggttctgatcactgatacgacgatgcgggacgctcaccagagtctgtttgccacgcggatgcggaccaaagacatgctgctgattgcggacctttacgatcacgccatgccaaacgtcttctcagctgaagtatggggcggggcaacctttgacgtggcctatcgtttcttaggcgaggatccatggcagcggctgaagattctgcgtgaaaagatgccgcataccatgctgcagatgttattgcggggatcgaacgccgttggctacaagaactatcctgacaacgtcttaaagaaattcatcgataagagtgctgaagatggcgttgacgtctttcggatctttgacagtctgaactggatcgaacaaatgcaaaagagcattgaatacgttcggcagactggcaagattgctgaagggacgatgtgctatacgggtgacctgctcagcccagacgagcataaatacacgctggactactacaagacgctggctggtcagctggttgatgctggggctcagatcatcggtatcaaggatatggctggactgctcaagccacaggccgcctatgaactgattggcgaactgaagagcaagtatgacgtaccggttcacctgcatactcatgacacgactggcaatggggttgcaacctacgttcaggctaccaaagccggcgttgacgtggttgacgtggcttccagtgcgctttcgggaacgaccagtcagccaagcatgagcagtttctactatgctttagctggcaatgaacggcagccagaactggatattgaaacggtcgaaaagatcaatgactactgggcacaggtcaagccgctataccaagacttcatgaacggcattacgtcaccacagactgacatctatcaaactgagatgcctggtggccaatactccaacctgcagcagcaggctaagtcgctgggactggatgactttgacgaggtcaaggccaagtatcgtgaggttaacgccctgcttggcgatatcgttaaggttacgccaagttctaaggtagtcggcgatctggccatctttatgattcaaaatggcttgaatgccgaaaacattatcgaacgcggcgaaacgctcgacttcccagaatccgtagtcaacttctttgcaggtgatcttggtcagccatatggcggctttccaaagcagctgcaaaaagtcgtcttaaaggatcacccagcgattacggttcgtcccggcagtctggcccagccagttgactttgatcagatgaccaaggaactggctgcacagctgaaacgccagccaaccgctgaagaagtcatcagctatgtactgtacccagacgtttatcttgattatgtcaagcgcaatcgtcaatatggcaagatcggcgtcctggacacgaatacgttctatcaaggaatgcgcccaggcgaaaagatctacgtcaatctgcggccgggtcgcacggagattcttgagctcaatacggtttctgacatggacgttgacggcaaccgccacctgctgttctccgaaaacggtcagcaactggtcttgacggtcaaggatcagacacacgcagccacggccaaggtcagcgtgccaaaagccgatccgcacgatccaggtcagatcgggatgccgcttaatgggacggtcgttgacgtgatggtcgaaaatggtcaagaagtcaagaagggccagacactggtcgtaaccgaggccatgaagatggaaacgacgatcaaggcctcgtttgacggtaagattgataaagtctatgccaaggccggctcgacgatggaaagccaagacctgctgattcaaatgagtcctttaagctaatacagcttgacagtattaatttataaagcgaggttaaaacagtggaaatttcagaacgcgtaagcaacattcaaccctcagcaacgctggctttgtctggcaaggccaaggcaatgaaggcgcaaggcattgacgtcttgaacctttcaatcggtcagccagacttcaatacgcctaagcacattggacaggctgctattaaggcaattgagtctggcaaggttgatttttacaccgcggcagttggcattgagccgttaagaaaagcaatcgccgataaagaaaacgccgatcatggcacagatttcacggcggataacgtggtagtaatgaatggtgctaaaatgacgctgtacgctctgggacaagcactgtttgatgaaggcgacgaggttttgattcctttgccatactgggtaacctatggcgaacaggttaagctggccggtgccaagccagtcttcgtcaagccagcagctggtcgcctgaccgttgttcctgaagaattggaagccgcgcgaacgcctaagacgaaggccatgatcttaaacacgcccaacaatccatctggtgccgtctacacgcgcgaacaattgcaggcgattggcgactgggccgttgagcatgacgttatcgtgattgccgacgatatctatggcaagctggtatataacgggaccaagtttgtctcgctgctggatctgtcaccagcgatccgtaagcagacgattctggtcaatgggatgtctaagacctactcgatgaccggctggcgcgtcggctatgccattgctgacgagcaggtagtcaagggcttgaagacgttcttgagtcatgcagccggcaacatggcagccgtcagtcaatatgccgctttggcagccattactggtgatcaaacctgtgttgaagaaatgcgcgctacctatgaggaacgcatcaatacgctgtatccgttattaaacgagattccgggctttaagctggatgtaaagccggccggagctttctatgccttccctgacgtcagcgaagccgttaagctggctggttttgcctcgactgatgagtttgtcagcgcgctgctcgatgaggctcacgtggcggttgttccaggcgcggcctttggaatggatgaccatgtacggatcagctatgcaaccagcatggatgtcttaaaagaagcggttcaacgaattcaagcctttatggcagaccaccaaaaataatcgatcaataaccaatgagctcagttctggtttgagctgggctcttattttaaaattcttgtaaccctaaactttaaataagggttacaagctgaaagaaggaataaaatgaaacgtcaaaatatagttcatttaacgcagaccgccttgatgacggcaatcttaatcgttttaggcatgatcccaggcattccgctagggtttattccggtcccaatcgtactgcagaatatgggggtcatgatggccggtgagattttggggcctaaagaaggaacgacctcagtggccttgctcctgctgttagttgcggttggctttcctttcttgaccggcggcagtgggggaattgccgtttttgccggcccaactggaggctaccttttagcctggctgtttgcgccgcttttgatcggtagtctgcggcagcattttggcagtcgctggagctggtggcaggaatttttgatgattgtgctggcgggtgtgctgtttattgatattacgggatcgctttggctcagctggcagtcgcacatcaagctgacggcggcattgatgtccaatctggcatttattcctggcgacctgatcaaagccggcgtggcagtagccgttgctcgtcagctgcggcgcgtaccagcattgaatcttggctagaaaagaggaatcgcaatgggtactaaagatgagctgtttaaaattttcttgcttaatgagcagcaatggatttcaggcagtcagctggcggagcgcttaaagatcagtcgcgaaagcatctggaaaggcgtcgctgccctacgcagacaaggacatcagattgagagtcagcgagcgcttggctatcgatatttaggaacggatcatttggatgcagcggtaatcaagatgcagactcgcgatgagtttaacggcgagattcatacggcatcaagcattgattcaacgcaaaactgggctaagcagtatctcagcagtcatcagcccagccagccagtcgcgtttttagctgatcagcagacggccggctatggcagacgcggccgccagttttattcgccgcaaaagacaggtttgtattttagcttgattttgccgcataatccgatgagcgcgctgcctaaaattggccttttaacaaccggagtcgccgttgcagttggccgagtactgaagcaaacctttcctgatcatgatttttcatataagtgggtcaatgatatctatatgaatggtcacaaagtctgcggtattttgactgaggcaacgctggaactggaatcagcatcatcggcagcattgattgtaggaatcggtattaatctgtcgaccgttgattttccagcagccgtagctcaaaaagccggtagtattgcccctgagcagaccattgatcgaaatcagctggctgccaggcttttggttgcaatcatgaatgtttatagtgagtacgattcgggaaaattcctgccagagtaccgagctcattcattggtcttgaagcggccagtcgtcttaaaaatcggcaatgataaagcagttggcaaggctgtcgacattgacgatcaaggcggcttggtattggaatttgcggatggcacgaaaaagtcgtttatcagcggcgaggtgaccaaggttgatctgccagggatgacgtcataatggaaattcacggtttagatttagatcaggctggccgctgtcggcactatcacttggcagttgatgttgcggccttgaaatgcagtcgttgccaaaaatactatgcctgctatcgatgtcatgatgctttggaaaaccatcatttcatggcttgtgagcgggaaaactggccagtcttatgcggtgtctgcggctgtttgatgcagtttgcacaataccagcagggaagctgtccgcgctgtgggcacgattttaatcccggctgtcgtcgtcactgtcggatttattttaaataaccactttttctcattgctttttaattaaaacaagattagaatataagacgttgattaagaagaaaaataaattaggcccaatgacatgttttaattaagttttaggaaaggatcagtgattaagatgacgctgcgatatacggttttaggtgcaggtgcgatgggattgcgctttggggtgctgctgcaggaaaatgcgggtgcgcaggttgattttgtcgacaactgggcacccgaagttgaaaccatcaaaaaacaaggtggggtctatgtttcccgtgaccatgaaaatcggcatctggttccggtcaatatctattcgccagaagagtatcagggcgagccagacgtttttatcgtttttgccaagcagatgacgctgcaggatcttttggaacgctcggctcatttctttaagccagaaaagcaatacgttttttcaggcatgaatgggatgggtcacgttgaaaaactgaacaagtatttcccaaaagagcatgttttagctgggacctgcctgatcgggactgtgctaaacaaggctggcgacgttgattttattggtaagccaggtgctggatcaatcaatgttgccaatgaaacggaaaagccagatgagcgcacgcatgagatcattgccgactttaaggccgccaatttgaatccgactttgacgaccaacttcttggggactttaatgaccaaggttgtctttaactcagttgtcaacacgatctgcacgctgtttgagattcaaatgggtcagtttattgactatccaggggctgaacggctgagcaaacaattgataaatgaggcctatgacgtgactgaacgagctggcatcaagctgctcaatgatcgcgagaccgaatggaagacggttgaatacgtcagccgcgtcggcaacccactgcactatccttcaatgtatcaagatatgcataatggtcgaaataccgaagtcgactacatcaatggctatatctacgaattaggcaaaaagtacgactatgaagctacgacgcatgactttctgcgcggcttggttcatttggcggaaaatacgcgtaagttccgtcaataaaaagaccgctggatcaaatctggtccagcggtttttgatttgtgttgatctgcagtgtatatgctattgattttcttgatcaaatgtctccagggcttcggcggcttcagtccattgcagctcaacgtcttcgctttgggcttttaaggcatccagctttttttgcagatcggtcagctgggcaatgtcaacggcaatttcaggcttggccatctcagcttcaatcgcggcctgcttggtctccagttcacccatctgattttctaattgatcgacctgccgctgcagtttgcgtcgggcacgctgagtttctttgctttgctgataggaaagctgaccggttgactgtttgactttggtttctggctgtgtctgatgctccagttttgcctgttgggccaggtagtcgtcgtagtttccttcataatgcgtcatgccatgagtcgtcatatataggatatcggtagcaacctggtttaagaaataacggtcgtgcgagataaacagaaccgtgccatcaaattcgttaatggctgtttccaagacttcgcggctgtcgatgtccaagtggttggttggttcatccaggatcaaaaagttgattggcataaatgaaagcttagtcagctccagacgtgccttttcgccacccgaaagcgcgctgaccggtttatagacgtcatcgccaacaaacagaaaactgcccagaagcgagcgaatgtctttttcggaaacttcaggatgatcgtcccagacttcttctaaaacggtcttttcaggatgcagttgctgctgttcctggtcgtagtagccgatttccagattagcgccgaatttgatcgtcccgctgagcttgggaatctttttcaaaagcgtctttaaaagcgttgatttgccaatcccatttggaccgataataccgacgcgctgacctttgcgaaccttaaatgataatggcccagccagcttttgatcctgatagccgatattgagttcatcgacgtctaagacctcgttacccgaagcatggtcactgtggaattgaaaatgaatcgaggaatcatcggtagtcggccgctccaagcgatccattttctcaagctgtttgcggcgagcctgggcgcgtttggtggttgaggctcggacaatgttgcgattgacaaaatcctctagcttggcgatttctttttgctgctgctcgtaatgcttccattcagcctgcagtcgttcgcgcttgtgggctacgaactgcgtatagttgccggtatagtgaatcagcgttttattgtcaagatcgtaaacgtcagtaaccacgcgatctaagaagtagcggtcgtgagaaacgatcaaaagcgcaccttgatagcttttaaggtagtcttccagccagcttaagacgcccatgtccaagtgattggtcggttcgtctagaatcaaaaggttgggtgactgcagcagaatctttgccagggccagcttggttttttgaccgccagaaagtgcattgactgaagtatcatacatatcttcatcaaagccgaaaccatgcagtacgccacgcatctgggacgcgtatccatagccgccctgttttttgaactgctcggataaacggtcatagcttgctaaaacgtcttggtagtccgctgctttgggcgtcagtgttcccaattgattctctagctcatgcagctgtttttccagttcgtgtaaaggagcaaagacgctgtctaattcggcccagattgaattttggctgtcgagtccttgattctgagccaggtagccaatcgtcaggtcgcgggcgtgagtaaccgtgccttcatcaggttcggttaaaccggcaatgattttcaagaaggtcgttttgccggcaccgttgcgtccgaccaatgcagttcggccatgttcttgaatctgcatattcatattatgaaacaaaacatcgctgccaaagcgacgttcaacattattggtttgcagtagcagcataatttaacctcattttttaaagtagatagtcagttaagattgtagcacaagatcagactaggtcgcgagcttgaggataggaccgatcaataatgttaaattttgaattaacgtttaaaaaatgatcgtcattaccagcacattcatgatcagcggatggcctaaatttcacaaatcattaatggacatgcagttaagcctgtagcataatagaaaacatgtttaaataaaaacgattcttttcttggaaaatagttcacaaactttagcggagttgttaaaatgattaaggaataattttcacaaactagaatctgaattggaggaatctattaatggcaacgcgtaaaattccccgtgccacggctaagcggttgccggtctattatcggtatctgaacgttttgcttaacgccaataaacgacgcgtctcatcgactgaattatcagaggcggttaaagttgattcggcaacgattcgacgcgacttttcctattttggcgaattgggcaagcgcggctatggctatgatgtggaaaagcttttgaactttttcaaggggatcttgaatcaagataagctgaccagtgtggctttggtcggggtcggcagtctgggcagcgccttgatgaactataatttccaccaaagcacgaatctgcggatcagtgcagcttttgatcctaaaccagccttagccaataccgttaagagtgggattcctgtctacccggttggcgagatgaaaaagcagctgcaagaacagcagattgatgtcgttattttaacggtacctggcgaaaaatcgcaggccgttactgatgagttggtcgaagcaggggttcatggtattttgaactttacaccggttcgtctgtcagtgccaaaagacgttcaggtacaaaatattgacctgaccaatgaactgcagacgctgatctactttattgaaaataacaatactaaagacagtcaaaaataactcaacgcatggcgagcaatcgtcatgcgtttttttgataaaaagtcaaaaaagttaaaatgccgttagaatggcaactaaagcgttttctataaaataatagtcaaaattggtcaaaataattattgcattttagcaagatcatgatatagtagatcatgtaattagcacttgggtgataagagtgctaaaaaatatctgaattattaatgatgattgatggagggattaacgtgttaaaaccattaggagatcgcgttgttcttaaagcggaacaagctgaagaaaagacggttggcggaattgtcctggctaacaatgccaaggataagccaacgacgggtacggttgtagcagttggcgaaggccgttacctggacaatggtcaaaaagttgctccagccgttaaggaaggggaccgcgtcctgtttgacaagtacgcaggcaatgaagtcgaatacaatggtgaaaagtacctggtcgttcgtgaaaaagacctggttgccatcgttgactaagtagacttgttttcgcattcgatcaatattaatgaggtgaaaatctaaaatggcaaaagaaattaagttttctgaagatgcacgcaaggcaatgctgcgtggggtagacaagctggccaatacggttaagacgacgatcggtcctaagggtcgcaacgttgttttggaacaaagctatggcgcacctacgattactaacgatggggttacgatcgccaagaacattgaattggaagatcactttgagaacatgggtgccaagcttgtttctgaagttgcttccaagaccaatgacaacgccggtgacggtacgacgacggcaaccgttttgacgcaagccatcgttaacgccgggatgaagaacgttgctgccggtgctaacccagttggtattcgtcgcggtatcgacaaggctaccaaggctgccgttgaagaactgcacaagatgagtcatgaagtgcaaagcaaggacgacattgcacaaattgcctccatctctgctgctaaccctgaagttggtgaactgattgccgatgccatggaaaaggtcggcaatgatggcgtaatcacgattgaagacagccgtggcgttgacacgacggttgacgtggttgaagggatgagctttgaccgcggctacatgtctcaatacatggtaaccgacacggacaagatggaatctgatctggacaatccatacattctgatcactgacaagaagattggcaacattcaagacattttgcctttgctgcaggccgtggttcaagaaggccgttcgcttttgatcattgctgacgacattaccggtgaagctctgccaaccttggtattgaacaagattcgcgggacgttcaacgtttgcgcggttaaggcgccaggctttggcgatcgtcgtaaggctcaattgcaggatatcgccattttgactggtggtaccgtaatctctgatgatctgggcatgagcttaaaggatgctacgattgctcaacttggttctgccaacaaggttaccgtaactaaggacaacacgacgattgttgatggcaatggtgctaaggacgcaattgctgaacgagttgaacagatcaagcaggcaattgccaacacgacttctgaattcgacaaagaaaagctgcaagaacgtctggccaagctgtctggtggggttgccgtaatcaaggtcggcgctgctacggaaacggaactcaaggaaaagaagtaccgtgttgaagacgctctgaacgctacgcgggctgccgttcaagaaggattcgtacctggtggtggtactgctttgatcaatgtaatccctgctttggaaaacgttgaaactgaaagcgacgacgaagcaactggtgtcaacatcgttaagaaggcgttggaagccccagttcgtcaaatcgctgaaaatgctggcgttgaaggctcaatcatcgttaaccgtttgaagagcgaaaagccaggcatcggttacaacgctgccgttgacaaatttgaagacatggttgcagccggaatcgttgaccctaccaaggttacgcgttcggcactgcaaaacgctgcttcggtatcagcaatgcttttgactactgaagccgttgttgctgataagccagaaccaaagaatgatcaaccagccgctcctcaacctggtgccggcatgatgtaatcattaataataatgaatcaaagcaccgcgacttttgtcgcggtgcttttttgcgtttaatgcttgcttagtggtattctgttaggtatgtccattcaaaccaatggacgctatcttatttagtggagtatttttatgtcatcaaaaatgcctagccagaaaatgtctttaacatctgtcattttactggctctgaattcattgatcggatccggatggctgtttggtgctggcgaggcggcgaagattgccggaccagcagcggtcatctcttggattttaggggcgatcatcattatggtgattgcttttaattacgttgaactgggggcgatgtttcctgaaagcggcggaatgagtcgctacgctcagtacagtcatggcccgcttttaggtttcgtagcggcttgggccaactgggtctccttgattacactgattcccatcgaagcggtggcttcagtacagtatatgagctcatggccatggagctgggctaattggacgcgcagcttcgtcagtcatggcagcattactaatcaagggctgctggtggtctttgcgtttatgatcgtttttacgctgattaatttctggtcagttaagatcttgacgcattttactggtttgatctcgatttttaagctgctgatgccaaccttgacgatcattgtgttgatgctgagcggctttcacatcagtaatttcgggcaaggcatccatgagtttatgccttatggcagccgctcgatttttgaagcaactacggtagccggaattattttttcttatgatgcctttcagacggttgtcaatctaggtggtgaaatgaaagatccacaaaaaaacatctaccgtggcgttgtaatctcattgacgattacggcagtattgtatattctgctgcagattacctttgtaggggcagttaggccatcactgttaacagcgcacggctggcatggcattgattttgcctcgccatttgcagatctggcaatcttaatgggaatcaactggctgacgattctgctgtatattgatgcgttcgtttcgccatttggaaccggggttgcttttgttaccaatgcttccagaacgctggcggcaatggcacgcggcgatcatttgccggcctggctgggacgacttcagcgacgctatatggtaccacgctttgccatgatcgttaatctgattctggcagcggttttggtctgtattttccgtaattggagcgcgcttgccagcgttatctcggcctcgactctgattgcctatctgactggaccggtagctgcggttgcgcttagaagaattgcacccgatcttaagcggccgtttgagcctcgatctttaaagtggatggcgcctttgtcatttgttttgaccagtctggcgatctattgggcaatgtggccaacgacgattgaggtgatttttgtgatctgtttgggtctgccaatctacgcttattatgagattcgctatcatcatgcttcatggaagacccagctgaaaggctgcggttggctgctgggctacctgttgtttatctcggtgatgtcttatctgggcagcgatggttttggcggtcagaattggattcggtatccatttgattttgtcgtgatcattttgtgctcgctggtattttactggtggggagtcaacagcagtgttgaaggtgaagatcttgaattgggacgacgcgtcaatgctcatgttgatcagtaaaaataattttctaaaactgttgcgtgatcaatctgccctgggtggtattaaccatttacgtggtgtagaataactgttgactttatattttataatagaatagagtgaaggagaaaaagaatatgtggcggtatttaaaacgcgtcctcatcggtaagcccttgaagacgttagatgaaggccaggcccatttgacaaagtttaaagctttggccttgttatcgtcggatgctttatcatccgttgcttatggtactgaacagattacgaccgttttggtaacactgtcggcggcggcaatctggtactcattgccaattgcagcactggttttgattctgttggtggcaattaccctttcctatcggcagattatcaatgcctatcccagtggtggtggtgcctatgtcgtagccaccgaaaactggggccgcgcaggtggcttggttgccggcgggtcgctgctggttgactatatgctgacggttgcggtttcgacgacttctggtacggaagcgattgtttctgcggttccgcagctttataagtattcagtgccgatctcggtgattatcgtcctcgcgattatgattctgaatctgcggggattgagcgacagtgccaatttcttaacggttccggtatacttctttattattatgattaccgcgatgatcatctggggctttttcaatattgccactggtcatctgacctatcatgcaacggcctcgtttggaacgccggttgccggaatgtcggctgtcctgtttattcgggctttttcagccggttcttcctcattgaccggggttgaagctattagtaatgccgtacctaactttaatgaacccaaaaagaagaatgctgctaatactttagcaattatgagtctgattctggcggcattctttggtgggattacgttctttagctactacttcggtatcgtgccaaattcccatgctaccgtgctttcgcagattggttccgtaatctttaatggtcatgggatcggattttatctgctgcagctttctacggcgatgattctggccgtagctgccaataccggtttttcggcctttccgatcctggcttttaatatggccaaagacaagtatctgccacatgcctttatggaccgtggggatcgtttaggttactctaatggaatcattgccttggccattggtgcgattgtaatgattttgatcttccatggtaagaccaatatgctgattccgctgtatgcagttggcgttttcgttccgtttacgctttcgcagtctgggatgatcattcactggttccgacaccggcagggacactggctgggcaagtcgacgatcaacctggttggggcgctgatctcggcatgtttggtggtcttcttgttctggcagcatttcggcaatgtttggccatacctgatcatcatgccggctttgctgtttatgttctacaagatccataatcactatattaaagttggtatgcagctgcgaattgcggaaaaaaccaaagttcagctgcacgattatgatggctcgacggtgattgttctgattggtaacgttacgcgggttaccaaaggcgccatcaactacgcccggtcgattggtgattacgtgattgccatgcacgtctcgtttgatgagaaccctggtaaagaacacaagacggccaatgagtttaaggccgaatatcctgacgtgcggtttgtcgacattcattcctcataccgttcaattgccaaaccgacgctgcgtttcgtcgatgtcgttgccaaaagggctgctgccaagaactattcaacaacggttttggtaccgcagtttattccaaacaagccttggcagatggcactgcataaccagaccagcgtcagattgcgggccgctttgaattcacgcgaaaatatcgtggtttcaagctacaactatcacctgcatgaatagatgagcgggatggttttaagccaatggaaaaattttttaaaaatcggcaatggctatgggcagcgatgggagcaatcggtgtttttctgatttcgagtttttcgattcgtcatcagcattttgtctctgatctgggtggctttttaggctgtctgttactggtcggtgcctatctgggattcaactggtcaaagatcaagcaacacgatgtgaaaaccattgcttccatgaaactgatcttagtcctggtcgcaattttaattgtgttagaagcagtgcagcagctgctgggttaatttgaaagaactggcattgaagcgtcaatgccagttctttttacgttgagtttatgattttattttgacatttgatcaatcagattctagtatgaaaatgttagctggctaacaaaaggagaggcaaatgcactatttagaaaaacaattgcatcagactgccaatcatttgggttggaagtttgaccaatttgctgctgagtacaatttaacgggacagcagctttcgacgatcgattttttggctaatcagccggattggcaaagtacgcagcatgccatcgaagtagaatttaatattaagcgttcaacgacgactaaaatgctgcagcggatggaaaaagcgggactgattgtcagaaagacggccaatcaggatcgccgcagtaaaatcgttgccttgacgccgcatgccaagcaattggctaagacagcgcgccaatatttaataatgcgccagcagcgcttggagaaacggttctcgcctcaggagctggcaatctttgaacaaattttggcatatctgcaggaaaagagtgatgttggtgaaacaaacggaaaaaatcaataaacaggtctatgcggcgatcctggcaacaggattgatgtcgtttagcggcgtgatcgtggaaacggctatgaacataacctttcctactttaatgcgcgaatttgatattgcgacgaatacggttcaatggatgacctcgatctatcttttaatcgtggcaatcatcgtaccgctatcggcagtcttgaagcagtcttttacaaccaaaagcctgtttttatgtgccaaccttttgtttatcattggggccttgattgatgccttagcaggaaattttgcttttctgctgatgggacgggcaattcaagggattgggaccgggattgccctgccgttgatgtttaatatcatattggagcaggtaccgcaaagcaggattggctttatgatgggactggccaatatgattaccggaatcgcaccggcaatcgggccaacttttggcgggattgtcgtcagcagtctgggctggcgctgggtcttttactttttgctgccgttgctgctggtctcattggggctgggaatctggggcattcagcaaaaatcagcgattcagcgtcaaaaaattgatggcatcagttttgctggcattgccatgatgtttaccggcttggtttttggcttcagcaaccttagcagtggtaagctgttcagctggcaggttggcggttcgctattgtttggcctgcttggcttgatgatcttgattgtccgttcgcttagaattgagacgccaatcttgaatctgaacctgtttaagaaccatactttttctggtcatgtgctgggctttttcttaacgcagatcatttcgctgggctttgcctttttattgcctaactatattcaattggtcaatggcaattcagcgctgctggctggaatgctggtcttgccagctggattcgtcggcgcgttttttggcccatttggcggtcgcatgctggataagtatggaccgagcaagccgattctggccggttttgccagctgtgtactctcattgacgatgtttacagtctttagtcgtcatttggataattcattcattatgctgatctatattttttatatgggcggtatggggctctgcatgggctgcgtcatgaccagtgcgttgaacacactgccatttgatgaacgaacgcagggcaatgccattatgaacacgctgcagcaatttgctggtgcaatggggacttcgctttcggcgacggtggtggctcaaagtcagaatcacctgcggattggaactgccaacgccacggcaattggaacccagcatgcgtttgttatgctgttaatttttggactgattgtatggctgagctactttgaatcagttcctaaagcaaactaagccagccagccaaaccaaaacagccttgtcagtgggaaattccatgctggcagggctgttttgcaattattgtttttgatagggcagttcatgaatccgagttggcccttttttgatcgtcaattggtcgttaaaacgctcagtcagctgattcagtagttcctcaatctgggattcgtcaacatagacactgacgattacgctggcgccgtattcttcttcggcaatttccaggtttgcctgtttcaaataataaagcagcgagtcatgcagtgaataggcgacatcaatctttaaaattgcctgctcaacgcgctcaaccaaaccagcctgttcgattgcctgggagactgaattgctgtaagcccggatcaagccgccagctcccagcttaatgccgccaaagtagcgtgttactactgctaagatgttatgcagctgattggccttgagcgcctccagcattggcacgccggcagttccgcttggctcgccattatcactttctcgctgaatctgatcatggtcgccgatcaggtaggcaaagcagttgtgggtcgccttacgatgcagcttattgatcttggcaattgctgcttgggcctgttcttctgattcaacgcgaaacaggctgcagataaagcgagattttttgatgataatctcattggtggtatcttgggcaatggttaaaaatggcgcggtcataaaaattcctctttgttaatttgatttgaatccatgcaatttggcatatggtatcttaagggggctttgaaatgattgaagactattttggccggcgggtcctggtgccaatcgttgacatgccaagtaagccatcagctaaaattgagatcttaccaacgatcaagattgtaaaaaacgtggctgtctgtcagcgatgtggtgccaaaagcaggttgacagatgccgcattgccaaagcatgagtattattgtccagtttgtttgaatctgggacgagttgatacattgagtaaattttaccatgttgccgagccaaatcaatttagtgcaccatatccgcagctgatttggcagggaaaactgtcgccgctgcagtctgaagttgctgaaacggtaacggcgagcatgcagcagcacgaaaagcgtttgatatgggcggtaacgggggccggtaagacggaaatgatgtttaaaggtctggctgatcgtttgcaggcaggtgagcgaattgcttgggcctcgccgcgagttgacgtttgtctggagatttatccccgtttgaacaaggcttttcaaaactgtaagatcgcactgttatacggccacgccaaagaagcctattgctatcggcagctgactgtttgtaccacccaccagctgctgcgcttttatcatgcatttgacaacctgatcattgatgaggtcgatgcatttccgtttgctgccaatccacggctgtttttagcagcgcataatgccgtcaagccaaatggcggcatgatctttttaacggccacgcctggacgagaattgctaaatgcggtcagcagggggcgattggcggtcagctatctgcctttacgctatcatggacatctgctgccaatgcctaaggtcagtctggttataaactggcgccgtcagctgcaggcggggcatctgccgatcagagtcaaacagatgcttttgcatgaggttaaagctcatcagcgttttttgctctttgtaccgcatgtcaaggatctgccgatggttaaaacggctctgcaaaacgacttggcaacgagtgagtttgtgaccgttcatgccagtgatccgctgcgtcaagaaaaggttcaggcgatgcgtgagcaaaaatatctttttttggtgactacctcgattttggagcggggcgttacgtttccaggaatcgatgtgatgattctaggggctgatgatgaagtgttttccgcatcggcactgattcagatggctggacgagctggccgcgccaaagaacgctccactggcaccgtctgctttttcgtgggtgcaatgagtcaacgcgtccgtgaagcattacatcagattgcctatatgaatcaaaagggggcgcggctgcttgctaaaatgcctgctttgcggcgcgacgattgaaagccggccgactttaaaacagctgctgctgccgggaaagctgcctgagccgcgtatctgtccacaatgccgcagtcatctcttgttgcgatcaaacgcgcatccccgtcctggttgtggacgaatactggcgccgaaagaatcgatctgttgggaatgccggcaatggcagcgtcaatatggctggctgctgaataatcacagtctgtatgtctataacggtctgatgcgggagtttatgaaaaaatttaagtttcaaggcgactatggcctgcgttttgtttttcaagagacgtttaatctttttctgcaggaatttgcgtatgatgtcttagtgccgattccaatctcgccgcatacctggaaaacgcgcggctttaatcagacgacggcactgctgacgctgccttataccgaggccttaaaaacgattgcggataataagcaaacacaatcagccaaaacacgggaagaacgtctaaaaacaccacagatttttgaattaacgaatccgcagaaaattgctcatcagcgggtttttactggttgatgacgtgtataccactggtcgcacgctgtatcatgcggccgtactgtgccgacaggctggctgtcagaccgttagcagcgcgacgctagccagttaagattctgtaaacgattacaaattgaatttgtctattagagcaaattcatctataatagaaataggatatgagaagagtggtccttctgatatcaatcagaacaagctttttgcttggactggaaggagatgaatatctgttggcaaatctggcgaacattgcgtaatagcagataaatggcgcaagcaaccaagccattttgaaatagctgcggcagaggctatcgccgtagacagctgcttgaggcaagagcagtcgtcttaggagccattgacaggcagaatcacttgtcggtggtaaacgcagtgaacgtgagtgaatcgcgttaagcgtcaggatttggataacagagaagtgcaatgctaaaattcaatattcgtggtgaaaacgtcgaagttaccgaatcgattcgcgactatgtcatcaagcggatcagcaaactggaaaagttcttcgaagataacgttgaggcaaatgcgcacgttaatctaaaggtctaccctaacaagaccttcaaagttgaagtaacgattccgctcccatacttaacgctacgggcggaagaaacttccagcgacatgtacggcagcattgacttggttaccgacaaactggaacgtcaaatccgtaagtacaagactaaggttaaccgcaagtcccgtgaaaagggctacaagaacatggactttgtacctgatgttgaagacgaaccagtcagtgacgatttaaagatcgtacggaccaagcaaatctccttgaagccaatggacccagaagaagctgtcttacaaatggacatgctgggacatgacttctttgtctttgaagacgctgaaaccaatggtaccagcgttgtataccgtcgtaaggatggtcgctacggtctgattgaaatcaactagtccgtaaatagcggaaaggaatggcatttttagccattccttttttgattgctctgagatcttcatgagatagggcttggttgaacagtttcatgttcatgtcgcttgttccatgttaaaatgggaaatatgaaaataaaatgataatgggttagattgcacttgatgatttaaccttttagaatcattgtaatggaggaaatgacgcttaatggcgaacgtactgaaaaagtggattgaaagcgatcgacgagaactgcgccggattgataagattgccaatcgggtggaaagctacgccgatcaaatgagcaagctgacggatgaacagctgcaggccaaaacgccggaattccgagaacgctatcaaaaaggcgaatcactcgacgacatgctgcccgaagcctttgcggttgctcgtgaggctgccaaacgagttttgggactgtacccttttcacgtccagattatggggggaatcgttcttcacgaaggcaatattgcagaaatgaagactggtgaaggtaaaaccctgaccgctacgatgccggtctacctcaacgcaatctctggcgaaggggtacacgtcatcaccgttaatgaatatctttccaagcgtgacgcgacggaaatgggacagctgtataactggctgggctgctcagttggcgtcaacaactctgagatggaccctgatgaaaagcgcaaagcctaccaatgcgacatcatgtactcaaccaacagtgagattggtttcgactacctgcgtgacaacatggctgtctataaagaagatcaagtgcagcgtggcttgaactttgccattgtcgatgaggttgactcaattttgatcgacgaggcgcggacgccattgattatttccgggccaggtacggggacgtcgaagctttatcagcagaccgatcgtttcgtcaaaaaactgaaaaaagacgttgactacaagattgatttggaatcaaagacggtttcgctgactgatgaagggatcaagaaagctgataagtactttaatctggataacctctacaacccagagaacacggctttgacgcaccacctggatcaagctttgcgggccaactacatcatgctgcgtgacaaggattacgtggtctccaaggataaagaagtcctgatcgttgactcgtttactggacggatcatgcagggtcggcgtttttcagacggtctgcaccaggccattgaagccaaagagcacgtgccgattcaagaagaaaacaagacgatggcgaacatcacttaccaaaacctgttccggatgtacaaaaagcttgccgggatgacggggacggccaagaccgagcaggaagagttccgtgagatctacaacatggaaaccatctcgatcccaaccaaccgtcccgttgcgcggattgacgagccagatctgctctatccaacgttggaaagcaagtttagggcggtcgtcaagcgaatcaaggcgctgcatgaaaaaggccagccagtcttggtcgggacggttgcggtagagacttcggaatatctgtcagcaatgctggacaaagaaaacatcccgcacgtggtcttaaacgctaaaaatcacgccaaggaagctgacattattaaaaatgccggtcaggttggagcggttaccatcgctaccaacatggctggtcgaggaaccgacatcaagctgggaccaggcgtacgtgaactgggcggtttggcggttatcgggactgagcgtcatgaaagtcgccgaatcgacaaccagctgcggggacgctcgggacgtcagggtgatccgggaatctctcagttctatctgtcactggaagacgacttgatgcgtcgctttggtggcgatcgcatcaaggccttcttggaacggatgaaggttgaagacgaagatgccgtgatcaagagtcgtttcttgacgcggcaggttgaatcagctcaaaagcgggttgaaggtaacaactacgactcacgaaagaacgttctgcaatatgatgacgttatgagagagcaacgtgagatcatctataaggagcgtcagcaggtcattactgaggaaaaatccttgaagtgggtcttgatgccgatggttgagcggacgattcagcgagaggttgatcagcatacgcttggcgatcaaaaagactggaaactgcaggaaatcgtcgactttgccgttgaaacgctggtaaagccggatcagatcagcatcaaggatctgcagggcaagtcgcaatcagagatcgtcaagtacttgatgagtctggccaatggcgtttacaaagacaagcagcgtcagctttatgatccagcacagatgcttgaatttgaaaaggtcgttattttgcgggtcgtggactctcattggaccgatcatattgatgtgatggatcagttccgtcagtcggtcgggctgcggggctatggtcagcttaatccgttggtcgagtaccagacggctggctaccacatgtttgaacagatgattgccgatattgaatatgaaacgacgcgtcttttcatgaagtcggaaatcagacacaacgttgaacgataaaaccaaacaggtacggcagcagggcgccaggcacggtaccgctgtcgtatttttgcttattgaaaggatgaatcactttggaactaagtgaagccaagaaaaatttagaagcaatgcaggctgaggttgcacgcttcgggaggtctctttgacctggatgccttaaacgagcgcatcgccgaaaacgagcaccggatgacggatccgaatttttggaacgacaacgaaaccgctcaaaaagttatcaacgagaacaacgatttaaaggccaaacgcgacacctacgtccatttaaaagaacagctggaaaatctgcagacgacgattgagctgctgagcgaagatactgatgatgagctgcagtcagagtttgagcttgattatgcggcaacgcaaaaagagctgcaggagtatcggctgacgcagctgctggatggaccatatgatgacaagaacgcaatcctggaaattcatcccggtgctggtggtaccgaggcccaagactggggtgcaatgctgcttagaatgtatgtccgctgggcggagcggcatggttttgtcgtagagacggccaactatgaagctggcgaagaagccgggattaaaagcgtgagtctgctgatcaaagggcgcaatgcctatgggatgctgcgcagtgaaaaaggcgtgcatcgactggtaagaatctcgccgtttgatgcggccaagcgtcgtcacacctcatttgccagtgttgacgtcatgccggaactggacgacagcgtgcagatcgatattgatccatccgatctgcgggtcgacactttccgttcatcgggtgccggtggtcagcatatcaacaagaccgagtcagccgtccggattactcacttgccgactgggatcgtggtggcctcgcaggctgagcgctcgcagctgcaaaaccggcagacggccatgagcatgctgaagtccaagctttatgaattggaagaagaaaagcaggctaagcagcgtgctgagattgagggcgttcagctagatattggctggggctctcagattcgctcctatatctttcagccttacacgatggtcaaagacaaccgcagcggctatgagactcatgacgtgcagggggtaatggatggcaacctggatccatttatcaatgcctacctgcagtggagattgagcaaaaagaatccgcattaaagcagattgtgatgaaagcgaaaacaaagtaagatagataaagaaaggaaggaaaaatcttgaccagagaacagcgttacaaacaaaagcggcggctgactcgttcggcaagcgatcgctatcttgccggcgtctttggcggcttgggccagtattttaagatcaatcccaaatggctgcgaatcggctatgcggttttgacggttctgacctcaatcgttcccggagttttgatctatctgttgatggcagttatcatgccagcagatccacaacctttcaatttctttgattggctgaatcgggccaagacgcctgaacacaagcaggagccgcggcgagtactgcatgatgttgaagaacatgacgttaaatcaggaaggaaagattaatgggctttttcaagagcgttttgattgatgccgttttgtttattgccttggccggactctttgctcagaccggtatgttttacgtttccagcgttggcgtggcattgttggccagcttggttttagcagtcttgaatgcactggtaaagccatttttgctgctgatttctttaccaatcaacgttttgacgctgggcctttttagtattgtgatcaatggctttatgctgattttgacctcaagcgttgttggcaagagcgtcttttacttttcatcgctggggtcggccatgctgattgccttgattatgtcagtatgcaatacgattattgccaaccactttgtagaaagttaattatcgggaagtgaataaaaatgccagaaagcgtaactgttgaagagttagtcaaaaacgtccgacttaaagtgctgcaaggggaagactatctgcagcgtccaatcgtcaccagcgacatctgccggcctgcattggagtttgccggctattttacccactatccagctgagcgcattcagctgctgggaattacggaaacctcatttgccaaagatatgacgcaggcgcatcggactgaatacatgacaaaaatgtgtatgccgcagacgccatgtttcgtaatctcaacggacctgccgattccaattgaactgtcaaaagctgccgaagcggcccatattccgattttaggtacgcatttgacgtcatcacggattctaagcaatgtgacctcctatctggtgggctgtttagccaagcgtcagtcgctgcatggggtcttggttgatatcaatgggatcggggtcttgattaccggtgattctggggtcggcaaatcagaaacggccttggaactggttcggcgtggtcatcgtctggttgccgatgatcgggttgaagtctatgccagagacgaacagacgctggttggctcagcaccggccattcttgatcacttaatggaaattcgcgggatcgggatcattgacgtgatgaatctgtatggtgccggagccattatggaaagcgacattatcaattttatcgttcacctggagacctggacaccggatgctcagtttgatcgattgggcgatcgcggtgatacgcagacgattcaaggcgtcatcattcctaaagtctcaattccggttaagacagggcggaatctggccatcattatcgaatcggcagcaatgaactaccgggctgaaacgatgggatacgacgctaccaagacctttgatgacaatttaaatcgcttgattcagcaaaattcggcccacgatacgcaggtaaaggaacaaaagcaggaaaatgagcatgattaatacgctcttaagcttagatccaattgcctttcagttggggacaattaaggtccactggtatggtatcattattgcaaccggtgtcgttattgcactgtggctttcaattcgggaaggcaatcgcaagggaatcgatgaagaatatttttacgactatcttttatgggcgctgccaattgctgtgatctgtgcccgcatctactatgttgcatttcaatggccgtattattctaagtttccaggcgagattattgccatctgggacggaggcattgccatctatggtgcaatcctaggtggctttttgacgctgtatttcttttgtcgtgccaagaaaatatccgcttggacgatgctggatatcattgcaccaaccgttatcatggcacaggcaatgggacgctggggaaactttttcaatcaagaggcatttgggaaggttacgactctggcggcattaaaagctcagcatctgccagcctttatcattaatcagatgtatattggcgggcattatcgcgtgccaacgtttttatatgaatcgctatgggatctggcaggctttttgctattggtaagtctgcgtcatcgtccgcatctgttcaagcagggcgaaatctttttgacctacgttatgtggtatgcatttggcagattctttattgaaggaatgcgtacggacagcttgatgctgggacctttgcgaatctcgcaggtcttatcggcagtcctttttatcggcgcattaacggtttggatagcgcggcgccattcaaaacaattaccatggtatgccgcatcgttgaaaggagaaaaataaatgagtaacaaaattgctgttttaggtgctggatcttggggcagtgtgctggccaatcttttagtcggcaataatgaagaggtcatgctttggtcacgcgactcagaacaggtagtcacgatgaaccgctggcacattaaccctcaatacatgaaagacttcaagtactcacctgatttaaaagcaaccgacgatatggaagaagccgttcgggatgctgaatacatcctgatggtaattccaaccaagggactgcgtgaggttgccggcaatcttaataagattctggttaagctggatcaaaagccgcttttgattcatgccactaaaggtctggaacaagaaacctacaagcggccttctcaaatgctggctgaagagattgatgaggatcatcggcaagatattgtcgtcctttcaggtccaagccatgcagaagacgttgccattcaggatatgacggcagttacggctgcctgtgccaatctgacggctgccgagcgtgtccaaaaactgttctccaacaactttttccgggtctacaccaacgatgacgtaattggtgccgaatttggcggagctttaaagaatattatcgcaatcggtgccggtgcgctgcaagggctgggctacaaggacaacgcacgggctgccttaattacgcgtggcctggctgagattcggcggctgggcgtggcatttggcgctaatccgttcacgtttatcggcctttctggtgtcggcgacttagtggttacggcaaccagtaagaactcacgcaactggcgcgctggctatcaactggggcagggccgcccgttggaagatgtcatcagtaacatgggaatggtaattgagggaatctacacggccaaggctgcctacgagctggctcaaaaacgcaatgtcaagatgccgattactgaggcgctttaccgggtgctttatgaaggcgaagacattgaaacggccattaccaatctgatgagtcggaaggctacttcagaaatggaataaataatttgccataagtatggtaaaatgtaagcgtgtaactattctgctatgaagctgaaaggattttttgataatgaaacaagttcgtaaagcaattattcctgcagctggcctggggacgcggtttttaccagctaccaaggccttagctaaggaaatgctgccaatcgttgataagccaacgattcaatttattgttgaagaagcccgcaagtcaggcattcaagatattgttgtcgttgatggcaagaacaagcgctcgattgaagatcactttgactccaacccagagctggaagacaatctgcgcgacaagcacaaggatgagatgctgaagctggttcaagaaaccactgacattaacatttactttattcgtcaatctcacccgcgtggcttgggggatgctgttttgacagcacgcgactttatcggtgacgaaccattcgtcgtaatgcttggcgatgatttgaacaacatcaacaacaacggtacgccattgactaaagagctgatcgacagctatcacgaaactggtgcttcaactctggccgtaatgcgcgtgcctcatgaagatacctctaagtatggtgtgatcaaccctagcaaggaagtcaagccggggcttttcaacgtcacgagctttgtggaaaagccagatccaaaagacgcgccaagtgatctggcaatcattggccgttacgtctttacgccagaaatttttgacgttttggctaagaccaagccaggcaagggtaacgagattcaattgacggatgccatcaacacgctgaacaagacgcagcgggtattcgcccatgaatacaagggtgatcgctatgatgtcggcaacaagtttggctggatcgagaccaacatcgaatatggtctgaaccacccagaagttaaagacgagctgcgtgaatacattaaagagcttggggccaagatgtctgctgaagacaaggctaagaagtaattaaaaaatgggatgctgataaaaagcatcccattttttattaactaacaaaaagtaagcaaaacgatagacaaataatcttaaaccaagtaagatatcattaatcattatttatacggaggaacaacatggcagaagaaaaacaaaccaattatgacgtaatcgtggttggcgctggtcctgctgggatgaccgcggctctgtatgcctcaagagccaacttgtccgttttgatgctggatcgcgggatttatggcggtaatctgaataacacggccgcaattgaaaactaccccggctttaagacggttcagggacctgaactggcacaggatatgtatcaaggggcgacgcagtttggtgcccaatatgcttatggtacggttgaaaaagttgagcttgcaggcgatttgaagcagctgacgaccgacatgggcgacgtctttactgctaaagtattggtaattgcaacgggaactcagcagcggcatatgggagttcctggtgaagaagaatatggcggccgcggcgtatcctactgcgcggtatgcgatggcgccttttttaagaacaagcacgtagtcgtcgttggcgggggcgactcagcagttgaagaggggatgtatctgactcagctggcaaaaaaggtaacggtagtagttcggcgtgaccagctgcgagctcagccactgattcaagaacaggctaagcaaaacgacaagatggaatttatcttcaatactcaggttaccgaagtacttggcgatgataataaggtcgtgggcgttaagacgcatgactccaagactggcaaggatgcggaaatacaagccgatggggtctttatctatgttggcagcgtgccgatgaccgctccgtttaaggatttgggtatcttaaacgagcagggctatgttaagaccaatgatctgatggcaaccagcctaccaggcgtttttgccattggtgacgttcgtgaaacgccgctgcggcagattgcaactgcagttggcgatggcgcgattgccggtcagcagatctatcaatacttgatgaatcattaaaaaaaggatggggtttaacccatcctttttatgttacttgccttccttggcagcttcttgactttcagcgtacttttgcttgatgtagttggctgaagtctgcagtttttccagctcttcgtcagtcagatccagttgaacctgttctaaaataccatcgcggccaactacggcagggtaggaaagataagtgccgtattcctcacgatagttggatactggcagttcagtgtgggcatcggaaagaatcgtgttgaccagacgaacggcagccgttgcaaccccgtagttggtgtacttcttgccacggaaaacggtaaagccgccaactcgggcctcatgatccagactatccaggtccaagccgcgatccttagccagttcagtgattggctgatccaatacgcgaaccgttgaccaggcagtaaattgagagttcccatgttcacccaggttgtagccggtcacggaacgaggatccagatgcagacgctgagcaacggcccgcttcattcgtgccgagtcaagcagcgttcccgtaccgatgacatgattctttggcaggccggtaacttcttgataaattgaagtaatcacgtcaactggattggtaattacgaccatcttgccatggaagccggattctttaatctttcgagcgacttcacggacttgaacgcgcgtaaatggcagttcggcaaagcggtcatcgtctttgttgtcctgcagcttgatattgccgagtgctgaaaccacaacatcggcatctttcaattgcgaatagtcgttaacgaagatgttggtgtggttcttcaggtttggcattgcgtcgtagaagtccaatgcgtcggctttgactttagcttcgtttttgtcaatcagtaccaggtcgtcaacaaagccacaggccacaatataatgagcaactgcggcaccaacgtttcccattccgataacagcaacttttcgactcatacggacatctccctttaaattagaattaaaacttattttttaatgtttttctaatattaacgctattttttataaatgtctatgaaaattttgctgaaaatagcaaagatttcttgatttgaccatgctaagattagaaaaacagatgaaatgattgatacgaaaggatgatttgccttgggatgctatctaatcagcgacttagatcataccctgcttaatgaacagggaaggctgagctcaagaacgattcttacggtcgttaaaagccagctgccgctaatgctggcttcagcgcggatgccgattcaaatgcttgacctgatcaaccagctgcagctgactggaccacagacggctttgaatggcgcggttgtttttcagccggctgttcatgaatttagggttttagagcagcatgcaattccggatcggacggcacaaaagctgcagaacttggttaaaaccgaatttcctgagctaaactttacctggatggatgccgaaagctggcatgtttcaaagcttgaccaacagattgaaacagagattttttatacgggcattcagccgctttttgatgtcaatcagcggccgctaaaaaacgcgctgcagattttgttgattattgaagattcaaaacggctaaaagaggtcaaaaaacggcttatcgcgaactattcaaatgaaattgcaattcatgaggccggcgatggttatttaacgatcaacgccgcagctgtcaataaagggagcgctgctcgctatctgattgagcatgaattggcggactatgatcagctggtcgcatttggtgatgatgaaaatgacctgcccatgctcaaaagcgttgcccatccagttgccatggcaaatgccagtcaaagtgtcaaagaaagcgctgaaataattgctttaagcaatgaagaggatggtatagcccaaattattgaacgaatttcaccaaacaagttctaagtgcggtatacttaagttactgtgatacaggtgattataatttaaggagatgtcattgtgagttggaaagatacctaccagacttggcttgatcgcaaagatctggaaccaagcttgaagcgtcaattggcagcaatgaaggacgaaaaagaaatcgaggatgccttttatggtccgctttcgttcggtacggccggcatgcggggattgatgggccctggtatcaatcggatgaacgtctacacggttcgtcaagctacggaaggcctggctcaattcatggatacgctgggcgatgaaatcaagcagcgcggggttgccatcagctacgattcccgtcataattcacgcttgtttgcccatgatgctgctcgtgtcttgggagcccacaatatcaaggtctacatctatgacaatctgcggccgacccctgagctgtcatttgccgttcgctaccagcatacttatgccggcattatgattacggccagccacaaccctaaggaatacaatggttacaagatctatggcgaagatggcggtcagatgccacctaaggaatctgatttaatgaccagctacatccgcaagattgatgatattttcgacatcaagctggcagatgaacaagcaatgctcaacagtggtctggaaaccatcatgggcgaagatgttgacgctgcctatctggaaaatgccaaaacggtcacgatcaaccatgagctggctaaaaagtatggcaaggaaatgaagtttgtctttacgccattgtgcggtacgggacggatgcttggcgaacgggccctgcgtcaagccggctttaccaactatgaggttgagccgtttgaaggtcagccaaacggagactttcctggtttggaacatcctaacccagaattccctgaagcattcgttcgttcagaaaaactgggcaagcaggtcaatgccgacattctgattgccactgatccggatgccgaccggttgggatgcgcaattcggcagccagatggcgaatacctgctcttgactggtaatcagattgcttcgatcatgctgcactacattttggaagcgcacaagcaggctggaacgctgccagctaatgcagctgcggttaagtcaatcgtttcgactgaatttgccactaagattgctgctgactatggcgttaagatgattaacgttctaactggctttaagtggattgccgatcagattcaccaatacgaaaccaagcacaaccacacgtttatgttcggttttgaagaaagttttggctacctgatcaagccattcgttcgcgacaaggatgccatccaaactctgacgctgctggcagaagtggctgcctactaccggagccgcaacatgacgctgtacgacggtctgcaggaattgttccaaaagtacggctacttccaagaaaagacgattgccaatacctatgccggtgttgaaggtccaaccaagatcaagaatctgatgaagaagttccgtgaagaagcgccaacgcattttgctggtcaacaggttgcggtaacggaagacttttccaacaataccaagacgctggctgacggtacggttgaagagctgggaattcctgaatcgaacgtattgcgctacgttttggctgatggtacctggattgccattcgtccttccggtacggaaccaaaactcaagtactacattggtacgagtgctgatacgctggcgggcgccaagcagaaactggctgactttgaaaaggcactgcaagaatttgctgaagcctagctaagctgaaaacgacttgcgggaaaccacaagccgttttttctattaatatgaaagcaggtgatcagatgggaatgcacgagtatttaaaaagtttaagcgatcttgagatgatcaatcgtgcgccgggatactttaagtttgagcagcataacgtagcagcgcattcatttaaggttacgcaagcagcacagatgctgggcgatattgaagaacaatccggcaatgaggttgattggcgctcgctttatgaaaaggccttgaaccatgattatacagaacgttttatcggcgacatcaagacgccagtgaagtatgccacgcctgagctgcgcgaaatgctggccaaggttgacgactctttgacggacaattttatcgaaaccgagattccgccagagtttcgccaggcttatcgtcgtcggttcagtgaaggcaaggatgacagcttggaagggcggattctgtcggtagccgacaagattgatctgatgtatgaatcgtttggcgagattcaaaagggcaatcctgagccggtctacatggatatctatcgctctagtctggagtcgatcatggagttccatgagatggccagcgtaaagtacttcttaaaaaagattctgccagagcttttaaaagacaatgccgggacacaaagccaaacccaattggctgtgattactacgcagataattcagcgctgatcaaaaaagattctgctgagcaggcagaatctttttttagtggattaatctgaatggtaccagcaattggacgtgtcgctgactggtcgttaaagagctgaatgaatctacggataacaacgcattaaaaagacttttttgagctgggatcagcagataaggccaggctgcctgcaaacttgtcataactggcgatgctgaaacaatctcgctaaaccagcgatgagccagggcaaatgcgatatcgtttagggcagcggcgaagttctggacgtcattgatatgagccagatcagcgtcttggttcagaatttcatgatcatgcgccagatcgcgagccagggcaatcaatggaacgattcccgtctgcagcagaaaatagtcctgctcgtcatgtgattgaccataataaagctgcagcgtctgccaaggctgctgagtgccaataacgtcaagcagcgcggccacgactgcttttgtctgaactacggtttgatcagaccgatcacgcgtcgaattagcatagctggtcagcaattgattggcaaatctggttgagccagcgaatcttttaggatcagtcatgaattcttcggtaaatgaagggatcgaatgatgaatcctttgagccgcaatgcgactgcgctgttcgtcaaaagcagtgaaggtatcaagtcccaggggtgagtaaaaaaattcggtctcgcctggtttgagcggtgaagatgaaaaagtttttaaaatgtagtcatgaactggatcgctggagaattcctgcaacagctgtttaaacaattcatctggaatcatacgcgccatcctttctaatctggatcttcgccagctagatcagcatccagcgacattgccatgataactcggccgtgcagattccaatagtcggcacgggtcggaaagtcgtcttgaagcgtccaccgttcaaaatggcgatctggctgtaaaaacaaggtatcactggcagctgcctcgccttgatcgggctgttcggtcatttccaacgctaaggcatggaacagagtaaagacccattgatcaaactgatggtagttggttgaaaaaagatcgttggcagaaaagttgaaagccgtctccattgaatgtgctaagtggtacagtggtgcaaaaccagcagtaaacatctggtagtcatgatgcattggatcggtgccaaaaaagcacagcagggcatgatccaatgaagtcgtgcctacatgatccagcagctgggcactgactcgccagatatgaatcggctgaccagtcagctcctccatccagcgcgtggcctgaaccgttgagtagcgatagtcgttttcattgaaatcctggctaaagctttgggaaaatgccagctgctgaagattttcgggaatgccggctttttgctgtgccaatcgggaacgctcattcaatttcagccgcgcacgatcataggcagtaatcgttgctttagtggggcgaaaaataaattcggtccgccccggttctaaaagcggtgagcgaaaaaatcccgtcagataattggtatgctgattgaagcgataggtaagatattcacgttctagtcctttacacatagctggcgtaacaaacatgccaaacatcctttccgatagactgataagataactaattctttcacgtttttcgcggtttgacaaataaatgcaatttgcgcgtcaatcacctataatttaagaaaacgctacctcaaggaggaattggaatggataagccaacgcgtcgtcggattgatggccagatcttattatcagggctggctaattttgccatgtttgtcggcggtttttgtctggccggcaagcatatgggctggatggcggttatgctgctgatctatttagcagctaccggactgcagttttatctaatgggtaaattagccgttgaacagcgtcacgatgattgaaagtgcactatactggatgaaagaataatttaaaaaggagtcctttgccaatgattttgacttttgccgtcaatggcacgctattggatgaaacgccattttttgaaaaattaaaagcacttgctgaagaaccaaaactggatgcagaacaggtggcttttgcctatcgtttttatcaggcccgtctgcagtatggccaggcctatcaagatgccaagacgattttaaaacagaccttgatgctgatggatgttcagtttaatgatcggggctggtttgctcgtcactatgaagaactgctggctgcccaaaaagaactgtcgccatttgatgatgcgttaaaagcgctgccgctgctcaagcgccacaataagctatatgcagttgccaacactgacaatgatattgc

SEQ ID NO: 1838 - DNA, 217567 bp, Unknown
  gut microbiota DNA sequence
aattaaagagatttatgatattgatcaattttaaacagctcgatcgtaatggtcgggctgttatttatatagtagaaaaaatttaaaaatcgtggcggcagctggctcgcaaaaaattttttaaagcttgatccaatcataactgtcacgttttactcggtgcaaaattcttgtcaagccttgatatatcaatgattagcaactaagatagtctttggctctttttggaagtgatgggatttttatcatatatccagaaaaaattagggcgatttttgagcgtatcaaacgataaattagcgttaaattatacattgaattcagttcgatatgcgattcatgtcaaatcaagaattgagttttaacatgcttttgatcgccttaacgtacgattatgaaatctattttataaccttgatctgcaataacaaatcgccgactacaacatatagtgatgtaaaagtcaagggttaactagatgttgtgttttgcgttaatatagatcatgttaattaagagggggacgatggctatgaaactgcagacggaaaaaaacaccgggctaaagagtctggctgatttgaaagttatcaaacgcgatgggactgaaacgcccttttatgcctataagctgaacttgatctttaagtcacttgacgcggattgggcaacgcaacaatccgtctgccaagctttgtcacaggcctttaaggatcaagcaagcgccacgaccgttgagatcgctgaaacttttgttgatggactgcgccaggcgggtcatgatgatctggccacgcgctacattgaataccgcaaacaggatgaagaagcctttgccgaggccactaatccgatgaacaagctccatcagctgtttggccgcgattcccatatcgtgcacgaaaatgccaacaaggattcgcgcgtctttaacacgcagcgggacctggaagccggcgtggtcagtcgggcactgggcttaaagatgctgccggaagtcgttgccaaggctcatttgcgcggcgacatccactggcacgaccttgactactcgccagtaatgccagaaaccaactgctgtctgatcgactttgacgaaatgtttaaaaacggctttaagattggcaatgcctgggtttcatcgccacgttccattcaaacggcgacggctcagatgtcacagatcattgccaacgtggcctcactgcagtatggcggctgttcggccaaccggattgaccagctgttggagccatatgccaagcttaactatgaaaagcacatgaaagatgccaaggaatgggtggcaccagacaagcaggaagcctacgccaaggccaagaccaaaaaagacatctatgacgcgatgcaggctctggaatatgagatcaacacgctctactccagtcaagggcagacgccatttacgacgatcaactttggtttgggaacttcctggatctgccgtgagattcaaaaagcaattttacagattcgcatcaaggggctgggcaaggaacatcggacagcgatcttcccaaagctgatctttactttaaagcgcggtctgaacctcaagccaggcgatcccaactacgatatcaaacagttggcgctggaatgctcgactaagcggatgtaccctgacctgctgatgtatgacaagatcaaggagattacgggctcattcaagacgccaatgggttgccggtcgtttttacagggctggaaagatgaaaatggcaaagaggtcaactctggccggatgaatctgggcgtggttacggtcaacctgccccgaatcgccttggaggcccatggcgacaagcagctgttctggcagatctttgatgaaaagatgaatattgccaagatcgcgctggactaccggatcaagcggactaaggaagctaagccggaaaacgcgccgctgctttacatgtatggtgcgtttggcaagcggctgaagaaagacgacagcgttgatgaggtcttcaagaacagccgtgcgaccgtatcattgggctacattggtctgtatgaggtctgctcaacgttctacggtccaaagtgggaacacaacaaagaagctcacgactttgcggtttcgatcgtcaaacagatgcatgacctttgtgcgcaatgggaaaaagaagaaggctaccacttcagcgtctactccacgccagccgagtctttgacggacacgttctgccgggatgacgaaaagaagtttggcctggttgaagacgtcactgataaggaatactacaccaacagcttccactatgacgtccgcaagcatccgacgccgtttgaaaagctgacgtttgaagaagacttccctcagtacgcggcgggcggtttcattcactactgcgaatatccaaacctgcgtcagaatcctaaggcactggaagccgtttgggactgggcatacgatcatgtcggctatctgggtaccaacacctcaatcgaccaatgcttcaagtgcggctttaaaggcgagttcaaggccacggcgcgcggtttcaagtgtccacaatgcggcaacaccgatcccgcaacctgtgacgtggttaagcggacctgcggctaccttggcaatccgcaggcacggccaatggttcacggtcgtcacgaagaaatcattcaccgggccaagcatatggatcccggcatgatcaagacggccgctgaattccaacggagccggcagctggatgacaaggcacacgccaacatcaccggcgatcagatctagcaggctgccaggttctggtttagtatctgaatcagccaagacactcagcttggctttaggcaaagtgctgaagctgcgtttaagaaaatgaaagtgctgaagttgcgtcttataaaacgcggcgactggttcaatgatcagcatggctggaaaatattgctgacttaaaatgaagccacattaagcatcggcgtttcaatcaaaattaaacaactcgtgaataccgctaagggtccgcattcggctagaccgaacgtcgggcctttattgctttagaaaggaagatatacatggcaaaagaacgtccaatcagactccccaagaatcctaagcccaaggaatggctagctgaggatcattccttacaatacattgctgactacaagccatttaactttgtcgatggtgaaggggtgcgctgcagtctttacgtcagcggctgcctgttcaactgtcctggctgctataacaaggctgcgcaaaactttcactatggtcagccctattcacaggaactggaagatcagatcatcgaagacttggatcatgactatgttcaaggactgacgctgttgggcggggaaccattcttgaacacccaggtctgcttaaagatcatcaagcgtgtgcgcaaggagtttggtcacactaaagacatctggtcatggtcgggctacacctgggaagagctgcagcaggaatcatatgacaaactggaaatgctgagcctgatcgatattttggttgacggccgctttttagaagggcaaaaggatttgacgctgcagtttcgtggcagtgccaaccagcgcatcatcgacgtgcagaaatcattaaaagccaaccaagtcgttatctgggataagctggttcactagaaaagaggccatcatgacactaaaaatcaatcatctgcatgccattatcaaagaaaccggcgaagaaatcttaaaaggcgttgatctaacggtgccaaccggtgagattcatgccatcatgggtcccaatggcacgggaaagtcaacgctgtcagaaacgatcatgggctatccggcctatgaggttacgcaaggtacggtagagtttgatggtcaagacgtcttgagtctgccagtcaacgaacgcgccagactgggaatgtttttggggatgcagtatccggccgagattcaaggagtcaacaatgctgattttattcgcacggcaatcaatgctcagcgtcctgaagatgatccattgccagtgctgcagtttatccaacgcctgcaggaaaacatggcgctgctggaaatgcccgatgatattaccgatcgttatttaaacgtaggcttttccggtggggagaagaagcgcaatgaggttttgcagatgctgatgctgcagcctaaactggcaattttagatgagatcgactcgggactggatattgacgcgctgcgaatcgtggctaaagggatcaatcatctgcgcggtcccaaattcagtgcgttattgattactcattatgagcggctgctggagtacgttacgccagacaagattcacgtcatggtggatggtcagatcgtcaagacggcgggaccggaactggctgacgagctggaagcagacggctatgccaagtatgaacaaatcagaagaaatggcgtgagcgaatgaatcaacaacttttaagtcaagtgatggccagctgtgtgaatgcaccagactggctgatgaaaaaaagacagttggcggttttgctgcaagaacggttcaaaagcacgccagccgcggaaaaaatcatggctgcctggctggaaaatcccagtctcgcccagtttgagcaagcagctgatgagcaggcagatgctgatcaagttaaagctgccgtcccgtccacgactggctgggttaatctgcctttgtttaccgctgcaaatgcctatcccgaattgctacaggaaaatctgatggaaaaggcgatctcatggcaggacagtcagctcaatgccatgcacctagccttgctgaatggcggccgtttcatctatattccagatggcacgatcataaaagagcccattgaactgaccgttgactgtccattgccgaactatcataatctggtgatcgtcggtgccggcgctcaagcaaccattgtcgagcaccaaaccgccacgagcagacagccggcttattttggtacggaactgcttttaggcgatggcgcacgggttgactattatcagtccaatcgtttttcggccgcgcagaatcaccaggcagtcagagcctatcaagcacagcattcagttttgaatatgtatctggccttgtttgatgagcatgatttgacgactgacttttatgccaatctggatggtcaaggcggagaagccgagatcaaaatggtcacgattgccagtggtcagcaggttcaagacgttcagacgcagattcttaatcatggtccgcatacggtcggtaatatcgtccaaaacggcgtggctaaggacaaggacaaggcggttttaaattttcatgcggttggcaaaaccgagcgcggggcatatggcgccaactcgcaacagcagagtcgcattctgacgctttctgatgagtgcaaaggcgaggcggatcccgtgctgctgattgaagaaaatgacgttaatgccgggcacgctgccagtatcggcaaagttgacgcggatgatctctattatctggaatcacgcggtctcagtgagcatgacgcgcaggtattgctgacgcggggctttttactgccggttttaaatcagttccccgatcaaaagctgcgggaaaatctggttgatgagctggcgcaaagattggaggaaaagcatgagtgatcaagcaagccaacaggcagcagacaaggcagcgattcatgaatttgccagccagcactatcagtttggctttcatgatgacgtcaagccgatcttttcaacgggagtcgggctgacggaagaaacggttcgggaaatctcgcgccgcaagcatgagccggactggatgctgaagattcgtctggatgcctaccatcaatatcgtcaaatgaagctgccgacttttggacctgatctgagtcagctgaatctggatgagctgcgctatttccaacggccaaccgatcacgtagcgcgcagctgggatgacgtgccccaagcgatgaaaacgacttttgaaaagatgggcgttcccgaagccgagcgtaaatatctggcgggggcaacggcacaatatgaatcggaggttgtttatgccaatctaaagcgggatctttcccgtcaaggaatcattttcatggatacggatacggccgttcaaaaacatcccgaaatcgtcaaacagtatttcgcgacgctggttcatcccgatgataatatttttgcggcactgaatacggcggtctggtcgggcggtacgtttatctatgtaccaaagggcgtgcatgcagatgcgccgctgcagagcttttttagaatcaatgccgaaaatacggggcagtttgagcggacgctgatcgtggttgaggatggcgcaagcgttaactatgtcgaaggctgcacggcaccagtctattctgaagacagtctgcacgcggccgtggttgaggtgtttgtacatcccaatgccttttgccgctatacgacgattcaaaactggtctagcaacgtctacagcctggaaaccaaacgtgctgaagctgaagccggggctacgatggaatgggttgacggcaatctgggttccaaagtcacgatgaagtatcccagcatctatctgcgggggcgtgaagctaagggaaccatgctgtcgattgcatttgccaatggtccgattgatcaggataccggtgcccgcatgattcatcaggctccgcacacgcattcaacgataatttccaaatcactgtgtcgggcaggcggcatctgtgactatcgcggcgaggtcaagatggatgaaaacgcgcacggctcaagctcgcatgttgaatgtgacacgattatcatggatgacgattcaagttcagatacgattccatataataaagtcgcggtcggggacgtaacgatggagcacgaggctaaagtatccaaagtttctgaagaagaactctactatttaatgtcgcgtggactgagcgaagaagaagcaaccaaaatgatcgtcatgggttttattgaaccgttcaccaagcagctgccgatggaatacgcggtggaattgaatcgtttgattgattttcaaatggaaggctcggtcggctgatttttggaacggaagcattttgcgtagccgaaatttcaacctggcttgtcaagttatcctgcatcagcaaaaaaacgcggagcttggttacccagattctaagattgaagcgataatttgagcttggcaaggtagccgttgaattatcagttaagctgtttgatgggaaataacagtgaattagcaccaaaaatgccgatcaaagattacaaaattgtcacaaaaagggtcataaattcctaaattttaggatttatgctctttttttatgaaaaataaaaatttttttactctaaaatattacaaaatcagctatttttcggtcgcaatgaaaacagaacgatacaagactattataatgcgatttataacaagtttaggtcagcctaaaacactaaatgaaagcggattacattacacgcttttacagaattcacgatttttgagatattccggtaattgcacggtaaagctgaggggttatagtattcaccgttgataaagataaagagcaaaaaacctgaactacagataaaaaaggatgaatctattttatgaaaatttcaaagaaagctgttaaaatctctgctgccgttgctggtgccgtagctttgggcacggttggcacggcaattactgccaatgctgacacggtttacacggttcagtccggcgacacgctgtctggaatttccgctaagctgggtcacaacttagactttgtagatcaattggcatccaagaataacattgctaacaagaacctgatctatgttggtcaaaaactggttatctctgacgatggcgaagtatcctcagcaacttcagaacaagctgctacgttgccaagtgctacggctgaaaacacggctacggcacaagacagcacggcgcaatctgctgacagtgctgctcaatcaacggctgctgataccagtgctgaacaagctgccagtgacgctgctgcttctcaagctgccgcatcccaagccgctgcttctcaagctgctgctgcccaggcccaagctgctcaacgacaaagtgcgcaagttcaagcaactacttacagtgccaacacttacagcactaacacgacgaccacgacctacacttctacggtcagtggtgatgaagcgtctgctaaggcttggattgccaacaaagaatctggtggcagctacaccgcacaaaatggtcaatactacggtaagtaccaactgagttcttcttacttgcatggcgactactcagctgaaaaccaggaaaaggttgctgacagttacgttaccaatcgttacggctcatggacggctgcccaacaattctggcagactcatggctggtactaaaaatcagcttaactaaattagataaaatgaacagcaatggcgattttcggccattgacccgtacccccaaagttggaaacacaactttgggggtatttttatgatatatgagagaaatgggacggtttgatagattagggcgacagatgacagtgagttggacgctgctgcaaaaagatagggaattgatctaggggtggatgccgctttgaagcgaattgatttgacataggactgggcactgttttgaatcggcaaggcggttttagctttgaaatggcaagcgggtttgattttgaatctacaggcgggttagctaggacagatttagatagccaaaatgcttgaatggtttgttaaattataaggaagcaattattcaaagcagatgtgcgggcaatttctagtagtgttagaataagacgcagataaaattgagaagagggatttgtgatgattgcaatcaactgtcaacaaacacgaattgaaacaacgcatcggattttgaatggtgacttgaatgagcatgggacgctgtttggcggtcgcctgttggaagccgtggatgcagaggcttcagtcgcggcaatgagggttgcaagggctactttggtcacggcagccatggatcacgttcaattcgtcaagccgtttcacctgcaggatgccatgattgtcagagcagtggttactggactgggacatcggtcagttgaggtattcgtaaaagttttgggcgagcacttgatgactggcgagcgtttcgttggctttacctgctttttgacctacgtggtaccggcagcgggggcaggattggtttacgatgaattaattgccgataatgatgaaaccaaatatctgctggctggctatcaagatcgtcgtgcgcagcgggccacggttcggcagcaagagcgcgatttgttggctcatttgagttgcgaatagacaggtacgtttactagcagtctgggaatcgttgagacgtcggcggatttactagcggttcgagaactattaagatgttggcgggaggtatcggtatctcacgcaaaaacatcatagctgcggttgtgatattgtcgtgcgatcgattacggtaatggacggtcagctcattagtgatgataaatgctccagatgcgacttttatgcaaaaaaacttgtataaaacgtccaatgaaaaactcattacctacttttagcaaaaagctgctataagtaggtaaaaatcgatgtatattgagttaagtgtccctaacattacctactattgatcgaaaatatcataatagtaggtaattcacaaaggcggtctaacccaatcagacttcaaatatacatctttacctactatttagaaaaaaagcgaatagtaggtagtctagagctcacagccagattaagcccgattttcttcacaaagtcagctgcttagcggtgaaaaaatggttgccgactgagtccgtagcagctggcagtggaaaatactcgtgctggccagtgggggatgcttgtttgaatctactgaatttttaaaatattgttgaatgaaaaagagacatcctgctgttcaaacaagatgtctcttttcttttttacttagaagaatccagaatatggcttttggcaaactgattgatgcagccaattaataagcgtaatgaaatcaaagaccggtcgcttgactgctgcttgaatggctgcagcatatggcggcagatcactgcattccaataagatagcaccgacttcgggatgatcagcaactaccgattgagctttttgcattaagactttagtcagcgctccgttatcaagaacggtttgtccatagcgaatcgcgtgaaattcgggtagactgccaacgtcgacaaaaattacgttatgatcatcagcgttgacattgtccaacagcttttgatcggcaccgttaatatcagcgaccaggacgacgattttttgatcggctcgcaggctgagtgaaattaatggcagttgcgcaagactggagagaataaccggaacccgcacacttgcctgaacctgatgctggaaattggcaaagtagccgcacgcgccaacgattgctttaacccctcttgcttcgagtcgtttggctgcattgacgatcacatcaattgcagcaggatcattttcgaaaagctgttcaatttcaagatcgattacttcatagtcaacgggaaaggtaaaggttgtggcattggcgacattccctggaagttttggataatcgagattaactgcaataataccgattgcgttgccagctatgggactgacgttgggtgagacagattgattctgattgttaaagctaatgtagccatatggatcagccattgttctgctccttaaagttgccattttccaagtagtctaataattcttctttattaagatgagcgatacctaactcatccagggtgacaccagtttggtaaaaatcagtgccaaccattgcggaacctaatgtaataatgctgtcaattactggcgttgcgacaccgaatttcttgcccaattcatgataaacgtggcagccgacaggaatgtcttcggtgacataacgatcatgaatgctgaaaggaccggtaccaaaggccattggaaactggtcgtcaaaaggcgcctcagccccatcacccatatattcaggccccaaaatatttgagcgtgagaagaaggtcttttttggataacgagcaatgtcaacgccaattgtctcagccagttcaatttcttctttgtaaaaggcatattggacttcagagacggactccgtataaacatgagagtaaatggaaaagtcgctcttgtcgttgccaccaaagacgcgtccatagttttccattacggcagcgcccagaatcgtaccaggacagtgcagggtcggattaacgttgctaaagccaatgtcaaggactgtcttgccgccaaccggaccatctccaaacgtaatcgaatcaaaacagccaatgtgctgagtactttccaggaatttttcttgatcagtcgaaggcagagccgctccccgcaaagagattgctcggtaacggaagaatacccgtttagtgtcgatgccggcttctttaacaatccgcgtaccatatggcgcacttgaccagccaccaatgattacgttgagttcgggacgtttttctcgcaactgtttgcgtaaccgtagactgccaaagttgtcagggatgatatggataatctggccgtcttctagtagtggcaccaatcgttcaaagaaagcgttgtggccaactgaaggaacggcaactaaaataatctgtgcgccggtaacaacttcttttaaatcatcggaaacaagatcgaacttggcaatcccgctgcgtttaaagttatagcggttatattcaaagccttgaatctcaataccggttttatcgatgtcttttaacgattctttggcaaattctggtaaatcaaacaatcggacgtgattgccagccagcttacagtcagcggcgacagaacggccaaccgctccagctcctaaaacagcaatagtatatttggataagttttgtgctaccatttgaattccccttttcttaagaaacaaaaacgcccctagcaatgcacttagtcactgctaggggcgtgttatacgcgttaccaccctaaattcgataaagaattactcctttatcctcagctggtgcctccaaataggagagaccagaacggaatatcgaccgttgaccggaaactgctcaccacaagctcacagtttctaagactcagagaccatcttcattaagtattcgccaacggttttcaccaaccaccgtctctctaaaggcatccgcttaattactcatctcttcagcgtcattaattaatttttcataattctataatgctaaattaattatgtcaacgggaatttaaaaaaacagaatcatgattcaagacgttgacaaaaatgtgaggcttactgttagtaatattcggcagtgagtagcacgttcaaagaagcaaattaatcaaaaattcaagaaaaaaccgtaatttgagggctgaaatcttcaaatttacggtttttttattacagattgcgggacccctaactttttgagtgaaacattgatgaaaacaaagccagacgctaacgataacgttttcgacacacattgtttagaattgatgaaaccggcttacattacgaaacattacgaaaatagcggaatttgatatttgcgattaacccacgtgtaacgttgaacctgtatagtagtcaccgttgataaacaagcaagatcaaagcaaacgaaaaaggatggatttaaccaatatgaattttaacaagaaagctatgaagattaccgcagccgttgctggtgccgttgcattgggcacggtgggagcagcaactacggccaacgccgacacgacctacacggtacaagccggcgacacgctttccagcatttcatacaagttgggtcgcaacctggactttgttgaccaacttgcccaaaacaacaacatcgccgacaagaacctgatcttcgttggtcaacagttgacgatcaaagacgatggtgaagtcgtagtcaacgatcaaaatggtcaacagactgcggtcgcccaagttcaaactcagccagctgctcaaacgactgctgctgcgcaatcagctgccagccaagcaccagtaagtacgcaatcaacgtacacttccgctgttgctggtagtgatgccgctgctaaggcttggatcgctgctcgtgaatctggtggcagctacaccgcgcaaaacggtcagtactacggtaagtaccaactgagttcttcttacctgaatggcgactactcagctgccaaccaagaacgcgtggctgataattacgttgccagtcgttacggttcttggacggctgctcaacaattctggcaaggtcacggctggtactaaaatccagcttggcaatgccaaatcatccctgatcatttgatttcccaaaaaaacgatctcaaacaataaacatatttccttaccaaaagaagcggccgcgttttgcgcgtcgctttttttgtggcgagagcgaatgcctaaatgaatttatcgaagactggggcttttagaaggtgccttaagatactaaccgccaaacccaaccttgcttagttttggtacaatctaagaaaacgattattaatgaggaaaccatgctaaccatttatgacctaaaaaacaaaccatgctgacacagccgaattctttgatctgacgatggcttatgataccttaagcggcgtatcgtttgtcggttcgtttaagattattgaacaagagctgttgccgtgctttaagcagattaagcagatcttgggaatggaggatcaaaatgataaaactaatcgcggttgatattgatggcacgctgcttaatgatcaaggccagattctgccggcgacgattcaagccgtccaacaggcagccgcagccgggcaaaaaatcgtgctgtgtaccggccggccgctttgtggagtgacggattatcttatcttaagcagctcggactttggcagcacgcggatcagtacgtaatcagctataatggctcgctgattcagacgacgacccaaacaaccctgatgagtcaccagctgcagtttagtgactatcttgatctgctagaacttgctcaccaaaatcaagccgcgttcagtctgttgacgcctgcgtgcatgtacgtcacgcctggcgatcaaaaccgcgtcatcttaaaagaggcggcaacggttaagattgagctgcagacgtgtacgctggcagaaatgcgtgctttgccaaatctaataccagtcaagggcatgatcttggatgaaccggccaaactggattacctgcaaacagtcatgccaaaagcctttaagcagcgctttacggttctgcgcagtcaaaaagaccacctggagtttacgcatcctttagccagtaaggaatccgcgctgaggcagctggccggtctgctaaagattgagccgactgcaacgatggcaattggtgatgagcaaaatgatctgggaatgataaaagcagctggaattggggtggcgatgggcaacgcggtaccgcagctgcgggcgattgctgaccaggttacggccgacaacaatcataatggggttggcgaggcaatcttgaaatggcgttaagggcggccgattggtaaatcatatcattggcagcggcgtttgatcgtgaacagcactgtgttaaaggcggcttagttgattgtcaaccgcgtatcaccttgacagcctaaagtaatggttgatcggcgaaaaagctggcggctgatcattggcattctgacaggtcggtgaaaataagaccgtaaaaaatctgaaaatgggtttgatctagatggatcggatccatttttattttgcatacaacggtatatttttagaatattatacagttatttaaaagagggaatttgtagtcagtcagttaatcttgtttatttattaaaataatattctctttaaaagcgcttaaatgggaatttgataattattattcaaggaatataagaaaatagccaataaaaggttgtcgaattctaattcatgggttatattatcaccaatgattttattaattttttatgcaatcacaaacaaggaggtcacagattatgaacgcagccattatcggggtgactggttatagcggcacggtcttgtaccagctgctcagtcagcatccagcggttgaaaacattcacctgtatggtcatcaagatactgccgcaccgcgctttttaaatgatgaaatcgaggctttctgtgaccgacgaatcatgattgagccttatgatgtccgaaaaattatggccgaaaatgacgttgtgtttttcgccacgccggcgggagtcactgccaaattggcccagccttatttagacgccgattttcccgtaattgatctttccggcgacatgcgcttaaaggatcccaaagagtatgccaagtggtaccacaaagatccggctccagctgatcaattggcaaaagcacaatatggtctggctgaattcaataccgtgcatgccggctatgttgccagtcccggctgttacgcgacggccacgctgttaggactggcgccgctggtcaaaaaacatttgatcgatccggactcgattatcgttgatgccaagtcgggactttccggcgcgggcaagaaactgacgaccagctcgcattttgcctggatcaacgaaaactcgcagccttataaggtcaatcagcaccagcacatcccggagattctgcagcagctgcaacagtgggatgcaagcgttaaagctctgcagtttacgacgacgctgattccagtgacgcgcggcattatggcttcgatttatgccaagccgttgccgggcgttgatgaggaaaaactgaccgcggcctttgaagaatgctacggcaagcgacgatttgtccgcttgattaaaaacggctggccaagcatcaaagaagtcagtcattcaaatttctgcgacctgggctgggcactggatcctaatagtcacacgatcctggtcgtttccgtaattgataatctaatgaaaggggctgcgggacaagcagtccaaaatctgaaccatatgtttgaactggacgagacgctgggattgccaatgattcccagctggccataatgaaaggatgtctttaatatgatggaaccacaaactacgccaaacgttgcttcaattgtcgaaactgcctttacctggcctaagggtttttacagtgatgggctgcatgccggactcaaggctgaaaaaccagatctgggctggctgttttccaaagtaccagccagtgccgcgggggtttatacgaccaaccagttctgtgcggcgccaactgccttgaccaaagaaacgatcaatcatgatcatcagctgcagggaatcatcgtcaacagtgcgattgccaattcctgcacgggtccccaaggtaagctggatgctttaaaagaacaggcactgatggctaaaaagctgggcgtcagccaaaacttgatcggcgtggcctcaactggggtaatcggcgaaatgctgccaatggacaagatcaaggccgggattgccaagctgaagcaaactaagtcggctaaagttaccgaagccgttttgaccacggatactcataccaagacgattgccgttaagtttgaaatcgcgggtcatcaatgcacgatggcaggtttttgcaagggctcaggaatgattcacccaaagatggccaccatgctgggctttgtgacgaccgatgccaagatcagcggggcctgcctgcaggatctattaagcgaggaggttgacacgactttcaatcagatcacggttgatggcgacaactccactaatgatatggtcgttaccatggcaaatgggctggcaatggcggatgaggaatcattgacgccggaccaccctgattatccagtctttgcccaggcctaccatcaagtgctgagcgcgctggccaaagagattgcccgtgatggcgagggggcaactaagctggttgaagccaatgtcaagggcgcggctaatgatctggatgctcagcacgtcgctaaggcaatcgtaggctccaacctggtcaaggctgccttgtttggtcaggatgccaactggggccggatcatgggagcaattggcgcaacggatgctgatttggacgtcaatcgcgttgacatcaagcttaatggcatcaacatcgtcttgagcagtcatggcgttgactatgacgaatggctgctgcggcagaaactggctgaagatcagatcaaaatcgatgtcgatctgcatcatggctttggcaagggacaggcatggggatgcgatctgacctataaatacgtgcagatcaatgcctcgtaccggagctagtaggcattcatgaaggatctgattattattaaaatcggtggtcaagccatcagcgagctaacggatgattttttcgaacagctggcagtctggcgcacgcagggtaaaaagattctgctgctgcatggcggcggccctttgattaccaagctttgccaacagctgcaggtgccggtcgttaaaaaagccggcgtgcgggtaactgatgcccagacgctggcattgaccaaactggtgctgttagggcaggctcagccattattgctgcagaaactcagcgatcatcagctgccagtcgtcggtttgaacgcggcggacaatcagatgctggtgggcaagtatttggatcaaagcgtctacggcgaagtgggcaccgttgtcagcgttaatcaagataagcttttgccgctgttggacagctatatcggcgttttggcaccattagcgatgacgccggctggcaattggcttaatgtcaatgccgatcaggccgcggctgacgtagccagtctattaggcgctaaaaagctttatctgatgacggatgtagccggcgttttgaatcagcaccatttgataccgcacttaacgaagctggtttcacaaaaactggtcgctgaaaaaatcatcagcagcggaatgcagccaaagatcaaagctgcctttgctgcctgtaccgcgggagttgagcaggtagccatcaccaattgtctgcaaaatcccggcacgattattaccaaggagtgattcaatgagccatttatttccaacctatacccgtttcccatttgaaatcgcaaaaggcatcggagcccatctatttgatgaacagggtaatgaatacctcgacttgaccagtggcatcggtgtctgcggcctaggctacaacgttaaggcactcaatgacgccgttgaacgtcagctgcatcaagtttggcatacatccaatctgtatgagagctcgctgcaggaaagcgtggcggcacagctgggcgttcatcaagacatgctggtcagttttgccaattccggtaccgaggccaatgaagccgcattgaaactggcgcgcaaggcaacgggtcggcttgatttcctggcatttgatcactcgtttcatggacgttcggctggctcgctgacggtaacgggcaacgagggcatcaaggaaggctttcttcccctggttcccggcgcgcggtttgccaagtacaatgacttcgcggccatcgatgagatcaagccggatctggctggggtaatcctagaagtcgtacagggcgaaggcggcgtgattgctggtgatgccaagtggctaaaggccgttcaagacaaatgtcacgaggttggcgcgctgcttttgatcgatgaggtgcagactgggatgggcagaaccggctcgctgtttgcctttgagcagtttggcctggatccagacatctatacggttgctaaggggctggccaatgggattccggttggcgcgatgatcggcaaaaaggagcttggtcaatactttggtcccggcagccatggttcgacgtttgcgggcaatccgctggcaatggcggccgctcagcaggtattaaagacgctggatcaagaatttttgagcgcggttcagcaaaaagccgcggcaatgcatcaagctatggaaaaagagctgctgccaatggatatggttgattcaatcagtggcctgggtttgatgatcggcattcatcttaatcaagccgtttccgtgggtcaggtcttggctcagctccattctcagcatgttctggcactttcggctcgtgacaatacgctgcgtcttttgccaccattgattgccagtcaagacgagctgctggctggtgtcgatgagatcaaaaaagcgctgaatgcagttgaatcggcgaccgctaccgcataaataaaatccgtcaatcccaaactggtttgacggatttttggtgtcgtggccaactcaatctgccggcctggtctggtgacagataacggcgttttttcgaatgatactgacttatcaaatgaaagaaaaatcatataatacaaaaatattttatttgacaagacgtttaaacgtgattgttccaacgatgaaagcccttacgagagtaggagttcaatcgttaaggtcagcaaaggtcaaataatttttgccgaggagcagagaatttcgcaaagtgaagggttgtattttttaatatacaaactaagataaaagtgtacaaatgatatgagttattataggaaaggaagttttggatatggctaatgaaattcaacgtcataacaacatgtttgacgacgtaatgagcgcgggcatgcgcaacttgctgaacgacaatttcttctctggcttcaacgctaaggcagatcacatgaagaccgacattgcagaaaccgataagaactatgtcgttaaagtcgacatgcctggctttgacaagaaggacatccacatcaactatgagaacaacatcctgacgatcacgggccgccgtgacacgtttgacgacctttctgacaaggatggcaacattttgcacagtgaacgcaactatggtcaaatgagccgttcattccgtctgccagaagttgacctgaagaaggccgttgctcactacagcgatggggttctggttctgacgctgcctaagctggcaccagaagccggcactggcactcacatcgaaattgaataatttaattgacaaatagtccttaaatgagtagcagttttaaattgctactcattttttattttgtttatgtaaatgctttcacgaatttggtataattaatttgtgtaatctaacaactttgtaattattttgttgtcttaacagctaaaggagggaacgttttggaaaacgcaaagccaaccaaaaagcaccgttttaagatgccatccgcgtttacgattttattcttcattatcgtcgtcttggcagtcttaacttggtttattccagccggtaagtacgctactgattcagccggcaacattattgctcatacctaccataccgtttcgccgcatccacaaggtatttgggatgtcttcatggcaatggttattgggatgatcggtgacagcaagactgaaggggcaattcagatcgcgctgtttatcctggtaatcggtgggtttttaggcgtcgttaacaaaaccggggctttaaacaatgggatttccgccgttgttcgtcgttatgagggacgcgaacggactttgattccaattttgatgattctgtttgctctgggtggtacgacttatggcatgggtgaagaaacgctggccttttacccattgctgattccagtcatgatcggctgcggctttgactcaatcgtcgcggttgccgtggctttggtcggtacgcagctggggtgtctggcatcaacggtcaacccatttgccactggggttgcctcagctacattgaagatctcgccaggtgaaggcttgattccacggctgatcctgttggtgatcgtcacggcgcttggtatctggtacacgatgcactatgccgaccaggtcaaaaaagatccaaccaagtcattagtctacgctcagcgggctgaagacgaaaaacggtttgatatttctgaaaagacgcaggacacgcagccattaaccaaggtacaaaaacgcgtactgtggctgtttgggatcacgtttatcattatgatcatggggctggtgccatggactgatctgaacaagcactggacggcctttgacacgtttaccaactggctgcatggcattccgttcctgggcgttttgatcggtaaagacattccagccttggggacttggtactttaacgaaattacgctgctgttcatctttatgtcggtagtaattatgtttgtcgctcatatgaaggaaagcgaatttatcgatgccttcttaaagggaatgggcgacctgctcagcgttgcgattatcgtggccgttgcgcgtgggattcaggttatcatgaacaatggtatgattacggcgaccgttttgcattggggtgaagtcggactgggcggcctgtcgcgcagtgccttcatcattttgacctacatcttctacattccaatgtcattcttgattccatcaacttccggcttggctgccgctacgatgggaatcatgggaccactgggacacttctgtcatgtttccggcagtctggttatcacggcttaccaagcagcttctggctggatcaacctgattacgccaacttccggaatcgtaatgggggccttggcaattgcgcacgtcaacatcagtatctggtggaagtggatggccaagttcatggtgatcctgttcctggttacctgcgtcttcttaggtattgccgcggtactttagcttttttcaatcatatcagggggaattaatatggcagcagaattggttcaagaaaatgagcgtcaacaagcattggcagctttaaagcgtttggttgccaagccatcgtataatgaggctccagcaccaggcgcgccgtttggacccaagattcgtcaagccctagatgagctgatgcggatctgtgatgagctgggctatcaaacctatgaggatccagatggctactatggctatgctgaaactggaaccggcagcgagacgtttggcattattggccatgttgatacggtgccggctggtgatttgagtacttgggaacatgatccttattctggcgagatctttggcgatgtggtctatgggcgcggtgtacaagacgacaaaggtcccgtgatcgcggctctgttcgcggtcaaggcattggagaatcgcggctatcattttaataaaaagatccgctttatcttcggtactgatgaagaaacgctgtggcgcgggattgccaagtacaatcaaaaagaagcgccgattgatctgggattttcgcccgatgctgaattcccggttacctatgctgaaaaagggctgcagcagtcatacctggttgggccgggaaccgagctgctgaacgttgaaactggcggtgcattcaacgcagtcccagatcgggcagaatatgctggtccaaagcaagatgaggtcaaggctgctcttgaaaagcacgatttcaagtatcatgaagaagccggcaagctggtcgtagaaggcaaagcgattcatgccatgctggctccccaaggcgtcaacgcggtcttaagactggcaattgctttggatgacgtctttaaaggctttggaccgctggactttatcggtcaatgctttaaagaggatgcgacgggaaccaatctgctgggtgacgtcaaggacgaagcatccggccatttgacgtttaatatttccagcctcaagatcacgccgaaagaaacgcggatgcagattgatctgcgaattccggttaccgttgaccgtgatgcgctgcttgaaaaactgagccaaaacgttgccaaatacgatctgcaatataagcattttgactacgtagcgccactgtacgttcctaaagataccgaattggttaagaccttgatgacagtctatcaggatcaaaccggtgacgttgcttctcagccacaggtcagcggcggggcaacctttgcgcggacgatacataactgcgtggcctttggggcgatgctgccaactacgcctgactttatgcaccaggctaacgaacaatggccgcttcaagacatgtttaaggcaatggatatctttgccgaggcagtcaagcggttgtgtgtggactgatgattgaataaaaaagagcagctgcgagaactcgcggctgcttttttatggttacaaaccattttagatgtgttccttgatgccattagggaagtctttatcgatttcctttaagattggcagcaaggtgttgatgtattcatgatatgcttcgattggcttgcgatccttgccgtttgcctgaagcagcgcgatggcaatgtcatgcgcgcgttgttcattactgatcatattattcacctcattcctacagtttaacaaattttatcgatagttgcgcgatccaatcacccaaggcagtctcttttaaaagcaccatgatataaaaaccggctaagacgccagctgcattcgtgatgacgtcatcaatatcgacgaagcgttcaacatggaaaaacagatcgcataaaaattgcgtgctttcgattgagattcccagtaagatgccaaacagcaataccgacttgagatcatgccgcgcgctaagcagataccagtagatgccagccggaaccgtcatgacgatatttaagaaaaaatcaggcgacaaggcttgaaatggaatggcgttgcagggaacacctaagacgtgataaaaaatcttgtgcgggccgccccaattatactgggttggcgtaaagcagagataggcaatggccaaagtatagatcaaggcgctcagcatcgtaaaccattgccagccatgaagcggaagatgcaaggctcggttaaacatggtgccccagatgattaatagtattataaatggaatccaagaacgcaaaattaaaaatctccccaataactctaacgaaaatttaaaaacgtggtacaataaagattctaggttttaccctccagtctagcaaaaaatgttgggcaggttaagagaaggaggaaattaaatatggcggaaaagcaaccggatcagcaaacactgtcgcggggcttaaaggatcgccacgtacagctgattgcccttggtggtgcgatcggtacggggctgttcttgggttccgggaaatccattcacgttgctggtccttccattctgctagcatatctgattacggggatcatgtgcttcttgttgatgcgggcgctgggcgaactcttgctggctgacttgcattacaattcatttgtggatgcgattcgtgactacttaggctcacgggctgcatttatcactggttggacgtactggctctgctgggtcgcaatcgcaatggctgagattactgcgatcggcatgtacgttcaattatggctgccgaattgtccacaatgggtacccggtttgattacgctggcggtgctcttatgtgtcaacttgattacggttggtgcatttggcgaggtcgaatcttggtttgcactgatcaagatttttgcgatcctgctgctgattgcaatcgggatcgggatgatgctggtgcgcttcaagagtcccaacggcatcgttacctcaccaagcaacctgatatcatatggcggatttttcgcaaccggcctggatggctttttgaagtctttccaaatggtcatcttctcatttgccggaattgaaatggttgggatgacggcggctgaaacggctaacccccgcaaggtcattcccaaggccatcaatgacattccagtccggattttgttgttctacattggcgcactgtttgtgattatgagcatctatccatggaatcggcttgatccaaattcgagtccgtttgtcatggtctttaaggatattggcatttcttcagcggcctcaatcatcaactttgtagttttaacggcggccgcttcatcttgcaacagcgccctgtacacgactggacgcatgttggccgaattgacctcaacttcacgacggccttcaattcgcaagatcagccgcatttctaagaattcggttccagctacggcgatcgtcatctcagctctcttgatggggatgtcgtcactgctgaactacttgattccttccgaagtctttaccctggtttcaagtgtggccacgaccagcttcctgtttatctggggaacgattgtgttggctcacctgcgctaccgtaagctgcatccggaaggcagtggctttaagatgccgggaacgccggttactgattggatggtcttgattttcctgtttgccgtgggcgtgatcttgttgttcagccctgacaccagaattgccttgattatcgcgttagtctggctgatatttatgacgattctttcattgactttcaaacaatatcgatacaactaaaaataaacttctcggtgttcaatcatcgagaagttttttaatgagttgattggttttgatggttttggaaagcaggaacgtttggcagcaatcttgacgagaatctgctggtcagctttgtgaagaaaatcgggatttaactagctgcaaggcttagtcatcgtcttcgtcatcatcagcaatcgacagtcccttggttggctcgttgcctaaaaagctttgtgccaatgcgatctgttctttgatccagcgatacagttctttcatcaacagattttgtccttcatgggcttctttttcagtcagcttgatggcgcggtcaataaacaagagctgggtgtcaaaatccttgatcagatcaaaaagctgctgttcaccgctgtcgtatttggcagcgccgttttcttcaagcatgctgtattctaacagctcacgactggtagttggtaccaaatcagcttcggcatacagggcacggttgatctgctcccaaaatgtcagttctttttgaagccagcttcggccatgctgatttaaaaacagtgcactgggacccttggcaaataaaatggcttgttcgatcttgagggcatgcacagccagattagcggtaatatgaccaatcatggcaccagcagttgggacgtgatgctcatgctggctgcgttcttgttcgttggcaaatgcttgggcagagttggttttgagtgaatccatatctaggcctccttaacgatgattttctcgacttgatagccaagctgattgacgatgctgcccagtttttcaggcgcgatcagcttttcgtcgacttcagccttgaccttgccagcgttaaacattactacggcatcttttacgccaggctgctggctgacggctttttgaatcttgctcatgcaggatggacatgacagatcgtttagttttaagactacttttttcatgatattcagctcctttaataattgattaatgacatcatattttagattcacgctaaagtaattgacgctgatcaattatgacgaattaaacgcatgccatttaaaattacgatcaaaatactcaactcgtggaccagcattcctgatgccatgtagatataacccgtaaagagaccaataaaaagcaataaaacggtcagcagggcaatcgtgatgttttcatacatgttgcgcatcatttttttggcgtacttaacggcaactggcagcttggttggactggaatcgaccagaataatatcggcaacttcaatcgcggcttcggttccgctgcccattgcaattcctagatcggcaatgcttagcgccgggctgtcattgataccgtcaccgataaaggcagtttgatgtccagctgcctgcaattttttgatgaattcagccttatccacgggtaaaagatcgccgacgaccaggtcaaaatccaaaccggctactgttttttcggcaacggcttgattgtctcctgaaagcagcacaagttgataatccttgagctttcttaagtcgtgcagggcatcttttacaccgtccctcagctgatcactgacttccaaggccaatcgcagttcttcattaacggccagcaagacatgcgagctggttgccgatagttgtgaggtgttggcagcaatgccggcttcctttagcagacgctcattgccgaccagcaccgactgtccgttaacggtggctttgatgccgcgtccatccacaatctgactgttgctgatcggatagacggcatctttttggccagatttttgatagtactcaaggatggccctagccaatgggtgatcggattcatgctcgatgctggccagaattttaagattttcggctaaagagccattaaagttgatgactttaccgacgctgggctgtcccgtcgttaacgtaccggtcttatcaaaaaccagagtatcgatcttggtcagctggtctaatgcggcactgcccttggcaatcatgccctgtttggccgcgctgccgatgccggcgaccgttgagattgggacaccgattaccaaagcaccaggacagcccaagaccagaatcgtgatggccagcctaaggtctttggtaatcagaccaactgcagcagcgattgccaagactagaggcgtgtagaacttcgaaaaacgatcgatcaagcgctgcgttttcgtctgactgtcctgggcctcctcaaccagttcgatcagcttgccaaaagtagtatcttcgccgactttttctgcttgcacggccaaggttccgctggtcagaatcgtgccggcaaaaacgctgctgtcgattgttttgcgactaggctttgattcaccggtaatgcttgcctgatcagcatagccgctgccatccacgacgcgtccatcgactggaatctgggaaccggtttttaccagcagatagtcgcctttttcaatctcgtcaatatctacttcggtaaacacgcgctcatgaggctgattgattttcagtgcagttttgggtgccagatcgaccagttcttgaattgacttgcgcgtttttttgagcgtgacggcttccaaataatcaccgattgaaaacagccagacgacgatgcctgcctcactgtattcgccaattgcaatcgcactgacaacggcaattgaaaccaaaagctcaattgaaatgattttgaatcgcagtgcgccagctgctctgactatcagcggcagaccaccgataaccgcgattgcaaccatacttaaatcatccagccagtcaagaccgctgaatcggccaagataagcggcaatcagcagcatcgtcattaatacgatgctgccttttttatgctgcgaaaaaaacataatttcagctcctctctgaattgttcgtttcctagcataaggtggcggctgaatttatgaattgatgcctatcaatttttaaaaaatagcctaaataaaaatcctcggcccagttgactgagacgaggattgattgattttttgagaaagggcagggaaacgcgtgcttttaaggacatgatgaattgcccattcttgtttgctcttttatgactatgcgaggcccagctttttttgacagttgggacagatgccatgaacttcaatatcgctttgggttaccatgaaattggtcttttcgcgggtaatctgctgcagatccttggtcagggccgcgaaatgatcatcaaaaacgtcttggatcaaaccgcagttgtcacagacgacatggtagtgggggtgcccaaagtagtcataatgggagctgccatcaccatttttcagttcaatgaccagctgatcttcaaccaagagattgatggtgttgtagatcgttgccatgctgatgttgtcggcttcttgttttaaatcggcgtagatcatctcaacgctggggtgcgtgtggtgattgatcagatagtgcagaatcagtttacgctgcggggtgagccggacgtgcttttcacgcagatgctgcagtgcgtgttcatattctgaattggccattgcaacgatcatcctcctttcacagacgagtgattagacaagtcattattatagcattgtcaaggtcgataatgcatcaggaaataaaatgtttctttttagataataataattctaatttagcgaaaagaaaagcattctgcctggtaaaatttaaacccagaaaatcagaatcgttgtcagcaactgtaacagagtataaaaaatttgattatgcgggtttgcgaccaagcgctgcaacagccaccagcttaagatcaccaatgcgatggctaacagcagcgtcgccttgattggccgcgtcagcatcgttaaaatcaagatcacgccaagaccgccctcaatcattgaaaaacgtgggtcatcagataaaaaaagcggggcgtagtaaaaacagtagatcatcaataacggaaccagtttgagcagatagctccacgacaaaaacttaaccgagatgaaggtaaacgccactggaatgctgagggtcattaaaaggccgaaaaccagcagaccaactggattttgaaattcgtgcagataaagctcaaaaatcagcagatagcaaggcggcagcaaaagcaggataaacaaaaagacgttgccatgcaaaaaaccgctgatggcaaataaaaagctgatcagcagcggaataatcgaagtcagcgagccgccttgctggtcaaaaataatggtggcggctagggcaatgcagatctggtaggcaaacagactgtacagatcatgagaaaagacggtggttttgatctgaatggcataggcaaagggcacgtaagaccagcagcacatcattaaaaaagcattgggcagcagactgcgccagtcgatatcttggatttgcagcttaaaatgcgataacgggttttgcaaaaaaattcctcctgagcggtcaaaaattaagttttccttattgtaacaaattccatcataaaaaattgcttattatcacgagaatatgttaggatggtggacgttataaagcaaattcccgataggattcacagattgtgaagatgccttgtaaccgcaataaccgaactttttagtttagaaaatgggggaattaacaaaatgactgaacgacacttatttacatccgaatcggtttcggaaggacatcctgacaagattgctgaccagatcagcgacgcaattttggatgccatgctggaacaagacccagatgcccgggtagcggttgaaacctcggtcacgaccggcctggtgctggtatttggcgaagtctcgactacggcttatgtcaatatccagcagatcgttcgtgatacgattcgtgaaatcggctacacggatggccaatatggctttgatgccgacaactgtgcggtgattacagcgattgacgaacagtcgccagacatcgcgcaaggggttgacgactcgctggaaacgcggggcggcaacgttgatccattagacaagattggtgctggcgaccaagggctgatgtttggctatgctactgatgaaacgccggaatatatgccgctgacgctgatgcttagtcacaagctgatgcagaagatcgccaagctgcgcaaggatggtacgattccatatctgcgccctgacgccaaggctgaagtaacggtcgaatacgatgaaaatgataagccattgcgtgtcgatacggttgttttgagtacgcagcatgacccagagattgctttggatcagattcgtcacgacattattgagcaagttatcaaagccgtgattccagccgaactgttggatgatgataccaaatatttcatcaatccaaccggccgttttgtcattggtggtccacaaggcgatgccgggttaacgggccgcaagatcatcgtggacacttatggcggggctgctcaccatggcgggggcgccttctctggcaaggatgcgacgaaggttgaccgttctgccagctatgcggcccgctatattgccaagaacctggtagcggccggctatgccaagcgcctggagattcaggttgcctacgcaattggggtggctcagccagtctcaatctcaatcaatacgtttgggacggggacgcgttcggaagctgaactgatcgcggcggtacgcaagacgtttgatctgcggccggccggaatcattaagatgcttgacttgaagcgcccaatctacaaaaagacggctgcttatggtcactttggccggactgatatcgatctgccgtgggaacacctggacaaggttgacgaactgaaagccattttaggataaaaagcaaaagaaaagccaagtgcccagatgcggcagcttggcttttttgctggcgattatttgactggccggcattttgactcatgatcatcaagacttagtcaaacaagcccgctaatgccagatcacaatgcagttcaaatcagtcattgataaactgaacgtcgtagctatggtcaataatgcgaacctgatctggtttgagaccgacaacttgaacatggcgtgcctgatcgacaaaaacggcccccatgacgtcaggatgatcattgatccagtttggcagcggctgaccggcaaagaaaaggcggccggtttcgatctcgccggtaatcgattcaccagaaaagacggtcacgccggccagggcagtttttctagggtgaccagtggccggatcgatgatgtggtggtagtcttgcccattttcttctagatgacgctcgtagattccgctggtaacggctgaacattccggcagagtggctaccagaatcgattgaccacgcttggcactaggatcctgaacgccgattcgccataagccgtcttggtgcttgggtgccgtgccgtgcatcagaatgttgccgcccagatcaatgatgccggcgcgaagatcacgcgagcgccataagtcacgaatgcgatcggcgatatatcctttggcaatggcgcccagatcaatctccattcccggctttttcaaaaagatcgtcatgtcgtggtcatttagctcaacgtcgtgcggatcgatcagtttaaggcgttcttgaatctccgcctcgcttggtacatgagcatcgtcaaagccaatgtgccacagttttaccaaaggaccgatcaaggcatcaaagccattgtcttccaggctgatggcaatggcttttttggcaagatggtagctggcatgagaaacctgtacgggatgctggccggctgcctgattaacggccatcagctctgaatgatcgcgattgacagtcagaatgtcttcatagcgggcaatcagtgcataggcatcgtccaaatcgcgctgctcggcacttccaaacgccgttaaaacgatgttggtgccaagaccataatagcttttggagatgatatgctgggccagattgctgataatttggggatgatcgtttgaccaaagaggggttttgttttccattgaggtcgtcctttctacacttgcggtttattaatgtcattataaccttgaggggcttttagaaacgagcaaaattaagttaattatcgaacaaatacggctaaaaatcaggctgcaatttaaaaatgctttttttaaatcagttgatgaaacaccgatgaattcgtttgcgcgacttttgtcaaataattgataaaatattcacaatatctctagtaaaaatcatttaaaacgagtaagatggatccgtaaaggttaaatcaaggaaggggtcttgagtcatgcattcattcttaagtatcgatgtcggtgggacagcgattaagtatgccttgctgaacaacgccggtcagattaccaaaaaagacaaagtgccgacgcctaccagcagcctgactgaatttatgaagtcgctttatgcaattattgatcagtaccaagctcagattagcggattggcggtctgcgttcccggcaaggttgatccgcaaaagcaggtggtcgtttttagcgatacgctgccgtttttgaagaactgggatctgccaaaactgtttaaggaacattaccgtaagattctgccgattgccgttgaaaacgaaggacgcgcggcagctttggcggaatcatggctgggcaatctgcatggtgaaaccgatgcggcagccattttgctgggaaccgacatcagctctggcatcatcaccaatggcaaactgaactatggcgcgcatgctggtgccggaatgctgaattttgtgccaaccaactttaaggcggaaggtacggatcgcttggcaggctttaacggctcttcagtcaaaatgattcaggacgtaattgaggcatctggcctgccggaaggtgcggatggcttagcggcctttcggatgattgaagctggcaatccagatgccgccaaggtctttaacgaatactgctatcagattgcgtgcttgatcttgagcatgcaggcgatcgttgatttaaacaaggtcgtcattggtggtgggatctccgcgcagccgatattgatcaagacaatcaatgatcaatatgaccagctggtagagtcaatgccgatcgtgaaaaaagaaatggtcaagccaaagatcgaaccagctaaattcaaaaacgacgccaacctgtatggagctttagatgccttgctgctgaaactcgacgaacaaaattagaaacatattagaaaagagacttgcacttagcggcggtccttgctagaatagtttgtaatctttgatcgtagaggagttagtagccaactcagctgtttacagagaccaggcggcggtgcaagcctggagcagtcattggtgaactggcctcaaaaaattgctgctgaatcaacagtaggcggcaacgtgaaattcgcgttaagaatctcaagggccatgcataaagcgtggaattcaggtggtaccgcggattttgattcgtcctgcatttagttgcagggctttttttatacgatcaacttactgacaatcagaattttaaaaggagcagggctaatggcttacgatcacaaaacgattgaaaagaaatggcagcgctattggaagaagaacaagacctttaaggcggaaatcaacaaggaccaaaagaagtactatgctttggacatgttcccatacccatctggacaaggtctgcacgttggtcacccagaaggctacacggcaacggatgcggtttcgcggatgaagcggatgcagggctacaacgtgctgcatccaatgggctgggatgcgtttgggctgccggctgaacagtacgctttaaagacgggccacaatccaaagggcttcaccaaccaaaacatcgatcactttagagaccagattcaatcgcttggcttctcttacgactgggatcgcgaagtcaacacgactgatccaaactactacaagtggacgcagtggatctttgaacagctgtacaagaaggggctggcctatgaagatgagatcatggtcaactgggctcctgacttcatgggcggtacggttgtctccaatgaagaagtcgttgacggcaagacggagcggggcggctacccagtctaccgcaagccaatgaagcaatgggtcttgaagatcacggcctatgccgatcgtctgattgatgatctggacctggttgactggccagaaagcgttaaggaaatgcagcgcaactggattggtcgttcagaaggggcttccgtcttctttgacattgctgatcatgatggcagaatcgaagtctttacgacgcgtcctgacacgctgtttggggcttcctacgttgttttggcccctgaactggatctggttaacgaactgacgacgcctgaacacaaggccgaagtcgaagcctacaaggaaacgacttcccgccgctctgatctggaacggaccgatctgaacaaggacaagacgggtgtatttacgggggcttacgccatcaacccagtcaacggcgaaaagctgccaatctggatctcagattacgtcctggcttcatacggtactggtgcggtgatggccgtgcctgctggtgaccagcgtgactgggactttgccaagaagtttgacctgccaatcaagccaatcatcaaggatgtcgatatctcagaagcagcctatgctggcgatggcgagcacatcaattctggttttgttgatggcatgaagatcaaggaagccaaaacggccatgatcgactggctggaagaacacgatgccgggcacaagaaggtcaactaccggctgcgcgactggatcttctcacgtcagcgctactggggtgaaccaattccggttattcactgggatgatggtacgacctcattggtgcctgaagacgaactgcctttgaagctgcctgatatgaagaacattgagccatctggtaccggtgagagtccactggccaatgctaccgactggatcaacgtttatgacgaaaatggccggcatggactgcgggaaaccaacacgatgccgcaatgggctggttcttcttggtactggctgcgctacacggatccgcacaacgaaaaggaatttgcctctaaagaagcgctggactactggtcaccagtcgatctgtacgtcgggggggctgaacatgccgtcctgcacctgctgtatgcccgcttctggcacaaggttctgtacgatctgggctacgtgccaacaccggaaccattcatgaagctggttaaccaagggatgattctgggttccaaccacgaaaagatgtccaagtccaagggcaatgtcgttaacccagatgacatcgttgagcaatatggtgccgacacgctgcgtctgtacgaaatgttcatgggtccgctaactgaatccgtaccttgggatactaaggggctgcacggtgcctacaagtggatcaaccgggtatggcgcttgatgatggatgacaacaaccatctgcgtgatcgggtttcgaacttcaatgatggcaaacttacgcgcatctacaaccaaaccgtcaagaaggttacggaagactttgagcggatgcactttaacacggctatttcgcaactgatggtctttgtcaatgaagcgtacaaggttgatgatctgccggttgaatatatggaaggcctgattaagatgatctcgccggtaattccacacgttgccgaagagctttggagccaattccacgtttccgacacgattgcctaccagccatggccaacctatgatccaaaagccttggaggaatcaacggttgaaatgatcgtacaggttaacggcaaagtacgggcccgaattgagatgccaaaggatgccgatcaagaaacggctcaagctaaggcccttgccaacgaacacgtccaaaagttcatggatggcaaggaaatcaagaaggtcatcgtcgtaccaaaccacattgtcaacattgtcgttaaatagtctaacgtaatttaaaggtcagcattcggtagcgtcgaggctggcctttttggattttaaagaaaggaaacagcaatggaactggttagctatggggcagtctttaccccaaccgaaaaagagattcaggttgattttccggatgtccctgaggcatttacgcaggggcagactatggatgaggcaatcgaaaatgccaagctggggctggcaatcgtaatcaatgacaagctgggccattttgaatcggcgccagcagcaacgcccatcgaccagctgaaaacggcctttccggatcgtgaagtacggttgatcgaagttgatctggaaaaatattaaacgcgttaatcgttgttggggtgggcttttgaagcactcacggggattaggtaaaacagcttactataaataagacgttgacaattgaaaacctgatcgctataataaactcattaaatttttaagagatttttaattattgaatttcattgcgaaaggaggaatttctatgttgaagcatcaatttaaaacattggagatttctgccttttcgtcaatgatggcctgttgttaatctattcctcaatcgatttttcgatctgaggcctttttgggttactgtttttgcggttcccaaaggctgattaaaggaatggaaagacaatgggccttttttcatgcaattttttgattagacattatttggatatttgtctaaaaggggagtgagaaattttgagttggacgatcattcagcagagtctgcctgaatttgccaagggctttcgactgacgctgtggctgtcgttggttggaattctaggcgccatggtcgtgggcatcatcgtcagtctggtgcggtatttcaaggtcccgtatctggctggcatcctgggcgcttatgttgagctggcccgcaatacgccgcttttgattcagctgttctttttgtactacgcctttccggtaattggctggaaaatgagcgcggccacctgtgggatcgttggtctgatctttttagggggcgcctacatggcagaaggattcagcggcggctttaacggcgtggccaagacgcagcttgaatccggcagggccctgggaatgagccgctggcagctggcccgttatgtagtctttccgcagggatttgcactgtcggtacctgctctggctgccaacgtgatctttttgattaaggaaacctcgattttttctgtaattgctattccagaattgacgaacacggccctggatctgatcggtctttactatcgttctaacgaatatcttttcgttttggtgatcgcctacgcaattatcttgattcctctgtccttgattttgacctggctggaaaggaaggttcgctatggcacattcgggaattaacgttttgttggaaggacataattttgtccgactgctaggtggattatggaccacggtttggatcgcggcgctgtccttgctgattggattggcattcggtgcggtactgggaatcttgcgaacgtttaagaatcggctgctgcgcttgattctgcggctttacctcgagtttttccggatcgtgcccacggttgtgctgctgtttttggcctattacatcctgccaagaatgatgcatgtggccaacctccctggctcattgatggccgttgtcgcgtttgccttatgggtggccgcggaattcagcgatatcgttcgaggagctttgatctcggttcctaagcatcagcgggaatcgggtatggcgttgggtttgaaccgccaccagctgttttactacgtcttattgccccaagcgtttcgattggagctgccggcaacgatcaatctggcaacgcgggtgattaaaacgacctcgcttttgatgatgatcagcgtgatggatgtcatcaacattggccagcagattatcgaggccaataatcatctttatcgaacaggggtcttttgggtctatggtctgattttcgtgttttacttcctggtggattatccactgtcgcgctgggcaaaaaagatggatgccaagcaagcagattaagggggatgtcttttgactgaagaaattttaaaagtagcgcatttaaacaagttttacggtgaacgccaagtcttgttcgatatcaactttgagctcaaaaaaggcgaggtgctggcactgctgggaccttccggatcgggcaagagtacgacgattcgtacgctgaacggcttagaggactttcaaagcggtcagatcacttttgcaggccagaatgtgattccagatgaaaagcattggcaaaagctgcggcaaaagatcggcatggtttttcaaagctacgatctgttcccaaatatgacggttttggaaaacatcatcctggcaccgaccaaagttcagcagcgcgaacaaaaagaagcgacggcagaagccaaaaaactgctggccatggttggtttgagcgattatgagcaggcctacccacgccagctgtcaggtgggcaaaagcagcggatcgccattatcagagcgctggccatgcatccggatctgatgctgtttgatgaggtcacggcctcattggaccctgagatggtcagaggggtcttggagatcatcaagaagctgagtgacgaagaggacatgacaatgctgatcgtaactcatgagatgaactttgcggcccagattgccgatcgggtgctgtttttagaggatggtcatattttagaggatacgccgggtcagcagttctttaagcagccgcagactgagcgggcccaacagtttttggagagtatggatttttagtgttttttgagaaaaggggaattgattatgaaaaagcagagttttaaaaaattgattcagacgctggtattggccctaggcgcttttctactggcatttgcaccactggcaggtactgtgacggcccatgccgctgataatcagagttcggtttcggcaatcaagaagcgcggctacattaaaattgccgtgtttggcgacttgccgccatatggctgggtcaacaaggatggcaagcgcgtgggatatgatctgtacctggcacggcggattgccaaggatttaggcgttaaggccaagttcgtgcaggttaacgccaacaaccgggttgatacgctgaactccaacaaggctgatctggttttggccaactttacggtgacgtcggaacgcaagcagacggttgattttgccaagccatacatgaaggtttccgttggggtcgtttctaaaaagagcgatccaattactaaggtcagtcaattgaagggccaaaaactgatcgtcaacaagggaacgacggctgaacaatactttactcaacaccagaccggcgccagccttttgaagttcgactccaagacgcagcagttcaacgcgcttaaaaacggtcgcgccaaagcattggctgatgacaactcctacctgtacgcctgggtcaagaacaatcctaagtacacggttggcatcaagcagctgggtaagagctcatacattgccccagccgtcaaaaagggaaacaagtcgcttttgaactggaccaacaaggaaatcaccaagcttaacggcgaaaacttctttgaaaaggactacaaccaggaactgaagccttactttggctcagaagtcaaggccagcgacatcatcttgactaatcaaaaatagtcattgatgaatgctctaaaatatgaactgtaaaaacgtcgtcggctgattgccacggcgtttttaggttggtggaaaaaatgatttactaaattttcattgctgattgaaaaatttagttgacatgagaaaatcacgtgactataatgagtgaaaattaagaaattcattaaataataattataaaagcgttgatgagaagagtaggctgctttattagtgtttcagcgactgccgtcagtgaaagggcagcacgaaccagcagctgaagatgagctcagagcaaggtatttggtcagtttggctgaattcccggcaggatccgttaccatcccagacatcaattggtgttgttgaggccgctgtgggcaatccagcggtaaaatcgggtggtaccacgtcggatcagctgcgtcgtcctgaatctatcaataggttcagggcttttttattgccttgagaaaggggaaagacatgacagaatttaataccagactggtgcacgggccagcccaaaatgacaatcagacgggagccgtcaacgttccaatctatacttcaacgacctatcgctatccaaaaatcggcgcggcggtacagtatgattacggccgctcgggcaatccaacacggcagtatcttgaggatcagttggctgctttagagcatggtacgcggggattggcgctttcttccgggatggcggcgattcatacggcgctggcgatttttaaggctggcgatcatatcatcgttggcgatcagatctatggcggcacgtttcggctgctcaatcagttctttgaacgctgggggctgagcgcaacgccggttgacaccagagatccggcggccattgaacgcgcgatccagcctaataccaaggccgtctattttgagccggttaccaatccgctgctgcaggtgacttcaattgccgctgtagctaaggttgctaaaaaacacgacttgctgacaatcgtcgataacactttcttaagtccctatctttgtcagccattgactttaggtgccgatatcgtaattcacagtgcaactaaatacctggctgggcattctgatgtcagtgcgggcgcggtgattaccaatgatgaaaaattaggcgaccggctctactttgtgcaaaacgcgctaggggccgtgctttcaccagaagacagcaatctggttcggcgcgggctgcagactttaagcgtcagaatggatcgccagcaggccaacgtcaaggcaatcattgctcatctgcagccgctgccagccgtcaaaaaaatctattatcccggtctattcggccagccaggctatgaaacgctcagcagccaggccaagggtgcgggcggcgtgctttcgatcgaactggctgacgatgtggacgcagttaagttcgttgattcgctgcagctgtttcaactggcagtcagcctaggctcagtggaaagtctggttgagctgccaagcaagatgagccacgcggagctttcgccggctgaacagcttaaagccggaattacgccgggactgatcagattagcggttggcatcgaggatcagcgcgacttgatcgcggaccttgatcaggcattagccaaggcagtttgatcatcagcaggcctttatagcactggcatgcatcattagaccgtatggatcaaaacagtcgattaccagttgaatgaatcagaaaataccagaaagagggaattatttatgtgtgaatgtcaaaataaggcagccaaactgtcactggcaaccatcgcggctcaggccggtaatcatgaagatgagcgtggtgcggtggccctgccgatctatctgtcgtctaattatcgtcacccaaccttaaaagaggctatcaattttgacgcgaccaaagactatacctattcgcgcctttcaacgcccaatcgccgcgccgttgaaaaaacgctggccaaattggagggcgggacggcagcttttgcggtcagctctgggatggcggccgtccagcttgcattaagcatcctaaaaaccggcgatcgcttgatttcactggatgatctgtatggcggcgactttcgctactttgattatctgaatcggcatgccgggattgagtttgatcaatgggatggcggttcgcttgctgaactggttgccaagctgacgccaaaaaccagaatcgtctggctggagacgccttctaatccaactatgaaagaaattgacgttcaagcagtggcagcggccgttcatgaatatgatccgcaaatcaaggtgatcgttgacaataccttttacacgccaatctatcagcggccactgctaaaaggagctgacgtggttattcacagcgcgaccaagtacctgtccgggcataacgatttgttaggtggagcagtggtcgttaaggatgaaaaactggctcaggcgtactacgactactacattacgactggcgatactttggattcatttgactcctggctgcttttgcgaagtcttaagacgcttaaggtgcgcatggctcagcacactaaaaatgcccaggccgtcgttgagtatcttaagcaggcgccagaagtcgaaaaagtgctttacccaggcaagggaggtatgatcagcttttatctaaaaaaggctgatcaagttgaaagactgcttgatcacgttaaggtaatcacctttgcagagagtctgggcgggatcgaaagtctgattacgattccctactatcagacgcacgctgacgtttcagtcgagcagcggcagcgattggggattacgcctaagctgttgcggctgtcggttggtcttgaagatgcagctgatctgattgccgacatcaaacaggctttagcagcgacccgttaaggttttcttaacaaattgttaattgatttgcgctgactgccaattcaagctagaatagttaggattattttttgaaattttaacaattaaaaaggtaggaaagcagcaaattatggatgcacaacaaaaaacggccccgagcaagcaggctgcagccaaggcaaaaatgctcagtgggtcggcctggatgacggcagggagtgtattgtcgcgagttctgggtgcactttatatcattccttgggtaacttggatgggggcctacagtgatcaggccaacgcgctttatgccaagggatacaacatctacaacctgtttttggtgatcgcaacggcggggatcccatccgcaatgtcgaagctggtcgcccattataatgggatcaatcagaccaacatcagcaaaaagctatatcataccgggatgtacgtttcaatggcaactggagtgatcgcggccttgatcatgatgtttggcgcttcactgctggatggcggggaccccaatgagattccggttatccgttctttggcctgggccgtactattgattcccagcatcagcatctcgcgggggtatctgcaggggtacagctggatggcgccatctgccatctcacagctgattgagcagctcttaagaatcatctacatgctgggggccacttatctggtcatgaagatccaaaaagggagttgggtcttggcggttacccagtctacgtttgctgcctttatcggggccttgggagcagccgcggtcttgatcatggcgcggattcactaccggcggccaatggaggcgatgctggaaaacagtctggcgacaccagaaatctcgacgatacagctgattgtcaagatcgtttatcaagccatcccgtttatcgtgattgaatcagggatcacgatcttccaactgattgaccaatataccttctttaagatgatgccattggttggccactttacctactatcaaatgaatacggtctatgccatgttcagctttaatgccaacaagctttacatgatcatcattgcggtggctacggccatggcaacgacggtgattccgcttttggccaacgcgcgcgccaaaagcgatcaggaaggcatgcgcacgcagattgaaaacgcactggagctgttctactttatcatggtgccggcttcacttggcctggttgccgtagcaccgcaagtctacacggttttttatcgttataatcaagccgggatcgtaattttggaatttgcggcgtttgcttcgattgccatgggactttacagtgtggcggccgcgatgatgcagggaatttcggaaaaccgcaagatgatgaagattctgggaatcggcatgatcatcaagctgattttgcagttcccatgcatctggcttttaaaaggcatgggcccgctattggcaacggccctggctatggtgatgatgaactacctgattctgcattcgtttaatatggaatttggtctgcactttgaagaaatggccaagccaactaatcagattctggccttttctctggtcatgtttgtggttaccaagctggtgatgttcggtctggggtatctggttaatccgcatggccgctatgccgcgtttttccttttgatccttggcgtggccattggtggtgtcatttatgcttatctggcactgaagtcacgactggctgatcatttgctgggcgcgcgggctgatcttttgcgcgaacggctgcatatgaattaaatcaatctgctcgtctcagttttggggcgagcttttttactgccaagattgttggtcaaaaaaggtcaaaatatttaacaagatgattgagacgtgctaaaacgtagtcgtaaacaagaaaggaaggctgattttattatggaaatcaaagaaactacgattaaccagatgaagaagtctcatttcgacgttacggacaccgacaaccatgaagtcgatctaaccaaactggctgaacagccgcaagacgccaagttggaactgcgcgccaagggtcagatcgttcaggataatctgacgcccaagcagattagtatagcggtcaatgacttatttgccgcttaagcaatcaaattcgaccatcaaaaaaccatgacgctcaggagacgtcatggttttattgtttagtccataaatccaatatgcgttttggaatcctgcgcggcaacctttttcataaaggcaggcagggcatgactgatttggtgaggcaaaacgatatattgattttccgcgatctgatcagccacggcactgtgcgcgtaaacggcggccaataccgcgtccaaaccggcatccttgaattcagccgtaaacgagccgaccattccggccagcgtatcgcccatcccaccgacagcctgcgcggcagaaccgattggcagcttaaagacctggtcatcatggtagatttcggtatggtgctttttcaagacaacggtcgcattcagtttttgaacggctttttgattgttttcaacggactgatcggcaatcttgattcctgaaagccgctgccattccatttgatgcggcgtgtagatgacactgatctggcaggctggctgtttcagattttcccgggccatcaaggtgattgctgagccgtcaattaccaaggtctggccatcgtgcacgtattcaaaaacgtttttaagaatgtgcaggctttgcgcgttatcgcctagaccagggccaacgaccaccgtatcggctgctacgatcagatcgccgaccagctgatcgtcattaaaatcggcaaacatggcttctggcagctgagcatgcagagctgccgagttggctgggtcggtcgcagccgtaaccaaaccagtcccgccatagactgctgcggttgcggccatgatgatggcaccaccgaaattttcgttgccgccgaccagcacgatcttgccaaaagttcctttaaagctttcctgtgggcgagctttaatgactttttgcagaattgactcatccaagttttgcatatttgatactccctttatttaatccaataaaatccactgacgattgatccgtaaatcaatctcaaataatgttatcattaaatctaggaatttgactaacattggaggtttttttatgactgattggttaaaagccgcacaatctcaaaaagaagaatatctcaacgatttaaccacgctgatcaagattcccagcgtgcgcaatgatgacgaagccacgccggaatatccgcttggccctgccccagcccaggcattgaaagctttcttggaaatggctgagcaggatggcttccgcgttaaaaatatcgataacgtagctggctttgccgaatggggtgaaggcgacgagaccttggcaattctggctcacctggatgtcatgccggcaggaaaaggttgggagactgatccatttaacccagtgatcaaggatggcaacctgtatggccgcggcgtttctgatgacaagggcccgggaatggctgcctattacgccttaaagtacttgaaggatcatggtgccgtctttaagcagaaggtacgctttatcgttggtaccgatgaagaaaacgactggacgggaatgaagcgctactttgaagtggagccggcgccgacctatggcttctcaccagacgctgaatttccgctgatcaatggtgaaaaaggacaggtttcactgcttttggatattgatggcggcaatgaaggcgaggtagtcttaaagcactttgattctggcctgcgctttaacatggtgccgcgcgatgctgaagccacgattgaagccgtagacaatgaggccgtggcgactgcgtttactgatttcttggatgagaatccgattaccgggagtattgaaagcgatgctgacggaattaaattaaccgtggttggcaaggcggctcatggaatggaacctgaaaaaggcatcaatgccgggacctatctggcaacatttttaaagcagcttgatattcgggggcatgctggcgactttatcgactttttggccagctatctgcatctggatacgcgcgtcaatcatttcaatgccgcctttgccacggataaaatgggcgagatgacgatgaatgccggcatcttgaagtttgatcagcaggctggcggacacattgatatgaacttccgctatccagaaggaatcacggctgacgagatcttaaaccgcatcaagccggtcgcagctgatcacaattttgccatttcacgcactcaaggcgaggtgccgcactatgttgacgccgatgatccaatcgttaccacgctcctcaaggcctacgttgaccagactggcgatcagactgcccaagctgaagtcgttggcggcggtacttacggtcgcttgatgagtcgaggggtagcatttggcgccttgatgccggatacgccaaacacgatgcatcagccaaatgaatttcagccggttaatgatctgatcaagtcaatggccatctatatgcaggcaatccacgacctggtagttgaataaagaaaacatattgttcaagaaaccgttttcgtggtaaaataataacaaggaaaaccaatgtagattttcttaataaggttgttttctggaggtggcaataatgagtgaatacaagaacttattagttggtgttgatggctccgaacaatccaagatggcggttcaaaaagctatcgacattgctaagcgcaataacgccaagctgcatctgttgagcatcgtcaacggtgaacgctatccaaacacgagcacggttggctatggattcgttgatcgtgacatctacaagaaagctacggatgaaatgaccaaggaactggccgagatgaagaagaaggccgaagctgctggggtcagtgatgtcgtaactgatgtcaagatcggcaacgccaagatggaactgacggaaggatatgccaaagaacatgatgttgacctgatcttggttggggccacgggcttgaacatgattggtcggatgatcgttggttctacggctgcttacgtaattcgtcaagccgactgtgacgtcatggttattaagaccgatgaaaacaataagaaactcaacgttaaaatggaaagctatccagaaatctaatagctgaccatttgaaagctgatttttcaaaatagctaggatctggcagctgatctgccaggtcctttttatttgcatgataaaactgaactagcccaggttgcgataaggttttcagtaactgtggctgccttagtggacaagtgccaaggcgtctgctcaccagccatcgactttagctgctggtggctgatgaaatatcaatgctgtttctcattggcgattaagagtgcgttgcttaagctgtgggccgccagttatgtcagcaatagcagtacgtatatgcaaaaaatcttgcatattgtctgttgagaaaagaccattacctactttttctaaaaattcatgtataagtaggtaaaaatcattgtatattgagttagggtctcctaacattacctactattgactgaaaataccataatagtaggtaattcacaaagtcggcctggcccaatcagctgctaaatatgcaagtttacctactatttagaaaaaagctgctgcaagtaggtaaatttaagccggccgaatatacattacctactctgggcaacaaaacagcggaaagtaggtaaatttcgcggtcacggtcaagcaaagcctaatttctctcacaaagtcgaaatattttaaaggccatagtcaggtgtgcttcggtgactgtgtagtgaatgatgatgggattaatgaatctgattgcatcaaaacgcaatttaggcaactgcaaaaattaacagacggctgcaggttgatggcatccagacgttttcgactaccggggttgctactgtttatcaatgaatgattggctggctgaaattataatatctttcaatttgggaatgttatataattggcgttgcacaaggttaatggtaatggttaattgctaattattaaaaatgtaaccaatataactaaaagcattcaaatatattatgatagatttaacttactaaagtgaggtaaatctattttgagcaaaatttataaggttagccaagctgctgaactgcaaagaattggttgacgatctgaccagtattatccatgtgttttccagtcgcttatgtggcttacgtcgctatgaaaaacagattgagacggatcccagcttgaaaggcggtgataagaatgactgatacgattcaaacggtggtttacgaactgcatccgaataagactatgaagcaggttttggatgaggctattgattatcgtcgttattgttggaaccaagccttagaaatatggaatgagttgtatgttgctcataagatttacgacaaaattctatggactaaatttattcccaaacaaaataaaaagacgggaaaaattacggtaaaacatattgatgttcatctaaatcctgctccaaattggaagatggttcgtgacattatggtacatgacaaagcggattggcaatatcagcgctctgcccacctgcttggccttgccgttaaggacttgggcaatgcttggcagaatttttttgacaaggcacagcctgattggggaaagccgcattttcattcccgtcgagaaccacgccagggctttaaaagcgatcaaagcaagattgtagacggtttactgcgtctggaacgtcctcaaaaaagtctcgttccaagtgaagaatggcgagactttaaattaagtgagaaacctttgtccgacaaaatcggcatagtcagctatttccgcgaaaaaggccgttactatgcggctgtaccgtttaaagtcgccaataaaaaagcattacccaaaactggtaagaatacggcagttgatgttaatgtcggtcatttcaactatacggatggtcaacaaaacattcttccaaaaaagttggaacgcatttacgaaaaaattaaacattatcaacgtcaattagcacataaacgggttgttactggcagtacgcaaagcaataactatttgaagacgagaaccaagcttcaagcatgctatcgcaaagcgttcaatatccagaatgacctcatgcacaaatttacgaccaaattggttaataattatgatcaaatcgtaattgaaaacctgtctgtcaaaggcatgctaatgagccatgtagcttctaagggcgtgcatcgttccatgtttggcaggtttaagcaaatgctgacttacaagtgcaaatggtatggtcgcaaactgattctagctgacaaactatatccatctactcagcgctgtgcggtctgcggtaccattaagcgtggcgatgaacgcgttacgctgtatggcaacaagaagcatggcaccaaacataatgagtttgtttgctataacaaaaaatgtcccaactataacttagttgtagatcgggacaccaatgtgatgtttaatcttttagcactgattgagcatccaaaattgaataaggcattataaatttaaaagaaaggaatgttaatggccttgagcaatcgaggccacacgggttagctgtacccgaggattggcgagagccttccttagatgttgcaagagtgatgtttcggcatctgcgttggtcaatgcgattactccctcgttggaatatcggaatatcggcgataacggcaataagaaaaacgtctgtatttaagtcttcggatatgtagttaaaatcgtaaaataactacattgcacacgttttttgcagcggagttgaggaatatgaactcgcgcacgaaaaagtctttgggcattatcgcaacgctgctggtcgtcgtaattggcgtgatgacctggcatcaaagaactcattttaataagaatacaaccattaatggcgtggccgtagggggcttgaccgcacaacaggcttatgacaaggtagcaaagaccaaactgaccaacgaagtaaagctggatggcaaggtgatctatcaaggccaagccagcagtgccggctttactaagaatgatctgagcaaattccagacggctctcaaaaaacaagtcacgttctttccttccagcaaggccaagaacatcaaggttgtcccaagtcatgtcgataagacgcgcattgcagcgatgcgggcagctttaaaggccaatatcgaaaaagaaaatgctggtcgcaaggcgccgattgatgccaaagcggttttggcaaatggcaaggttacgatcaaaccagcccaaaaaggcaatcgttacgataccgaagcgcttttaaaagactttgatcaaaatgcggccaacgttaagatcgtgctgcataagcaataccaacacccgctggcagccagcagcaaaacggttaagcaggaagccgtcaagttgaaggcgttgcttaatcaaaagctgacgtatcaagtcgaaaacaaaacctatactttaacgaccaatgacatcattaccaaagccacgtatttgaatcaccaatatcaatttgataccacggctctagacaagctggtcaaaaaggtcaacaagaatcagtcgactctggacaagagctttacgtttaccacgcacagcggcaagcagatcaagacggcaacgggcggttcatatggctggcggctcagtgaaaccaaggctgcggctactttaactaaggccctgatcagccaccagaccagcgtcaatgccaaaaatgacgtctatggtgttggctataatactggcggcattggctatggcacgacatcaaatcatggtatcggcaatacctatgcagaagtctccatttctgatcagcatgtttggttctacaaggatggcaaatgcgtttttgatgccagcgtggttactggtaaacatagcagtggcgatgatacgcctaagggagtctggtacattatgtataagcagcgaaacactactttacgtggtaccagcgacaacggttcagcctatgcctcgccagtcagctactgggcaccgtttaccgatagcggctgtggattccatgatgccagttggcgaacgaactggtcaagcacggcttatctgaacgacggctcaaatggctgtgtcaatatgcataccagcgacgcgggaacggcttacgattcattaactcaatatgaaccggtaatcgtttattagctttgatgataccgtgtccaattaaaataacggactttaggagtcaatttaattaaaaaccgtactgtctcaagctttttctgagcctaagacagtgcggttgttttattttgctaattaatttcagcctggctcaagcaattgaggcaggttttttagtgccaatcagtgttttttgacatatggaatatcaggagcaaaagaaaggatgatttaactatgatcaaaaaacaaatctggctgacaagtctgataacgatgacgatggttttacagctgatggcaccggttttggcagcccagacagcagtaggcaatgagccgaatggagctgattttaaagctcagctgcctgcggtcattaattcttcaagtgatggcagcatgggggatgactttaaaaacaactggctggcaaaatgtcaaactgcctatcagcagggattacaggatgccatggccgacaagccgcagctgccgcctgatcaagaaccgattaaaacggcttattgtcaaggctttaaagatggcagccagctagccttggagcacgctgattggctaaagcgcgtgcaggaatcgcagcaaaatgtcgtaccagtcttgaatgatcagacagctgcggaccacggtgctgataacaatgaatcagcaggcaatgaacaggaagctgatcaagacaatgctcagctgtcatctgatcaggcaaccagtgaagtgccaagcgcaaatcagcattacgcgacgctttgtccgaccagggatcaggctcggtttatcgcgcatctgggaccaatcgcgcaaaaagttggccaaaagcatgatctttatgcttcggttctgattgcacaggctgccttggaaagcaattggggaaccagcgagttaagccgagttcatcataatctattcggcatcaagggaacctggcatggtcatggcgtttcaatgatgacgcaggaatgcctcagtggtaagccagccatcgtcgcagggacctttaagagctataccgatgaaaaagcatcgttaagcgattatgctgccgttttggatcagccgatgtatgccggtgctcatcgcagcaatgcacctacctatcgatcggcaaccagttttttaaagggtcgctatgctacggatcctaagtatgaccaaaagctgaatcaactgattgaagcctatcagctgacgcgttttgatcgtccagtcaaccaagcagccaattcgtcgcttagtcggccaagaacggatcaacgtcatcatcagcatcagacggctgccttggttgaatcaaggagacccacgcaaaaaaagcagccgcaaaaagccgttcatcagcatacctggctgccggttgccagcgggatcggcagtgtcggcattttagaggtgctgcggcgaatgtatctaaaataaaaaccaccgtgtagtcaggcgacttaaacgatggtttcattaatctgctggctgatcggtaatgccgagtcaatcagcggtttaaatgcagcgattgatttagcgaatctgggccagccgctcgtcaatcatccccagaacagtggcaacgttttgcggatcttccaggtcgtatttatccagatcgatcttcatcttaggactggcattgtattcttgataccagtcttgataggcgctccacattttgtagtagtagtccttaagctcagggttgttgtcgatctgttcatagtcgcggccccgttttttgattcggtagagaatggtctcaaaagaagtttctgaataaaccatcaaatcaggcgcttttttaggcagcttgttcaaatcgctcatcatattgtcaagcagctttaggtaaacgtccagctccgtatcagagatgttgccttccgcgttgttttccttggtaaacagcgcgtcttcatagattgagcgatccaacacgttgttgtcatcgcttaatgcctgcttgatcatggaaaaccgcttgtttaaaaagtagatctgcaacaggaagccatactgtttcggatccttgtagtaaagcggcaataccggattttcgcccaccggttcaaaaaaggctttcgtgtgtaggtgatcggcaatcttagccgtaagcgttgttttaccgaccccaatcattcctgctgtaataatcaccatgttggcccctctttacataaaaattcaacttgaccatcttactacaaaatatagtgtctgcccataaaataaatccatattttgtggataagtgacagacaaggcgggtcaacaaggcataatctgggcaattgagcgcatcaaaaaaatttgccgtttacatttgaaacaggcaaaataaaaatagcaatttttgagaggacgttaaaaatgattgaacacatgaatgagccacagattcgcgagcaattgacaatcagccagcagcagggaaccttagttgaggtatataactttgccgatgacgatacctttaacgttggattcgtgattgccatggatccgctgttcgttttactgatgactttggattgggactgcaagatcaatggcttgacgctggtccgcattaaaagcattcatgccgttagaagccagactgactatttgacgacctgttcttataaaagcaaggtagctcaagaatatgggtattttgatatttttggcctgcagcgttttttgcgtgagcatgattttagccacgtcaacttgctgaacacgcttttgaaagattccattgaccatgagctgccggtggtgattggtacgcaaaaatacaagggccgcgatgactttgagggaatggtgcatgaattgacgcacatcggcttgacgctgcattattataacgagcatgacctttcatcgctttggacctatgatattttactggcccagattgactatctgcgggtacgtggttttcaggctatgcagaccaaggcgattatggaaggcgtttttcaccaaaattaaaaaaattattggtttattacaattatttaaaggtcagcaggtaaatatgtggtaaactgatccgtaaataggtttactaatgaaacaagaggaaagcacacattatgaaacacaaagtaacaattcgcgatctggcaaaggctgctggggtttcggtcacgacggtatcgcagattttaaacggcaaggggcagcgcttcagccaagctacacagcagcgagtcttggaactgcgcgatcagatgaattacgttcctgattttaatgcgcgcaatctgatcatgcgctcttctaaaacgattggcgtcttggtacctaacattggcaatccattttttagtacgtttattcgcggtgtgcaggaagcagctcgtcaagccgagtttatgccgctgatttttagtgccaaccatgaggaaaaactggaacgctactatcttggccgcttgattgaacgggctgttgatggcttgattattgccagttcttcgattacgaccgacacgattgaacagctgttaaagccaaatgatattccgtatctgttgttcgaccaaaacgaggccaatggtggggaccgacttttgatcgacgactatcaaggcggctatctggcagctgagcatctggctggtctgggacatcagcacgtggtcagcatcatgccggaaaacatgaccgacaacttgaatcaccggctgcggggcttgattgacggcctgcgtaagcaccatgttgattttaacgagcagactgacgtgatttatggcgagctgaccaagcatggcggctattcgtgtactaagggcgtgttggaaaagcatccgacggcagtctttgcggccaacgatgaaatggcgatcgggctttaccgtggcttggccgaaaatggcgtcagcgtgccagatgatatttcggtagtgggttttgacgacattgacctggctgaatacgtcacgccaaaactaacaacgattcagcagcccattcgtgaaatcggcgaacaggctaccaagatgctgtttaatcggattcaaaacccagatacggccattcagacttcctactttggcgttaaattggtggtcagagacagtaccaagcaggcatagacttgtttgcgcataagctgatatgctaaaatagtgtagttaagaaatactgatttaatcacacataaaagcatttactaatttgctgattgcatcaaaacgcaaaggagactttgaaatgacgaataaagttacggtcgttggtagtctgaacgttgatacgacgctgcgaatcaagcggatgccattgcctggcgaaacgctgtcatccgaaagcaagagcagtgccgctggtggcaagggggccaatcaggcagttgctgcggcgcgtgctggtgcagataccaagtttgttggccgggttggcaatgatcaagcaggtcagtttatgattgactcattaagcgaaaatcatatcgacacgcgctacattaccaaagatgagcatgccggaactggctcggccacgattctgctcgatgacaatggccaaaacagtattttggtttatggcggggccaaccagtgcgtttccccagctgatgttgataatgcccaagctgccattgcaaacgccgattttgtgatcgcgcagtttgaaacgccgcaggaaacgacgctggaagcattcaaactggctaagcagcatggcgttaagacgattctgaatccagcaccagctgccaagatcgaccctgaaatcttgaaggttacggatctgattattccaaacgaaaccgaatgtgccacgctgaccaacgttatcattgcagacgagacttcaatgcttgaagctgctggtcactttgcacagatgggggtcaagaacctgatcattacggtcggcagcaagggtgctttctactgcacgcaaaacggctatgactttgtgccagcctttaaggtacacgcggttgacacgacggcagccggcgatacgtttattggtgccttgagttctcaattaaagcctgacatgagcaacatcaaagaagcattgatctttgctcagcgggccagctcaattacggttcagcggatgggagctttaccatcaatcccaacgttggcagaaattgaagctgccagtcaaaactagtcaaaaatcaggctttttggcgttaccgatgataaaaagcgagatcaacgtctttgatgacttgatctcgcttttattaagcttttggaaaagaaggtcttaaaaatgacagtctataatgtaaatcttgggattggctgggccagcagcggggttgagtacgcacaggcctaccgatctaaagtgttttcccgcatgcagattccgacaaagtttattttttccgatttgattttggctgataacattgctgaattgacgcgcaatctgggttttcatgatcaagacgtaatctggctctacaatttttttaccgatgtcaagatcgcgcccacaacctatccgctaagcgagtttaagcgcgcacagcattttgcggagcgcaatgttgaagctaccgtgcagaatttcgcggatggtaagcaggtagtccactactggctgcctgacgaaaacctaagaattaatgtccgtatctatgatctggcaacgcaggccattgactacgccgaatacgtggttgactcccagatggtgcggcgagaattttattcatacataagatacgtaaccgaatacctcagcgccggcaatcatgtctatgctcgcgacttttataatgaggatggctcgattgcctatcatcaatatgttaatggcaccaacgaggtctttgagctgaaagaccagatcttttattctaaaacggctctgtatgctgaaatgattcgccgtctaaagcttactgctcaggatctggttattttggatcgtgaagacgggcgcggactggtcagcggccagctgtggtatcagatgcattcgccggcaagacttggcgttgtagtgcatgccgagcattatgatgagcactataccaaccagacgaatattttatggaacaactattacgagtaccagtttacgcatgccgatcagactgactgttttatcgtctcaacgccggcgcaaaaacgcgtcctggctgctcagatgaaaaagtatcagcatcaagcaccgcaaattgtcgcgattccggtgggcagcctgactaaactgatgccgatgccatacaagaaacggcgccggcattcgttgatcacggcttcgcgcctggccagcgaaaagcatgttgactggctgatcaaggctgtcgtgcaggctaaacgaacaattcaagacgtttctttggatatttatggtcaaggcgcacagcacaccagtctgcagcgcttgattgatgagctgcaggccaatgaatacgttcacttaaaaggacagcagaatctaaccgctatctatcagcactatgctggttatattgcggcttcaaccagcgagggatttggcttgagcttgatggaagccgtgggatcgggtctgccgatgattggctttgacgttccatatggcaatcagacgtttattgatccaaatcaaaacggctatcggctgccgtatcaagcagattggtcagaggaacgcaaggtaagggaactggcaaacgcgattgtcagcctctttagcgatgatcagcgggcggctggttttagtcagcactcttatgaactggcccagccatatctggatgaaaagattgctcaaaaatggcgtgtactggtaaacgaggtggcaaaatgataaatctgtttgataaatgggatcaggccgcgcgcgatttcagactggcccagctgattgcgcaattaaagcttcccacggtggtaattcatgatgatggctttttaccgcgcaaagttcaatcgccgctgcagtactattgtccgcgttcagacgaaggtcagccgctttattttgatcagattccggtgcctcgtttttggcgaatcgttggcagcagcaggggcgcgcagatttatgatctgaatcataaacgcgcggacgttgtttttaccaaaaacgacaatacgcggcaggttaagcaggtacgctggctaaatgagagcggtcagctgcagtgggtcgatgagtatgatcgctttggtcatttgtttgccaaaaccagttgggcagataatcgggcctggctgaagcaattttttgacgagcagggccaggtagtaatcgaatcgcacctggacaatggcagcctgtttttgaatactcgtcaggaacgtcgtcattttaagagtctgccggattttgtcagcagctatctgcaaaagagcggcctgaatctggaccggattttttataatacgctaagcaccagttttctaacgacgctaaagctgcctaaatcgggtcatgatacgctgttttggcatgaaccggtgcaaaataaactaccgggcaatcttgactacatctatcaaaatgaaacgcggacgcggcatgtgattgttcaggactatcgcgtctggcagaatcggcaaaagctttttaaaaccaatcagcatgtggcgaccgactatttgggcatcgtctatccgcatccacggggaaactcgctgcggcccgcgattctgatcttgaccaattcagaccagatcatgcagctagaaaacctggtaaagattttgccgcagtttgagtttcatattgcagcgataactgagatgtccgatcgcttaatggggatgcaaaagtacgaaaacgtctatctatatccagtcgttaagatggatacggcccgcaatctgatgagaaaatgcgatatttatctggatatcaaccaaggcgatgagatcttggatgccgtgcgggcggcgtttgaaaataacatgctgattctgggatttaatgaaacaatgcatgagccgcgcctgattgcggatgaaaatcgctatgccgcggctgaatttgataaaatggctattaagatcgtccaggcagtctcgcaggccgatgaaatgcagcgcttgatcgacacgcagcgccagcaagccggtgatgagccggttgcccgttttcaagctgggatcgaggccctgatcaacgattgaaaaaccaataaggaagtgacagcatgccgactgacagacgaccaagctttccccgcgctctactgattttttcggcgttttgtattttgattctgatgccgccagaagccgcgcgcaatattaccgagcatccccgactgacgattctttgggtgattttgtatctaggatttttcggactgattattgcctggggacaaagactgtatcgtcactatgaccattttaatcatcgctcgcaaagtttttttgcccatgccaaaacgattcttggcggctatatggcaattgtagctggtgagatcgttttgggtaatctcaaccggctgatctatcatcaagtgcagacggccaataatcaagccatcattgacaccatgagcggcagcccgatcgtcagtatcctggtctgtttttcagccgtttgcttgacgccgtttgccgaagaactgatttttcgcggtctgtttatgaatctgttttttaacgctcgcgatttttggttgccaattctgctgtcggggctggtttttacgctggtccatgccagtagcaacattatcagttatctgatctatttttatatgggctgcgtactggcttacgtttaccgttctacgggtaatctgaccaattcaatcgggattcatctaatcaataatctggtgtccatctttttgattttgccagcagtgatcaaatagcagtttgattatgatcggcagataaaataatttttaatgaattcttgcaaccgcttacagaatgtggtatattataggcgtggaaggataagagatatattcagcgaagcgcgtgatgcggtttcgactgaagctggtggctgaagtcatcgagtaggcctagaagcagcgtaagagtgaccagaagcatcggattgtaattgtgtggttaccagcgtgcgccagtactaaataaaaataatgcagctttgcggaagattgaatcaaaaatgtgtttaagttaagtatgaaaattgtatgcttggcgcaaagtagcagattccttcccaaagtggctcgtctcaattaagaggcgggcctttttggttggagttaaatatcagttgttttagcaagccactgggaccgatacgcagatcagtcaaccgcaatttcagtgaaaaatggtcggctgatctttagtgggagcttgctgaatcaccattgcggcaaagtgctcaacgggaagcattattcataaaaatctggataaaatatttgaaaaaactcattaactacttttagaaaaaagcgatgcatagtaggtaaaaatcggtgtatatctagttagggatccctaacattacctacaattggccgaaaatccagtaatagtaggtaattcacaaggtcggtctaacccaatcagcccataaatatgcatttttacctacgattcagaaaaaagctggctgaagtaggtaaagttcggttaactgaatatacaattacctatttcttattaaaattcaaaaaatagtaggtaaatttgcatcttccagcgaactcaacttaattttcttcacaagatccgccagctgatgcgataggacccatcatcatgtgaaccttagcagtcaacgaagcagagcggctgcgttcaaggccttgattttattaaaattatcctgatgcaaaatatagttggcttttttgaaaacagttcttgaaaatcattatgaaagcaagtaaactagccattgctgtgtttttttagaataccgaagtcggtgaagggggtcaaatgactaaatatcgcttacaatcgctgctgtttgtctttgtagcatttatgctgggctgtaatgaatatatgattgtcgggatcttgcccgatattgcaaaagaatttcatgcctcgctttcatcacttggctataccgttactctgtttgcactgatctatgccatctcgacaccaatcgtcacgacattagcgagccgctttaatcgctatcatgtgctcttggtcttactgctgatcttttttatcggcaatacctggacggcgctggcaacgggattctggtcattgatgggttcgagagtgcttacggcgacggtagcaggggctattatctcgttagtactggtcatggccaactatattgcaccgcgcgataaacgggccagcctggtctcgtgggtatttgctggttttagcattgcttcgattatcggggtgccgattggaacgacgatcagcacgactttttcgtggcatgacagtttttggatgattacctggctgacgattctgacctttgttatgctggcttggctggccccccgcgatacgccacaggttcgaagcagtctacgctcaagttcagtctgtttcgcgattcgcgggttttgatgggagttgcgtttatcgttttggtatgtgctgctgactatactttttacacctatgtacgaccgctgtttaccaatatgatggactttgataatacttggctgaactggcttttatttggtatggggatcttctttatgtttggcaacaagtttggcggctacttggctgatcatcgtggcatccagtcattacctaagatctatgttttaatgacgctttgtctggcagggttggcaccaagctttcaatatcgctggttgggcgtggctctgattgccatgctttgcgtgatggtggcctgttatggatcgtcaacgcagctgatgtttttagacattgccgaaaaagactatccacagtcgcttgatctggcatcttctttaaactcgatctttgccaatatcggcatctcgctgggatcgtttacggctgctgaaacggtgcattatctgtctttaggaagcgttggctacgtggctgccgtctatggcttgctgacggtactggtgattactggtttgagtcggcgctatcgcaatgcgtatccatattgaagttgaatatgaaggccggcatgagaaatcagtcggctttttattttatcggagtttagattaaaattctcacattattttttaattttataattgacatctaataaagcgcgtggtaaatttagaacatcaaaacagaggaggcagaaaatgatgtttgctgaaaagaccagtcaattgtccaatattattattattattcgcattattagctaggtgatgcggatcttttgacgtgttcgcatcaccgccctcgatgatgcgaacggttcagcaaatggttgtctgccagcagctgactgttcatgaaacagtcggctgcttttcatttaggggtgatttttatggaaagcgacattagtgacattaagaagccaagctgcagaaatacgatcttacaaattaaaaacacaggaggatggctatggaaaacgcaacagaacgaatgacagtgaataatgcaaaactggaacgcgacccggttaaaacagtaattttggcatccatgatggggacagctattgaattttttgatttttatgcatacgggacggcttcggcagcctattttccgaaggtattctttccccagatgacgccattattagctacgctgctgagtctcttgacgtttggggttgcctttgtcgcgcgtccggttggctcatttgtttttggccattttggtgatcggctgggtcgtaaaaaaaccctggtcgtatcgttattggtaatgggggttgccacggtggcgatcggctttattcccggttatcaaagcatcggggttggtggcgcgttgatgctttgcctttgccgcttcgttcaagggatcggcctaggcggtgaatggtccggggccgttttggttgctacggaaaacgcgcctgctgataaacgggccctttacggtgctttcccagaagttggggcgccaatcggtttctttatctgcaatggtttgttctatgtcttggaaaaaatgctgaccccagcccagatgatgagctttggctggcgggtacctttctgggcctcgtccgtcttggtcgtaatcggtctttacgttcggcatcgtctgcaggaaacgccattgtttaagctggcccaggaacgcgacaacacgacgcgttcgcctttaaaagtagtctttaaggaaaactggcgtgagatcttaaaagggaccttcttgatgggtgccacctacgcaatgttctttacgctgacgacctggtcactttcatttgccacgacggcactgggctttagtcattctgagttcttactgctgttgatggcagctatcgttgaatttgccgtattgatcatgacaacttcggttctggcggacaaggttggacgcaagaaagttttgatgacggcttcggtcgcattggtcgtcttctcattggtcttcccatacttcttggaaggtcagcataatatggttggtatgctgctgttcttaggtctgggctttgtggtaatgggcacgctgtatggtccggttggcgcggttttgccagagcttttcccaactaaggttcgctattccggtgccggcatcacctacaatctggccgctgtggttggggcagccgtagcaccaacgatcacgacttggctgattgctacgtttggcctgcactacgctgggatgtacatgtttgtcttggcagtagtttcggtagttgcctgggtattaacgccagaaactaagaatgtcgattacacgaaataatgctttaatggagtctgcaatgaaaaatgcatcgtcgaaaatgacggtgcatttttatgttaagctaaaagaatcaaatctagttaaggaagcatttcatgaacaactggcagacattttattcggcaggcgagcaggccattattttagcaaagcatcagcgcgggatcggtttcccggcagaactgtaccaacgggcgctcaaggctggtaaatcaattcctcactatcagcgcatcgtagcttgtcaacaggcacagctgccgcttttaactgaagatattcagaatctgacggctgtgatcaatcaccagccgctttcaaatccagtttctggttcagctaagcagcatcagcgcgccaagtcgaaaaagcagcagcccatgactacaagaccacatgaaaaaaattggtcaaaaatgcgcaccaagtctaaaaaacagcggccagtgaatgccaatacagatacaaaaaccagcgctaaaaaacagctgcagactatgctgaagcgttacgatggtctggtggccagcgcagaagaaatcggcgtaatgcagtttgaaaaacaccgccgctaccgcaatcgcgcctttgaggtacttaatgatccggatgcaacgatggcagcgatgcatcgtcaggcaaattatctggaaggacagattcagcgcttagaagaacgcatgcagcagcgaatgttttagctctagttatctattaaaaatgaaaggcatgctaccgatttcaaatcggggcatgccttttagtcagctaaaatatgctaataaatgagttaatgtgccgcattcataaagaagatagccgccaaggccaagatagaccagtgcgctgagttgattgccatgtttttctaaaatgtcagctactactggaagatgaaccaaactcatcgcaaagcaaaacacaataatcagcattaaagcaaagatcagtagggtaacgtagatttcttcaagaattgtcatggcagcaaatagtggtgtatagataccaagattatcggcactgcatgacgtaaccgtaagcagagccacgtaactgcttagtttgaagccagttaagccagcttgaatgttttgatcgtcgtcctcattggaaaagagcagtcggcagccaaaatacagcggaatgatgcctaaaaagcccaacatccattctgcaggtacggtatgcagaattagtcctaaaatcaaagaacagcttaccaaaatgataatcccaatcacattgccaatcaggatatagcggtattttttaggcgccttgctttgcgcaaaaaaagccattaagaagccaagatagtccaggttagtcgaaagataggcagttacagccgaaataatcgtgttaagcatgaaaaacttccttgtagattaataaatgagttgttttagccagttttgatagtcacggttggttggccaatgctgacaatgataaacgagtcgataattgtagtcaatgacgcttgtcgagaactaagtcgattgactgaggggtgggcgagcctggctgattggtgttgctagggcacggttgatgggatttggcatgagcaagaccatgcatggaagcgtcagtacagaggagatggtcattgggctggcttgcggctgtatcggcctgctgatctgtgtgctggattatccagtctatctttacgtcagcaagaagcagtaaatttagccaatgattttggtacatggggatgttatccagaaggctgattagcgattcaacatgagaactgaactctatgttgatgaagaacaaggcggcgaaaagtttacgactttataagttaaggttaaaaatgtgattgagttaggcgaaaattgctgcttgaacaatgactggattggcgttaaagtataaagaatctcttacaaaaaggaagtcgaaagcatgcttcacaactttactatcgatcatcaattaaatcaccgcacgattcgtaaattcaaagatcagccgcttacagcggaacagttgacaacgctgtttgaagttgcacggcagacctccagcagcgagtttctacagcagatgacgattattcgcgtaaccgatccgcaaaaacgggccgcgattcgtgccgtcagcacccagccatatgttggagcagaaggcgaattgctgatgtttatcactgatctgcatcgtaatgagctgatccggcatcaccagggaaactttgacgatcggcgtattgaaaaaaccgagatgtttctgcaggcctatgaagataccgtcctagccgtgcaaaacgttttgaatgccgcggaaagcatggggctgggcggtgtgattctggggtcgattcaaaatgagcctgctaagatcatcaagacgctgaatctacctaagcatacttttccaaccttggggctgcagctgggcgtaccggatcaaaaaccgcagctgaaacctcgattgccattggacaagatcgtttttgaaaatgagtatcaagatattgatccggccagcttaaaagactatgaccaaatcgtaaatacctattatgatctgcgggatgccaatcgacgcatcgacacgtttactgatcaggtcaacggtcccaagctcaatggcacgcctcaggttcgcgatcagattgctcaagtcctccacgatcaaaaactgtgcctggacttataaaatatcctggcttcgttgaaaatgactgattaattcgttatgatcaaactataaggtggtggtcagatgcctgaatggtttgaaaagacaatgcggattatcgttttaggaatctttgtttttggcattatctggtttggctatctgattttactgaaagtcagtggtcaatgaccagcacgcttaaaaagcgaccggcagcagtgccgatcgcttttttgacgactatataataaaaaaacagccgtatatcaacgactgtttaagcaatgccccagacaggattcgaacctgtacatggttacccatacaacgacctgaacgttgcgcgtctgccagttccgccactggggcatttgaaatgttaagttaaagctaaaaagccaatgccccagacaggattcgaacctgtacatggtcacccatacaacgacctgaacgttgcgcgtctgccagttccgccactggggcatctcaattttaattgatcatctgttgcctaagacaacgatattaactatatcgttaatatcaaaatattgcaagcgaatttaccaaaaaaaatcaacttttttgattcaacagctgcaccatcgttccataaccagttaagaccagaaatttaggtgcgacttggacgttggcgacattggtggtaaaacggacgccaacgattccatcagcacctttttcacttgctttttgcttcagcttctcttcaacggctggaaaaagctgatcaaaggcctcaaattcatcgatagcctcgctgggcagcatcaggtgactggttgcattaacgatgccaagcgatttatgcggtgatggcagattttcggtcattaagaacatggcttcacttccttaaaatttatcaatatttattttagcataaagattttgcatcgggcacgggtgcggtatagtggttgtattgaattttgaaaccaggtaaggagaggattatcatcgggcgcatcaggatcaataatatgaagtttcatacctataacggcgtatttgccgaagaaaagaaactcggacaaaagctggagattgacgtcgacatgcagtatccaattgaagaacgggttcagcatgatgatttgaacgaaaccgtcagctatgcggatgtctatgatactattcaggattttgttacgacgcattcttttgacttgatcgaaagcgtggccaatcagcttttaaaaaagattttagcagactacccaagcttgcagcaggttactttaagaattcgcaaatacagtgtgccgattgatggtatttttgacaacgtggaaattgaagtagcgggggttaacaatgactaagcgggcctatttaagtatcggcaccaatctgggcgaccgttttgacaatctggcgcgtgcgttggacctgttgatgcgcaatccggccaatcaaaatttgaaggtttcgccaatctatgaaaccgaaccagttggcggtgtcaagcaggatgattttttaaatatcgccgttgcgctggataccaatctaacaccgcttgagctgcttcattggctgcagatcattgaaaagtcgctgcatcgacggcggctgattcactggggaccacggacgatcgatctggatatcgttctttacgaagatgaagaatggcagacggcgaatttaaagattccgcatcctgaaatgggcaatcgtcggttcgtcctgcagccgttattagacgtgatggatgatgatccggtacaccaagcttggatcaagcggctgctgcaaaacaccacggatcataactggattcgtccagtagaataggggaaattatggatcaagaaaaaatcaagcacgcggtcagtgagcttttagaggcatttggcgaggatccgcagcgtgagggccttaaagagacgccacagcgggttgccaagatgtatgctgaaatttttgcctctttgaaccaccagccagaagacttcagcaattataagacttttcatgttgatgatcagccagaaatggtcctgatccagcagattccgttttactcaatgtgtgagcatcacctgctgccgttctttggcaatgtcagtgtggcttacgtgccacgcgacggcaaagttatcggcttaagcaagattccgcggctggtcgattttgtcgctaaaaagcctggaatgcaggagcggctgaccactgagctggctaatgagctgcagcggatcttaaaccctaaaggaattgcaatcaaggtcgcagctcggcatatgtgcatggagatgcgggggatcaacaaggctggtcaatttacctatacttctaaatttaccggtgagtttaaagatgatttggcactgcgcaaggaatttttaatgcagactaaggatctggtcaaatgagctatgaacgaatcattgccagtctaaatccacagatgcgcggtggcgataacgatcgggtaggcatgctcaagcgggtattagcaaagctgaatcatcccgagcgccagtaccgaatcattcatattgctgggaccaacggcaagggctcgactggtagtctgatcgttaattttttgcgggctgcgaatttaaaagtcggtcatttcagcagtccagcaatggttgatcagcgtgaacagattcaagtcaatggtcaaatgattacacgcgcggattatgttgcggtttatgaaaaaatcaaacggcagctgcctgatgatctatcaacggctgatctaaccgtttttgaatggtggacgctgattatgctgcagtattttgccgaccaaaaagttgactgggccgtcatcgagtgcggcttgggtggtcaaaatgacgccaccaatgcgattgaggctcccgaactggcgattattacgcacattgcgcttgatcacacgcgaattttaggacctgccatcaaagacatcgcacaggccaaagccggcatcatcaaaccgggcagtcaagcggttattttagcgccacaccaagaaccggctgcttttcaagagattttaaaaaaggcgcaggcatgccaggtgagctttttggacagtgaaaatcaggtcgcagtcaaggtgttggatcaaagctggtcgaaaacacagctgcagatcaagacggcagccattgactcagtatgcagttttaggcttttaggcgcttttcagctggataatctcaaaaccgcattgacggctgtcgattggctgaatcaaaccggtacagaaatcacggcagaacagatcaagaaagtgttggcgcagattacgattcccgggcggctgcagcagatcggtacgcaccctttatgttttttggatggcgcgcataatcctgacgcggcatcacggttgattcaaacgctcaatcaattgggatacccccaaaagctggtcttggtactgggatttttaaaggacaaaaacgttgctcaaatggctcggcaatacgcgcagttggatgcccagattattttggcaactcccgatcagccaaagcgcgctctgccagctgaggagctgcatcagtatctgccgactgccatggtgattgatgatgcctgggctgcctatcaaaaagccgttgccttggcaggtccagatggcatggtgctggtaacgggatcgttttatctgatcaaagaaattgaggcgagaatttaagatgacgacacagagttttgtaattgcaactcataatccagccaagcagcgcgaaatcggtcaaattctggaattttacggcgctcgtggaattgcctatgatcaattgacggcgcggcaagaatttccagcagaaggcaagcgcagctacgaagaaaacgccacaaaaaaagcccagttcatcagccggctgctgcctgatcaaaacgtgattgctgatgattctggacttgaattgaaagcttttccgcaaaagtttggcattgagactgcgcgtcagctgaccccgcattttgccaccaaaagcgatatgaatgatggtattattcaattggttaatggtcatgaccgacattttgtcatgaaaaccgtaattgcactggcaagaaacggtcaggtcgttcaaattgctcatggagaattgagcggaacgattgccacggctcagcatggtaatgagggttcaggattcgaccgcattctgattccaaatggtcttgatcatacgctggccgagatggattttgccagttgggttgcctattgtcatcgcagccgtgccgttaagaatcttttagacctaatggaggaaacatcgaaatgaaaattgttgaaaatacaaacattgctagcctgtctccgctggcctcagcaatttatgacaagctggctcataatcagcagatgctttttttaacctgggaatgtgaagatgatgaactgaccaatcaagttgcccattttttgaatcattttgatgctgccattgcgcatttaaaaggcaaagttgagttcatgctgccactgacggcctttcatttaatggctcaccgtgcaaccagtaaatggccgactgataaggaactgtgccgctcgctggctaagattgcggctaatcataccgtatattggcgggcgggccggtttgactttaacgtttcggccaagccgatcatttatggcattatgaacattacgcccgactcgttttatgatggcggacgctacaatactccagaagccatgcgtgaacatattcgccaaatggttgcggcaggtgccgatgtgatcgaggttaacggtcaaaccaccaagccggggggatacaaggaagtttctcctgaagaagaattggcgcggatcgttcctggaatcaaaatgctgcagaaagaattccccaatgtagccattgccgttgatacctataagctgccggtgatggaaaaagttttggcaatgggtgttgacattatcaatgacgtacgagccttcgatgatcaacgcaaactgctgctgttaaagaacagtcgtgctggcttggtaacgatgcacagcagccgggaccgtgagtatggcaatctgaccgttgaaatgaagcacttctttgagcataacctggctaagatctcagaagccggcattaacctggatcgggtaattattgatgagggaatcggctattctaaggttgccgatggtgagcaggactatgcaatgatgcgcaatattgatgaatttcgctaccttaaccggccgatcatggttgccatctcacgcaagggttttggcaagaagctgtttgatctgccaaaagatgagcggctgcccgttaccctgattgcggaaacctacatgtatctgcatggtggtcgggtcttgcgtgttcatgacattgaagaaacgcgtcagctggtaaaaatgatcgatacgattacggctggatattggcagcgcggctgatcaacagtatcggcactgactaagatcgatcgcatcgttaggtcattcttgcggcgttggacggataaaacctgattaattggctttgattaccaaatattgataatgacgttgatgattaagatcaggtaggtagccccaaacagccagggactgccaaaggtttcgcgtttttgtcgaaaggcggcctcaattgcaagcagcgcgactagcaaccaaatgatacggccgataaacagcagcggatgcagacggaaaaacattagcgtcgttgccagagccgtaatggccgcgacaatcaatgccaagcgcgtgagaacgaaccagtcactgacgcgcttttccattttggcatgcagtcccataaaagcagtgacgaaaagagcaattgcacagatggcatcgattaaagttagggttttgatcatttgaaaggcctctcttttaaagttttagctgtttaaattttatcattttttacctgataaaaccgggtttgatacgtgatgcttgaattttgccgcaaaaagagtaaactatcatgtattgctatcaatcgggaaaattgacgaggtgaattgcatgctttacaagattggcgatgttgtcaaaggcaagaagtttggccccatggatcatgacttttccggagaagtcgaaaaggtttatgaaaactcgattatgattgccattcaagactacgatccgtctgaccagagcggtgtcaacgaattgaacggtcgcgcaatcattcgcaaagatgaggccaagatgttaaaggcggttccacggacggcagaagacaaggaagccgaagtggaggcagagaaagaagaagccgaaaaagaggctaaaaagacgactggtaagaaggcgacgcgggcacgacgctcttcaaaggtacgcattgaaaagccagccgacaagaattagtttgaaaaaatcaaattacttgatgacatttttaaattaatgaggtatacttgctaagtaagttatttttacttagcttttgcgggtatagttcagtggtaaaacccaaccttcccaaggttgtgtcgcgagttcgattctcgttacccgcttagttgaaaggaatgagcagactgctcattccttttttatttatccgataattttaaatagcgggtttgtccgattacgattgaatcacattaaacggtgatggctcaccggcagacttggttgatcgatattggaatgtcttatttaaaaccgtgatgtctcgttggcagattagttgactgccatcatgacgattattatgcagaaaatcttgtataaaacatctgacgaaaatctcattacctacttttttcaaaaaagcgatgtaatagtaggtaatctctaggccaatagccgattaagtctctattttcttcacaaaggcagttcgctgatgatcataaaaacagctgacgactgaatttatagtaacagctcccatccatcaactgaaaagacttgatgaggaccacggctttcccatcagcatgcagattgcagacaagtttgggcaaacgtacctatctgcatattttgaaataatgctgggcgtaagatcgtttcctttttggattataattaatgcataggggggagcaaaaatgctgtttgaacagattgctcgtaatcgccggcatacgatttggctgctgatttttatggcaattatcgttttggcggttggcttagtgtttgcttgggcatttggtactgattggatgtggatcttttggctggttggttttggttatctggcttggttttactggcattcggcgacggttttgatgaaaatcaatggtggtcggcaggtcgatgaaaagtctgccccgcgtctttatgagctggtgacggaactttgcttggccagtggattgccaatgcccaaaatctatctattgccgattgactgtcccaatgcgtttgcaaccggctgcgaccctgagcatgctagtttagcggtaaccagcggactgcttgaaatgatgaatgacgaagaactgcgcggtgttttgggacatgagctggcgcatatcaaaaactatgatatccgagttaccacgattgcgatgtcgctgcttgagctggttcgctattcaggatgggggctgctgattgctggtctgggattgctgaccgtcaaaaccagggccgggatcatcaagctgatcttttggatgatcggggccagcctggcagtagttggcggtttgattgccattgttgggattccattggctaagatcgcgttttttgccatctcaagagagcgcgaatatctggctgatgccgggtcagtagaaataacgcgtgatcctagtggcttgatcggtgcacttgagaaattgaaaaatgatgatcaccagatgccaactgacgatgcggccaccaatgccatctgctttaatgccaagcaaggaaattggctgatgaagctgtttgatacgcacccgccattggaaaaacggatcgcccgactgaaagattcggcatcttaaaaacgcacgagctgagaagatgaatcgcgcgaaaaaattcattctcgtaacaaacatgtaacttgccttttttaattgaactggtataatctgaaattgtataaaaaactgaagaatattagagaggtagccgctggcaagcgagcctgcgttgctggaaggcaggtgcagctggtctcttgaacgcgctttggtaagacatttaaatatcatttgagtggaatgttgcacattcaactagagtggtaccgcgggaaatttctcgtctctaatggactttggggttcgttggaggcgttttttatttaggaggtaaaacatggacgaaaaaacacaggttgctacggcgctgcagactgcattgccagacatgagcattgaagacatcaaaaataagttggaacggccaaaaaccagcaagaacggggactacgctttcccaaccttctttttggctaaggagctgcacaaggcaccacaaatgattgctggtgaattgattgaaaagatcgaccaaactggttttgaaaaagtcgttgcagctggtccatacatcaacttcttcttggacaaggccaatgtcggtgcagggatcttaaaggaaattttggctgacccagaacattacggtgacttggatcttggtcaccaagccaacgttacgatcgacatgtcttcaccaaacattgccaagccaatgagtatgggtcacctgcgttcgacggttatcggtaacgcaattgccaacatcatgaagaaggtcaactacaacccaatcaagattgaccaccttggcgactgggggacccaatttggtaagctgatggccgcctacgaaatgtggggcgatgaagaagctgtcaaggctgacccaatcaatacgctgcaaaaatactacgttaagatcaacacggaagccgacgaacacccagaatatgccgaagctggtcgtgaatggttccggaagctggaagatggcgatgaagaagccgttcgtctgtggaagtggttccgggctgaatccttgaagcgtttcatgaaggtctacgatatgctggacgttcaattcgactcctacaatggtgaagccttctacaacgacaagatggatgaaatcctgcagctgctcaacgacaagcatctgctgcaaaagagtcgtggtgccggcatcgttgacctgtccaagtacgacttgaatccagccatggttcaaaagtcagacggctcaacgctgtacatgacgcgtgacctggctacggccctgttcagaaagcggatgtacggctttgaacagtcgctttatgttgttggtgccgaacaaagctactacttccaacaattaaaggccacgctggcgacgatgggctttacctggtctaagcagattcaccatattccatttggtctgatgacgctgaatggtaagaagatgtcaacgcggaagggtaatgtcgttcaactggaagaagtgctggacgaatccatcaagctggctcgtcaacaaattgccgaaaagaaccctgacctggcaaatgccgatcaagttgctcaagaagtcggcgtcggcgcaatcgtcttccatgatttgaagaacgaacggaccaactcaatcaacttcaagctggaagatgccgttaagtttgaaggtgaaaccggtccttacgttcaatatgcgcatgctcgggctgagagtctgctgcgcaaggcgggcaacccagatcttgctggtgccgacctgaagcttaatgatgaagaatcatggaacatcatcaagcttttgggacaataccaagaaacgatcaagcgggcagctgttaagtacgacccatccctgatcggcaagtacgctctgtcactggccaaagccttcaaccaatactacgctcatacgcggatcctggttgacgacgaccaaaagctggcgcggctggcactggttcaagcagtcagcgatgttttgaagtctgctctggcattgctgggcgttaaggctccagacgaaatgtagtcaatctcaatggcttaatggctgacaactgctggcaattgaaaccagacgattatcgattctgaccagatcaaatcaatcaagaaggctccttgcttcaatgactgaagtgaggagcttttttgataaattgacgataccggcagctgatcttcaatgatgagtttcaagcatgattgtttgcgttttggataagttttaatggactgacttggcgactgatcccaaaaaggactgattgtgataaaattacgtggtgaatttcaagcatgaggaaaatttaaatgaaacaaccaacatctgattggaaagtacgttttaaagcctggctgggcaagacctggcatgctttttggacgcgttttaagtatttatggcatcgttttcagctgacgcgctggattatcgttgtcctaatgtcgctgtttttggtgatcagcatctatttgacgtttgttgccaagacagccaatgttaaggatcttgagcgacgattggaacagccgaccatgatctacgacagcaagggtaaatcggccggcagtctttattcgcaaaagggaacctacgtcaagcttagcaagatctctgcaaacgtacctgacgcagtgctgtcaactgaggatcgtcgtttttatcaagagcacggcttctcggttcgcggcttgggacgggcggcactgctgctggtcaaaaacaagctgttgggtcgtgactatatttcaggcgggggttcgactttgacccagcaattggtaaaaaatgcctttttgagtcaggaacagaccttttcgcggaaagccaaggaaattttcattgcgattgaggttgagaatcaatactccaaaaaacagattctcactatgtatctcaataatgcctactttggcaatggcgtctggggcgtgcaggacgcggccaagcgttattttaacgaagacgccagcgaattaacggttccccaggcagccacgctagcagggatgctgacctcgccaggaatttatgatcccgtcaagcatccggctgccaccaagtcacggcggaatgtggtcttgcagctgatggtcgaaaacaagaaattgacccagtcgcaggctgatgcctataaaaagacaccgctaacgattaccaatggctataccagtcctgacacctataagtatccatactactttgacgccgtaatcagcgaggccgtcaatacctatcatctgtcagaaaaagacattatgaacaatggctacaagatctacacaacgctgaatcaaaatcagcaaaaggccatgcaggatacctacgatgacgacagcaacttcccagacagctccaccggctcaacgatggttcaatcagcctcaattgccatggatcccaagactggcggagtaacggcagtcgttggcggtcgcggcaagcacgtctttagaggctacaaccgggcaacccaaatgcggcggcagcctggatcaaccattaagccgattgtcgtctacacaccggcactggaaaaaggatatttctatgactcaacactgcaggacaaaaagacgtcttatggcagcaatcactatacgccgaaaaactatgacaacacgtacagcggcagcgtgccaatgtacaaagcgctgtatgagagtctcaatgctccagcagtctggcttttgaacaagattggcgtcaatgccggctaccagatggctgagaagtttggactgccggttgaaaagagcgacaagaatctggctttagcgctgggtgggatgtcaaacggcgtgtcgcctcagcagatggcccgtgcctactcggtctttgccaatggcggtaaattgccaactgcgcactatatcgtcaagatcgaggatgcaaacggcaaagtgatcaagcgttatcgagccaaacccgctaagcagattatctctaaaaagatcagcaacgagatgaccagcatgctgttgggtgtcttcaatcatggaactggggtatcggctaaaccagacggctataagctggccggcaagacggggacgactgactcgggaattggcgatggtgatcgcgacaaatggattgtcggctatacgccagacattgtcgttgcaacctgggaaggctatgacagtacgactgagtctcagcagctggccgatgttaccaacaaaaacatcagtgtgctctacaaggctgaaatgagcgcgattctgccagaaacagctggcacgcagtttacggtcaaggatgctcaggccaaggctacggctaagcaaaataagaccagtagcagttggtggagtaattttaccaacaacttaaacgacagtggcagcacactcaagcaaaaggccagcgattggtggagctctttgcagtcaatgtttcagtagctttgccttaaacgatgcataatgttacaatctaaaaagcaatgaattataggaggtaggccgattatggttgtcaatatctacgacacggcaaacgaaatggagcgccaaatgcgggaaacgcaggaattccaagcattgaaggaagcttttgcagaacttaaaaaagatgaggatgcatttggtactttccaaaaattccaagaaaagcagatgcaggctcaacaaaagcaaatgcaaggcgttcagctgacggaagaagaaatcaaggaagttcaagacctggctaaagaagttggtcaaaaagacgccattaaaaatctgatggttaaagaacgccagcttgacgacatgattcaacagatcagcaagacgattacggcaccaattgcggaactgtatcgcgaagctatgccggaacaaaacggcggcgcggaaaaatagtttttaaaacggaatcgtagcttgcggttccgttttttaaaggcggtgaaaaaatggccaaattgattgctcaataccaagatggcgaggaaatgcagctttttgccctgattaaagaagcagcggctaagactaccagtgccggcaagccttacctagcactgactttggctgatgcttccggtgagattagcggaatgcgctgggatgcggcaccaaaagacattgccgaactgcaggctggcaaagtcgtcagcgttaaaggacagcgcgaaacgtatcgcgaccggccccagatcaagattgaaacgattcgtttggctggtgacgatgagccgcatgatccgctgttgttcgttccgcgggctccagaaacgacggcccaattaaaatcaggttttcgcgagttttttgatctgatcgatgaaccggtttggaaaaagattgccgggcatctgtttagcaagcacggcgacaaactattctcttatccagcagccaagagcaatcatcatgcttttgtaggcggtctggcctttcacacgctgtcgattctgcggctggcacgctcggttgcggctcagtattcaggaatcaatgcggccttgctttatactggggcaatgctgcatgatctgggcaagaccattgagctgagcggaccgatcgcgactcaatataccgtgatggggaacctgattgggcatatctcgcttctggacggcgagatcgtgcaggcctgtgacgagctggaccttgatcccgaggcacccaaggtaattctgctgcggcatatgattctttctcaccatggtttgctggaatatggctcaccggcgcggccccagcttttggaagccgagattctgcatcagctagatgaattggatgcctcaatcatgacgattcagacggctttgaggcaaaccgcgcctggcgagtatacggatcgtttgttcagcttggataatcgccgcttttatcgaccgaccaatgaagaaactttgaagaaaagctaaacattgtctaagccgggtttaatctgggatcggttgtgttatattagattggtaaatttatcacgagtaaattcttaataaactaaaggatgtgtaatttagtgaacgcaaagaaaaaagctttggcaattttagccggaatttctttaatgctgccattggctgcctgtggcaataaggctgttgcaacgactagcggtggtaagattaccgaaagcgaatactacagcagcatgaagcagacttctgctggtaagcaggtgctgcagcagatgatcttggataaggtcctggaaaagcagtatggctcgcaagtctccaagagcaaggtcaacagtgaatacaatgcctacaagaagcaatacggttcatcattctcaaccgttctgcagcaaaatggcctgactaccaagacgcttaagcagcagattcgctccaacctgcttttgcaagcggccgttcgccactactccaacttctccaacaaggctttgaacaagcaatggaagaagtaccagccaaaggttcagacagcagagatcttggttggctcaaagtctgatgctcaggcaatcattgacgagctgaacaacacttccggcgacaagtacaaggcattcaagaaactggccaaggaaaagtcaacggatacttcaaacaagagcaatggtggtaaggtagcagcctttgacaacactgatacctcgcttgactcagcttacaagaaggcagcctttaagcttaagactggcgaatacacgacgacgccggtcaaaaccgacagcggctaccaagtcatctacatgatcaagcacccagccaagggtaagaagagcaaccacatcgctcaattgaagcagcagatcgtcgaagaaaacatgaatgattcgactttcctgcaaaacgttgtctccaaggttctgaagaagggcaatgtttcaatcaaggacagcgacttgaagaacatcttggatgaatacttgacgaccagctccagttcaaccagctcgatttccagctcaagcaagagtacgagctcggcttccagctctagttcaagtacggaatccagctccagcaattaatcaaaaaggattgcatctgatatgcaatccttttttggcagcattggaaaaattaaaatgggactccttgtctagaggcagggggtcccattttggctatgcttgatattttgacaacagtttttgaatcttggtcagtcgcggctcatttttaaactgccaaagatcaatggcatgctgggcagcgcgggtaaactcactgacgccatccattgcctgattcagcttgattacactctgattaagtttaaccagctgcgtctgtagattcttagcggcgcttaaagtatcgcgaccagcgtttttgaagtcgtcgaacatgactagtcaccgaattgatcgataatcgcctgttgaacagcttgatacttctgctcatcatattggcccgagttgtccgaaaacgtaatcccaaaatcatcttggtcgctgtagcgcggaatcaggtgaatgtgggaatggaaaacggactggtaggctacggcgccattgttgtttaaaatattcatgcccttgatgtcagggttggagtcgcgaatggcccgggcaatctttggcagccggctaaatacggcagctgccaagtcggagtcatattcaaagatgtcttgaacgtgcttttttggtacgaccagcgtgtggccaggcgtgttttgcgaaatgtccaaaaaggctttgacgacatcatcttcgtagaccgtgtagctaggaatctcaccattgataatcttgcaaaaaatacaatcttccattctgagaatacctcttttcaattttttttaagtataaacgaattttccaaaaactgcacccttagtcgattataatcagtatggtataattactcggttaggcaagcaagaaagacaaagaagggatgacaatggcgctggaagttgaacatttaacgggtggctattctcagctgccggttttaaaagacgtttcttttaacgtgcagccaggcgaactggtcggcctgatcggtttaaacggggccggcaagtcaacgacgatcaatcatgttatcggcttgctacggccgttttcaggatcaattattttaaatggtcaaaatctgcaggaaaacgccgcggcttataagcgtcaaatcgcctatgtgccggaaacgccgatcctgtatgatgagctgacgctaaaagagcatttggaactgacgatgctggcatatggcctggatcgagatctgacttggcaaaacgcccatcagctgctgaaaatctttcgcttggacaataagctggactggtttccggccaacttttccaaggggatgaagcaaaaagtcatgatcgtcagtgcttttatgacggacgccaagctgttcattgtcgatgagccgttttatggcctggatccactggcagttcatgacctgttgaatctgattgaggaaaaaaaggcacagggagcaggtatcttgatgtcgacgcacgttttggacacggcacagcgctactgtgatcgctttattctgctggcacatggtcaggtaaaggcgcatggtacgctaaaggaactgcagcaaaaagccgctggcgccggagaaacgctggatgacatttatctgcgcttggcaagggatgagagcgatgaatagtctttttaagaaacggcggcaagcccatctgctgcggctgatgaagtattggcggctggtatttaatgaccaattcacgattgcgctgttctttatgattggcgcactggcctatacctatgcgcaatggctcaagacgctcagccctggcatatggtggattcgctggcttttaattttatggttcgtcttggtaatacaggtcggccgctttgctactttgctgaaaccagccgatcccgtatttttgctgccgcagtctgatggcatcaagaaatacctcaaccaggcgtttttatacagtctgatattgggcgagctgatgtcgctggggcttttgattatcgcgctgcccttagctatgattgacatcagactgaccgcgctaaccattttggaattgctcttggcaggctttgttgctaagctttcctggatggagttggccaaagcccagttgagtctgcaatggtcgcggcatgccaagcaattacggctgggacaatggatcgcaccgcttttaatcggtatgctcagctggctgattgcgccggtctgggtctgcgggagtgcggtgctgatctatctggtcattaagattgggttgcaaaagcaggatctggactggcgagcggccgttgatgccgagcagaagcggatgtatgacgtctatcgtttctttaatctgtttacagacgtgcctagcgttaaaggtgggatcaagcggcgaacttgggccaatggcttgattcactggctgacgattcctgatcatgcctggtcttacctatacgcacgcggctttttgcgggatacggaaaccagcagcctggtaggcagattgacgatcgtcgggatgctgatcgtattcttcgtgccattgggctggctgcgctgcttactggcactgctgtttatttatttgattgccatgcagctgatgccatttgcacagcattaccaaaacaatgtctttacccatctctacccgattgagcaaacaacgcagctgactgatttccaggcgcttttaaaaaaggtcatgatcagcttgggtctgctgctgatcttggccagtcttggtactgaatttgactggatgagtctattgagctgtctgattctaggcggtctggagctgtactggctgattaatttttatttcaaaaagaaaatgcaaaagtgaggataaccaatgcgagtaaaacacaaaaaatgggcagaaccactgattgaggcccatcctgaaaaaatcaccactgatccggctcaatttaaaggcaagtggcagagccgttttgccaaagagcagccaatctggcttgaagtcggcatgggcaaggggcagttcgcaatcggcatggctaaggcgcatccagaagttaattttatcggtttagacgtggtttccacagtggccgggattgccttaaaaaagtcgctggaagatgaagaactgccaaacctgcagtttatctgtgccaatggagcgggcttggatgagttttttgcggatggcgagatcgatcggctatttttgaacttttccgatccttggcctaaatcgcgccatgccaagcgtcgattaacctataagacctttttggcaaattatgaaaaggttttggtgccaaagggaacgattgagttaaagactgacaacatgggcttttttgagttttcactggtcagcatgaataattacggcatgcagtatgatggtgtctggctggatctgcatcatagtgatgaaaatgaaaataacgttgaaacggaatatgaacaaaaatttgcggcaaaagggcagccaatctacaaactgaaggctcactttgcttaaatattgaaacggcacagtctggcattgattcaacatcactgccagatttttggtttggtcattttgcggagctgcctggcagatttaaaatcgttcaaatggttaaccgtcaaactgtcattcttgaccgataccaatcgtttgagagaaagcaggtaatgatggttttatcatatgtcattatgcagaatttattgaataaaagatgtggctgaatttttatcaactgcagaaagcgttggatgccaatcaaagaagattgtattttaagcggctttgtcacgggataactcccatggcagagccgtttttaattgcttttaaaaaatcgttcagataattttggaaaataatttctataaaagtatggaatttatttcaaaacgtggtatagtaaaagcgttcactaatgaaaggggttacaaaaatgaaacttacagtagcacaactagccaaatacatggaccacacgatgctcaagccagacgccactcaagcaatgatcgaccaatgcattgacgaagctatcaaatacaacacggcttcagtctgcatcaatccatattgggttaagcacactgctgatcgcttgaaggatacggatgtcaacacctgcacggtcattggttttccactgggggcttctacgactaagatcaaggttgccgaagcagttgatgccatcgaaaacggtgctgatgagattgacatggtcatcaacattggcgaattgaaatctggtcaccaagaaatcgttgagcaggatattcgcgaggttgcccaagctgtccacgctcaccacaagcttttgaaggtaatcattgaaacctgcctgttgactgacgaggaaaaaacgattgcctctaagctgacgatggctggtggtgctgattttgttaagacttcaaccggcttttcaactggcggtgccaaagctgaagatgtggcattgatgcgcaaggcagttggtcccgactttaagatcaaggcttcgggtggtattcatcatttagatgaagcctatgcaatgattgaggccggcgccaaccggctgggtgtttcggcttcagtccagatcttggaagaagctgctcggcaataaaattggtttgaaacgtcgcttaagatcgattcaggggaggaaagattatgacgtatcaacgagtatttggcattgttttggattctgtagggattggcgaggcacctgatgcattgaagtttggtgatgatggtgccgataccttaggccacattggcaaatggtatcaaggcaagctggcattgcctaacttagccaaactgggactgagcaacattcgcccggccgatccgattcaaggcgtgccgacagctgatccagcaatgggctgctttggcaagatggctgagatttcggccggtaaggacagtatggatggtcactgggaaatgatggagctgccggttaaaaagccgttgtcaacgttcccaaacggttttcctgacagcatcattcaaaaactggaagccttttctggtcgtaaggtgattgtcaacaagccatattcagggacggaggttatccatgactacggcgagcagcagatgaaaaccggtgatttgatcgtctacacttcgggcgactcagtgctgcagattgcggcgcatgaagacgtgattccggttgaagagctctaccgcatctgccgttatgcgcggacactggtcaatggtcctgaatacacggttggccggattattgcacgaccatacgttggcccagacaaggatcactttgtcagaacggctaaccggcatgacttcagcttggagccaaccggtgagactgatctggatcatttgaaggcagctggtctggacgtcattggaattggcaagatcaacgacattttctctggtcatggcattacggaaggctatcacaacgaaagcaatatggatggcatggatcacgttgaccatgtaatgaaagaagattttcatggcttctgctttgtcaatctggtcgactttgatgccatgtatggtcaccggcgcaatccagagggctttggcaaggctttgatggactttgaccagcgcttgggaacggtacttgaaaacatgcgggaagacgatctgcttttgatcacggcagatcatggcaatgatccttgcttccgcggtaccgaccataccagagaggtaacgccgctgctggcctactcgccgtcaatgaggcacccaggccagtcgctgggaacgcgtgatacgtttgctgatttgggtgcaacgatcatggaaaactttggtgttaccggcaatcaggttggcacgagctttttatcaacgattgaaaactagctaattataaagggggattcatcatgcgaatggtggatgtaattgaccaaaagcgcaatggcggcgttttgagcgatgaacagctgcagttctttgtcgatggcgtagtcgacggctcgctgcctgactatcaaatcagtgctttgctgatggcgatctattttcaggggatgacggatcgtgaacagacgcagctgacaatgaaaatgatgcattctggtgagcggcttgatttgtctaagattcctgggattaaagttgacaagcattcaactggcggcgtgggcgataaaaccagtctgccactagctgcgatggtcgccgcactgggaataccggtaccaatgatctcaggtcgcggacttggccatacaggtggaacattagacaagctggaggctattccaggttttcaaattgaattaagcgagcaggatttcatcaagcaggttgctgaagaaaagctggcaatcgttggggcaacgcgtgacgtcgcgccagctgataaaaagatctatgctctgcgtgacgttaccgatacggttgattccattccattgattgccagttcaattatgagcaaaaagctggcttctgggaccgatgctttggtaattgatgttaagactggtgccggggcctttatgaagactgaggactccgccgtgaaactggctaaagcattggtagcaatcggcaagcaggctggattgaagtgtgaagccgtgatctcagatatgaatcagcctttaggatccaaaatcggcaacacgctggaaattgaagagacgctggatcttttaaagggcaaaggaccaaaagatctgctggagctggtcttggaactgggcagccggatggtcgtgatgggacagcaggcggccagtctggcagaagcccgcgccaaattggaacagacgattgctgatgattcggcactggctcgctttaaggcaatgatcaaggctcagcatggtgatccaaacgtggttgacgactactcgctgatgccgcatgccaagtatcaaattgaatatcctgctcaaaaagacggcgtaattgccaagctgaccgcagatgagattggaatggccagcatgctgatgggcggtggtcgtcaaaaagccgatgatcagctggactacgcggttgggatcgagctgcataaaaagattggcgattcggttcaaaaaggcgaatcaatcatgacgatctggagcaaccgcgaagatatcgatgacgtcaaagaactgctggatcaagccgttgccattgaagaatcagctcagcagccaactttgattcacgagacgattgaatagaaattaattataaattacaaggaggaattccaatgagtacgccacatattgaagcacaaaacggtgattacgctgaaacggttctgctgccaggggatccgctgcgggctaaatatattgccgaaaatttcctgaccaacgttaaacaggtcaacagcgtgcgcaacgcgtttggctacacaggcgaatacaagggccatcgcatctcggttcaaggatcggggatgggaattccttccatgtcgatctatatcaatgaactggtacgtttttatggcgtcaagacgattatccgggtcggatcctgtggtgggatggctcccggcgtcaagctgcgggatgtctgtttagcctcgggatcttcaactgattcggcagtcgttgccaactcgtttgcagctggcgttcactttgccccgttagctgattttaagctgcttgacacggcttatcacgtggctaagaacatggggattgagcctaaggttggcgatatctttgctgccgaccgtttctacaatgatgatattgatatgaagaagctggctgattatggcgtgatcggtacagaaatggaatcagcaggactttatctgttggcagccaaactgcattttagagcgctctcggttttgacggtcagtgatctgctatttggcagtcaagaaaaaacaacggccgctgaacgtgaaaagacctttaacgacatgatcaaaatcagtctggaaacggcgattgcccaagctgattgatatatgatcgattactaaaaaagacggtccgttactgacgggccgtcttttctttagtagaattgatataaacagcacaaaatcagaaagtggatgggaataatgattgatgaaactgataagcgggctttaagcgttaaagtcgcgcagctctattatcaaaatgactggcggcagagtagaatcgcagccgagttgaatctttcacggcccacggtatcaagattgctgcaatacgcacgggaaagcgggattgtccagattaagatcagcaatccgctggtttcgactcagcagctggccgcggagctaaaggactattatcatttagaccaagtcattgttgtaccttcagagatgacggccagtggcgagctgttggaactggttggcgcggctgctgccgaatacatcgagacaatcgttaaggatgatgacacaattgggctggcctggggaaaaacgatccatgccattgcccagcatctatcgcctgaagacgtgcatggggtcacggtggttcagttaaagggcagcgttgccaataccaagcagaaaaactatgcctttgaaagcgtcaatgcttttgccagtgcttttcacacgctgccacagtatctgccgctgccagttatttttgatcaccaagaaactaaagagctggttgagcaggatacgcatatcaaatacatcatggatcttggtcgacaagccgatatcgcggtctttacggtcggaacggtacgagattcggcactgctgtttcatttagggtacttcagtcaagctgagcaggagtatctgcagcagcatgcggttggtgacgttttttcgcgttttatcgatcaaaatggcagcattgtagcaccacagatcgatcagcggacgatcggcattgacctagaacagctgaaaaaaattccgcagcgtgtgatggtaattgccaatccagctaagacgcaggccgccgcgggagcactgaaagcgggctatgccaacgttttggtaattgatcagggcagtgctgccggcttggttaagaaactgcgtgaaaaaggtgccaactgatgctggaacgttttttggaagatgacgttgtggtgagcgttcatctgctgaccttgctgtttgatcattcagggctaacgctgcatcatctggcagagctgaccagaattcccgagccccggcttagaaaggaactgaataccttaaatcaagaactgcagccgaaagcatgcattcagatcaatgatgcggttgtctcgctttctttaaccagcccgggtcagctgtttgagctaaaaaaacagctctaccaaaagtctgaggtactgcaggtgatggcctatctgctcaatcaccggggacgctcggtgacgacgttttgtcaggagcactacttttctgagccgactttttaccggctgcagcggcaatgcaaggattttttgcagacggttggtctgacgattcgacgcggtcagatctgcggtcaagaatatcgcaagcgctacttgattgcggcattaagctgtcattatggcattgactgcgtggatttcggctcagccagtcagcagatcgtaaaaaatttcgtcattgcagccaaccccggcgtaaagccgctgctggacaagatgccgcaagcgtttgccatgtttgatcatctaattgctttgacctggctgcggcatgaccagtctttagaattgccaaccgataatttctggcgggcggtctgtcgagaaaaggcgcatcagcaattggaacgcatggttgatgaatatctgcagccgcaattgtcatttgaactgacgccgcttgatcatgactatttatacctggtctatctaacggttgccaacgagctgtttcgtgatgatgcctggagcctgcagcgagcaacgtttcgcgagatcctgcagcagcttcctgagattcgacagctgacggatgcttttgccgcgctatggggagagccactgatcaaaacggcagcctttaaagaaacggttaatggattcggcctgcactttataggcggtctgcagaatctggtaattgaacgtcagctggactatcaaacggaaaacaagtcgcagagattgaccgatcagctggtgaaagtgatcgttatgaggtggtgccggcaaaatcattggtcagatctggttgatgataatcagatcaagtatttttcgcgacagttgctgccactgattgaagaacagcttcctgccacgccgttatatatctttaccaagtcgcgggctgattatgaagtagtggctcaaatggtgcgtcaagaatttggcaatcgtcttcagatcagcagctgcagttattttagcgccgagcagcttaagcagatcaatcaagtaccgcaaagtatgattttggctgatcatgaattttgggagcttttggctgataccaattcaaacaaccagcgtttcttaattaccttggataatccttttttaggaatcaaacgcttgcagaccagtctgtatcgcctgcgcacgactgcttatgcagaaaaccttgcggagaaactatcaattttgtatgctcaagagggttagattttgataggagcgaaacgtttttaaccgctatactttaattgtcattcaggggggaacccgaagatgactgctgattatgtccgggtacattagaaaagcaaagataaatagttgataatttgtcagatcaagtatgctgcatcacgaaaaatcgcttagtgcacgatgttttcggcgggaccccattcaaccgctgatgcagatgctgactccattaatagcgatagacgcattaaataatgttaagcttcaatacgacaaatcattgtttggtcaagatagtgtgcagcttggctgagtaagtggttgtcgtgccaaatgataaatctagatcatcaatgcgatgcccatccactccgccattgatgtttctaatttcagtaaaaattgattgctttgaccgcagtttatagtgcaatttacatcaaagattccaattaaatcataatcggcagttatgaatgacaatcggccatgcatcatgttcagatagatggtgcaaaaaaaggctgttggagaaatccaacagccttttgtgttgcttaattgtcaatgcgctttagtttcagcagcgtaccgatactggcatctgccaagaattcgtagctgaccagctgatcgtcttcaaagcgccggatgccaccgcgatataccaaagttcgcacggcaaactgacgataaggaatcggctgatgatcaatccagctgccctcaaccgtgccttcacgtttaaaatcattggtaatcatttttaagatcgtgtttgcggaacgccgtcggttgcccaccagcttgccggcaaagaagcccgcaataccggaagcacctaaggtaagcgggatcatccatgggctaagtgaaccatttgaatcattcatttcaatcgcttctttcgtttagcctatgccatattttgacccaaagtagattggatgtaacaattttaacacaaaggcagatcattatgcattgtctttcaacttgtagtagactatacttacataaaataagtaaaaggatggtgttttgtgatggaagctttgcctaaagttaatgctgaacagctgcaaaagtatttgaaagggcaggtcgtcttgatgtttactgctgactggtgccctgactgccagtttatcaagcctgccatgccagaagtcgaaaaggattttgccgattttaagttttatgccgttgatcgtgatgaaaatctggatttggcaaccgaactaaacgtcatgggcattccaagctttattgcctaccgtgatggtcaagaaattggccggttcgtcaacaaggaccgcaagaccaagcagcaggtcgaggatttcttgagtaatttaaaataagcaaaaatggcggccggcaagtcgccattttttgatggactggggtcatgagcacgggttgtgtggtacaatttagtctggttgtcaaaagtttttgacgaagcgaaaaagaatttttagcaccgttgcaaagcgatgccaagggaaggatttttgatgttaatttcaagctataacccaaatgagatgggtgatgttttggtagtcgtaactggtcaggccgctgatcaaaacgtcaagcaaaatcaaggcgtagttcagatcgtcagtgctcaggatggcagtctgctgggctacaattttctgaaagccagtgaggtattgccagaactcaaggagcaaaacggtcaggtctttttgagcgaggatcaggtcgaaaagctgaatgaaaagattcaagcagctggttttgatgaaaaattaacggctgatgaaacgccaaagtttgttatcggctatgttgaatccatgaccaagcatccaaaatcggatcatctgcacattacgcaagttgacttgggcgatcagaaggttcagattgtctgcggctcgcctaacattgccgaacacgttaaggtcgttgttgccaaggttggcgccatgatgccaagcggtcagattatctggccaggtgcattggttggcgtgccaagtaatgggatgatctgtgcagctcgtgaactgaacttgaaaaatgctccgcaaaagcctggctgcttgattctgcctgatgattttggtcaagctggcgatgcttttgactttgcgcgcggcaatcagctgtttgcctagttggcggcaaggaaaggaaaaaacggcattatggaaaagaattattattttgtaggcatcaagggaaccgggatggctgctttggcacgggtgctgcatgatcgcggctgccatgttgaaggctcagatattgaaaaagaaacctttacgcaggcaccattggaacaagccggcattcagattcacgattttgatccagccaacatcaagccagggatgacgatcgtgcaaggaaacgcctttagcgatgaccagcctgaaatcgtgcgggccaaggaactgggcgacaaggttcaaagctatcccgccacggttgaagaattagttgagcagtataccagcattggcgttgccggagcccatggcaagaccagtacgacggcgctgctttcccatgtgttaagctcagttgcgccaacgacctatctgatcggagacggtgaaggggttggcacgcctgactcgcggttctttgtctttgaagctgacgaataccgggatcacttcttggcctatcatccagactatgccatcatgaccaatattgactttgatcatcccgatttctttaaggatattgatgacgtgcgcgattcgtttgaaacgtatggcaaacaggtcaaaaaagccgtctttgcctggggtgatgatgaaaatctgcgcaagctgcagttggatgtaccgatctattactacggcactagtgaaaaagatgacttccgtgcggttaatattcaacggacgccgcagggatccacttttgaagcctggtttaaagatgagaagctgggcgagtttgaaattcatctttatggtgagcacagcgtcttgaacagtctggccgtaattgcggttgcctacatggaaaaagttgacctgactgacattgctaacgggctggccagcttttccggcgttaagcggcggtttgccgaaagtcaggttggcgatatgacgctgattgacgactatgctcatcatccaagcgaaatcaaggcgacgattgatgcagcacggcaaaaatatcctgataaacaggtactggccgttttccagccgcatacctacagtcgtctgcaggcctatcttaaagagtttggtcagtctttgagcgccgctgacaagacgtttgtcacgccaatctttggctcgattcgtgaaaatgccggtcatgtctccagccaggatctggaagacttgattccacaaagcgagggcattgacatggactccatggacaagcttttagcgtaccatgatgccgttgttgtcttcatgggagccggcgacattgaaaaatacgaggacaagtataagagtttgttagcaaatgattaaatcacttgtcgaaaatggtggcatttgctaccattttttatataaaagacaatattggtcaaattagtttgactgcttaattcaattgaaagaagggagtttatgttcaactctacaccagagcccgagcaaagaagacgcgtcgtcaatgcagccggcttaaatggctttttgaccaagatgtacggctttgtcggcctgtcagtgtttgtctcggccatcagttcgtttttggtaatgacgacttttagaaccgccgtgtttggctacttttctcagcacacggggatgatgtggctgctgttgctgctgccgattgccctgtcaatgggaatcagtgctagtgccacgcgcaatccaactggcagctttatcatgctgatggtcctgtcgattatgtatggagtcgagtttgccctgctggctggtttctatactggcgctgatattacggcagcctttgtttcgtcggcaacgatctttgtagtaatggcactgtatgggacggttaccaaacgctcgctggatcgctttggggctcatgctacggcggccttgattgctttgattctggcctctttgatcaacatgttcttaaacagtccggccattacctacatcttttcctacattgccgtaatcatcttcgtaattttgacggcttacgatgcgcaaaagatgaaaaacatctaccttaactaccaagatcaggtttccgttaccggtctggcaattatgggagccttgcagctgtatctggactttatcaacctgtttattcagctgctgcagattttcggcatgggcagcgatcgtcgcgactaactaattaaataaaatttagattggctctgcatccttaaatggtgcggagctttattttttattgaaacagatatggttcctaaaaatgccaggggtggtgaaagtctgttacaatcaagaaagaaaataaaagaacgaggtagtttaaatggcagaaaaaatgttgttgattgatggcaatagcattgcatttcgggctttttttgcaatgcataatcaaatcgacaaatttaccaaccaaaacggtcttcatactgcggcaatctatggctttaagttgatgctggatcacgtgctggcaaactatcagccggataaggctctggtagcgtttgatgctggcaagcagacttttcgaacggaaatgtatgctgactacaagggtggtcgggccaaaacgccaactgagctgactgaacagctgccgtatctgcacgagatgatgcatgcctgtgggatcaagacctatcaattagccaactatgaagccgacgacattatcggtaccctggccagactcggcgatcaggctggtgatgagaccctgatcgtaactggcgaccgggatctgacacagctggtaactgataacacgacggttgccgtaacgattaaaggcgtgacgcagaccgaaatgtacacgccggctcattttcaagaaaaattcggcgtgacgccaactcagtttatcgatatgaaggcgctgatgggtgacagttccgacaattatccaggggtcacgggcatcggcgaaaaaaccgcgcagaagctgattcaagaatatggctcgctggatgggctttacgaaaatatcgatcagatgcgcaagtcaaagcggaaagaaaatctggtcaatgaagaaaaaattgcccgtgaatgtaaggatctggccacgatacgccgtgatgctccactgacgatcggtctggatgatttgaagtatcaaggcgtgcagactgaagaactgatcaagttttatcaagaaatgaactttaagtcgtttctaagcaagatgaacgttgcgccaagtactgaagaagccgcggatgcaaaagaaatcgcatatactgaactgacggctgataatctggatcttttagcagatttagatcatcacgtaaccttccagctggaaatgccgaatgaaaattatcatctttcaacgtttgctggctttgtaatcggggatggtcaaaaatggctcgtcagtcgtgacgaaagcctgctgcagaccgcgccagtcaaaaagattttaaccagcgatcaatatacaaaagacgtttttaatgccaaagcacagatcgtcggccttcaccgattgggaatcgagctgaactatgtggcgtttgatctgctgctggcttcttatctggttgatccgagcgataacagcaatgatcttggcgagctggcccatgcccatgactattatgacgtcaaaagcgatgaagaggtttatggcaagggcgtcaaacgagcaattccaactgacggccaggtcttctttactcatttagcacaaaaagcccgggccattcacgagctgcgcgccccagtctatgcccagcttaaggaacatgagcagatgccgctttatgaagatatcgagctgcctttaacctatgtcttggctaaaatggagattgctggtatcaaggtcaacgcacagacgcttaaagagatgggcagcaagttaaaggagcgcttagccgaaatcgagcaggttatctatcaagaagcaggtacggagtttaacattaactccaccaaacagctgggcgagattttgtttgacaagatgaaactgccggttattaaaaagacgcgtactgggtattccacggctgttgcggttttagaaaagctgcagggttattcgccgattattggtcatatcttggagtatcggcagatcgccaagctgcagtcgacttatatcgaaggactgctgaaagttattcacagcagcgaccaaaagatccatacccgctatctgcaaacgctgacggcaaccggccgcctgtcttcagttgatccgaacctgcagaatattccggtgcgcttggaagaaggtcgtcagattcggcgggcgttcgtgccaagcgagcctggctggaagattttctcttctgactactcacagattgagctgcgggtcttggctcatattaccggcgacaagaacctgcagcaggattttattgatggcaaggatattcacgaaagtacggcacgacgtattttccatctgctgccgggcgaagcggttacgcctgatatgcgtcgtcatgccaaagcggtcaatttcgggatcgtttacggcatcagcgactatggcctctcacaaagcattcacgttacgcgcaagcaggcccatgaatttatcgaaagctactttgaggaatttccaggcgtcaagaaatacgtcacggagatcgtcaaatcggctcacgaaaaaggctatgtcgaaacgctgacgcatcggcggcgctatttggatgatatccattccaagaattttgccaagcgctcatttgccgaacgaaccgcgatgaacacgccaattcaaggcagcgcggccgacatcatcaagatcgctatgatcaatatggacaagatgctgcgggctcataatcttaaggcacggatgcttttacagattcatgacgaactggtctttgaggcgccggctgcagagattccgactttggaaaaactggtgccgcaggtcatggattcggccttcaagctggacgtaccgctaaaggttgaaagtaagtatggcgacacctggtacgatctgaaaaaataaataaagctttaggccgtggcagtcaaggctagccgcggcttttgctttggaatgcgttttgagcaaaaaattggttgaaaactgaaaatcaactataatcgataatgattctaaaagaaacgaggacgatcaaatgccagagatgccagaagtagagaccgtacgccgagggttgatgaatattgccgcaggccgtaagattcaagggattgacgtttactatgggaaaacgattgaaaacgacatcgaggagtttcggcaagccttgattggtcagacgattgaacggattgatcggcggggcaagtatttgctgtttcgctttaccaataatctgaccatggtttcgcatttgcggatggaaggcagctattatcgccagctcaatgatggtccaatcgacaagcatacgcatgtagttttccattttacggatggtacggagctttgctatcgcgatacgcgcaagtttggccgcatgcgcttggttaaaaccggtgaagagatgcaggtcggcggcttaaaaactatgggaccggaaccaaccactaaagactttaaggttgactattttaaacgaatcttgaaaaagagccgcagcaaaatcaagccgtttttactaaatcaggatcacgttgccgggctgggtaatatttattgcgacgaggttctttggcagagccgcatcaatcccgaacagccggctaatacgctgactgacgagcagattcagattctgcatgacaacatcatcaaagagattgccaaagcgactaaatacaaggggacgaccgtgcatacgtttatgaatgcctttggcgaagccggcgcctttcaaaatcaactagaagtttatggccgtggcggcgagaaatgcgaacggtgcggtcataaactggttaagatcaaggtagcgcagcgcggcacgactttttgtccacgttgtcaggcttgggcaggtgatcagaaatgactaaggtaatcggtctgacgggcgggattgcaagcggcaagtcaaccatcagcaatatctttaaagaagtcggttggccggtaattgatgccgatcagacagcccgtcaagtcgtcatgcccggcagtcttggcctggctcagatcgtaagccgttttggcagccaggtgcttcagcctgatggcacgcttgatcgtgcagcgctgggcagcatggtctttgatgatccccaaaacctcagcgatctggatcaaatcgagcatcccttgattatggctgcgattgataaacagctggccggctttaaaaaacaagggctgcccgtggtggttttagatgtgccattgctgtttgaaaccgggatggatcaggaatgtgatttgaccgttttagcagtcgttgatcgcaaaacgcagcttgagcggttgatgaaacgggatcattgcagtaaagccgccgctttgaaaaggatcaatgctcagatgcctttggaagaaaaaatgcggcgtgccgacgtgacgatcgacaataacggttcacttgcacaaacgcgtcttcaagtggcaaaactggttgaacgagtaagtcagcaaaaatgatcgcaagtgtgataagataaatgcataacctattgacaggaggaattcggtatgcaatgtccacactgccatcataacggatcacgcgtggttgacagtcgtcccagtgaagatggtacctgtattcgtcgccgccgcgaatgtgcaacctgtggctttcgctttactacttttgagcgctatgaggaaacaccgctgttagtaatcaaaaaagatggcacgcggcaggaattcaatcgccaaaaagtcttaaacgggttggtccgctcggctgaaaaacgtcccgtcagcatggaaaaacttaccagcatcgccaatgatgttgaaagacgcgtccgctcacgtggggaaaatgaggtttccagtcaagtgatcggcgaatacgttatgaatgcgctcaaagacgttgatgagatctcctacattcgctttgccagcgtctatcggcagtttaaagacgtcgacgcatttatgaatgagctggaggccatgatcaaccagaatcatcaaaagcatcaagactgattaaggaggagtcgttatggctgaagtgcaagggcgcttgacgccgcaaaccggctttatcgtggccgctgcgtcagactttgtacggtttgaccaagcgacttttattgatttttaccaaccattgctaagtcccaccgcgctggggcttttttatgctttgcaaagtcagctggtccccgaaccaatgctggccaagcgccaggcccacagcatcatgctggatcgcttgaatctgggagttgctcaatttgctgaggcccgcaatagtttagagggcgttgaaatgctgcagaccttttatcagcaagatgagatcggcggcgtctatgtctatgttctgcagcccacaatgacgcctgaagaattcattaatgatgatcttttaagcgttcggctgctccagcagattggcgagcagcggtttgacgaactggtcgcccgctcaaggcgctatcagttcgataccagccgtatgcataatctgacccatgattactttgaggtttttcgaccggatcgagcggcctgggatgcagaacggccaattttagacaatgccagagcgacggcggttcctaaaagccaggcaatccaaaaaataccgtctaacagttttgactttaactttctgcttgatcagctgagaaatcgcggcattgatctgcaaagcgttaaagaacagcgaaaactgatcatctcagaaagcgtcctgtatagtattgatgagagcagcatggccggcctggtctacgatgcgacggattttagaagcggtattctgcagccccaggctctaaaacgcggcattgcagcccattatgccggcgcgttgcgcaggtcagacgatccagccccgacaattccggcggcagctgaagatctaactgacctgggcgaagttgaacgcagcttgattcaaatgtcacgccagtacgcaccttatgactacctggctggaatcaagcagtcaagcggttctggctatgtctcgccaaatgagcgcaacaccctgacgcgcctggttgagcagggacagctgcctggcgaggttgtcaacatactgatctatcatataatcgtccaaaaagaaaatactaccttaaaggccagtctggcagatgggatcgccaatgcctggatcaaggcgggagtaaagacggcagctgacgccattcgtgaaatcaagaatcataaaaaggacaatgataggcaggtttcatcaaaacccaagcgccgctattactcaactggccgcggtaatatcaacgaagaactgccggaatgggcaaagcatccagaaaaagttaaaaataaaaagccatctgctgaaaaacttgctaagattgaccaaatgctggctgaacttgatcagcaaaaaaacagttcagataaaaaacaatgattggagggattgccaatgcgtcctatcatagaaaccattaactcaattatcggcgggcaaagcggctcacctcagtatcaggaactgattaaaaaggcctaccaagatcctgaggtacagagctttttgcgtcagcaccgcgctgaattgtctgatgagcagatcaagcggggcgggtcaaaactttatgagttctaccatgaaaagatgctgctccaaaatcatcagaccagcattgctccaggctatacccctcagctggtcgttagcgccggccgaatcgacgtcgtctatgtaccgacagctcagcttaaggcacagcagcaggctgccgagttaagacagcgcgtgacgaccgtgcgaatgcctaaatttattcgtcaggccgattttaagcatgtaattcgtgataatgacgatcgcgtcaatgctctgcaggcagcgatgagctttgtagggagttatcaaccaggccagtttcaacccggaatgtatctctctgggaactttggggttggcaagacctacttattaggcgctactgccaatgctttggctgaacgcggtattatctcaactatggtgcattttccaagctttgccgttgagatgaaaggcgcaatcaaggatggtacggttgatgaacggcgggatgccatcaaaaaagcaccgattttgatgctggacgatattggtgccgattcaatgtcggcatgggttcgtgacgatgtcttgggcgtaattttggaataccgaatgcaagaagagctgccaacgttttttagttccaacttcaccatgcagcagctggaagaccagcatttggccattgatgcgcaaggcgcgcgtgagcctttgaaagccaagcggatcatgcagcggattcgtttcttgtcgcgtgagtattatattgaaggcgaaaacatgcgggctgggaattaaattgctgcttgacattgttaaagtggtttagtatattagtatctgttgaaagaaaaagcagaagcacccgcttctcgccttggtgaccagagttgccgggctgacgagtttaaatgaccgttgacattcctttgtcaatggagtttagcggggtgcagtatgcattccgctttttttgcttgatctttctgctagtaaaattggaggtgtgttgccatagctcaaggaatgattgtcaatgacggtattcgtgcacgggaagttcgtctgatcgaccaaaatggtgaacaactgggcatcaagtccaaacgtgaagctttgcagctggctgaggaggccggtcttgatctggtgctggttgcgcccaaggcccgtcctgcagtcgcacggattatggactacgggaagtaccgttttgagatgcaaaagaaagaacgggaagcccgcaagaatcaaaagacggtcacggttaaggaaatccgcctgagtccttcgatcgataccaacgacttcaacgttaagctgaagcgtgtacggacgtttatcgaaaagggcgacaaggtgcgagtttcaattcgtttccgtggtcgagcaattacccataaggatatcggacgtgacatgattgaaaagatggccgaagaaactaaggacatcgcaacggttgtgcaacggccaaagatggaagggcgcagcatgttcttaacgctggcccctgctgctgataaggcaaaaaaataattattaagaaggtaggaaatagttatgccaaagatgaagactaatcgcgctgctgctaagcgtttcaagcgtactgccaagggtggcttcaagagtgcccaagctttcaccagccaccgtttccacggtaagacgaagaaacaacgtcgtcaactgcgtggcctttccatgatggacaagtccaacgtaaaacgttacaagaagatgcttcctgccaagtaatcagggcattttacgattaaataatttttaaacaatctaggaggataccactatgcgagttaagggtggaactgttacgcgcgcacgtcgtaagcgcatcatgaagttggctaagggttacactggttccaagcaccgtctgttcaagactgctaaggaccaagttatgaagagcggtctgtacgcattccgtgaccgcaaggctaacaagcgcaacttccgtgaattgtggattgcccggattaacgcgggtgcccgtcaaaacggtatcagctacagcaagctgatgcatggtttgaagctggctaacatcgacatgaaccgtaagatgctggctgacttggctgttaacgacgctgaagcctttaaggccgtagttgacgaagctaagaaggccctcaactaatttgcgtttaatacattgataaggttggagcagttaatgttctgaccttatttttttaccgctgcctttggatggcacgttaattgaacccttaccggttagtcggtataattaaaattagaaattttttacgaggtggaaaatgctcgaaatgtttaaaccgacttggatggttgaacgcgcttatgagatctcaccagcggctctcaagcgtcaaggtatccgagccgtcttcagtgatttggacaatacgttgattgcctggaacaatccaaacgggacgcctgaactgcgggcctggatggaggaactgcatcaggcaggaattccattgatcgttgtctctaataacagtcgggcgcgaatcggcaaggcggttcaaaagctggatctgccatacgttgcgcggtcgcttaagccgcttagctttggcattacaagggcacgtaagaagctgggcctggcaacgtctgaggtcgtaatggttggtgatcagctgctgaccgacgtggctgctgccaatcatgctcatattcgcagtatcttggttaagccgctgattgaaaccgataagtgggtgacgcggccaaatcgttttatggaaaaattcgttatgcaggatttgcaaaaacagtatccagatatggactggcaggaggaacttaaatagatgacagaaatgcatgatgaagaattgcgctgcattggctgtggcgcgataattcagacaacggatccggatggcttgggatatacgcccaattcagcactgaaaaaaggactggaaacaggtgagctttactgtcagcgctgctttagactgcgtcattacaacgagatcgcgccagtctctttgactgatgatgattttttgcgtctgttaaatcatattcgtgatgcacacgccctaatcgtttatgtcgtggacatctttgactttaatggcagtctgattccgggactgcaccgctttgtggggaatgacaatccggtcttgctggttggcaataaagaagacgtactgcctcgttcgctgcggcggcgtaaattgacggattggctgcggcaacaggctaatctggctggtttgcggccaatcgatacgctgcttgtctcggccaaaaagaaccatcagattgatcagctgctggctgagattgaaaagcatcgtgccgatcgcgacgtctatgtcgttggggtaaccaacgtcggcaagtcgaccttgatcaatgccatcatcaagcagcagacgggagttcaagacctgatcacgacttcgcgttttcctggcacgacgctggataagattgagattccgctggatgatggtcataagctggttgacacgccagggatcattcatcaagaacaaatggcgcatgtcttatcggctaaggacctgaaaatcgtggccccacaaaaggaaatcaagccaaggaccttccagcttaatgattcacagacgatctttttaggcggcgtggcacgttttgattacgtcaagggaccgcatgccatcgtagcctattttgaaaacagtctgccactgcaccgaaccaaactggccaatgcagatgaattttatgaaaaacactgtggcgatttactgacgccgccaaccagtgatgaaatggcagactttccgccacttgaacggcatgagtttgccattaaggaaaaaagtgatctagtctttgaaggcttgggctggatcacagtaccggctggcacgacggtagccggctgggcgcctaaaggagtcgatgtcttggtacgtcgcgcaatgatctgatttaattacagaaaggaaaataatctatgaatcttcgcggaaagcagaagcgttttttgcgtgcacaggctaaccatctccagccattgtttgcagtcggcaagaatggtctaacccaggcttggctcgcgcaattggatggtgctttggacaagcgtgagctgatcaaggtcagcattttgcagaatgccgatgaaacgactggcgatgtcaaagagttcatcgaacaaaacagtgatatccaagtcgtccaagagatcggccgggtgctggttttgtttaaggtatcaagcaatcccaagctgcgggaactctcacagcgtgttgaacgcatctagaaacgaggtgtgattcttgcagcaggctaaagcaacgatcgcgatccctaagccgcaagttcagcgtaccagctttcagcatcgcaagcgaatcggcatttatggcggtacctttaatcctgtgcataatgctcatttactggcagcggatcaagttggcaaaacgctcctattgaacaaggtgcttttcatgcctgatatgattccgccgcatgttgatcataaagaggccattgatgctgaagaccgcgtcaatatgctgcagctggcaattgaggataatcctttgtttggtattgaaatggctgaaattgagcgaggcggcatcagctatacctacgatacgatgaaatatctgaaagaaaagcaccccgataccgattattacttcattattggtggcgatatggtagactatctgccaaaatggcacgagatcgataagttggttaaattggtaaactttgtcggtgtacggcgtcctggagcgcaaaatgactcacagtatccggtgatctgggttgatgtaccaggcgtcgacttcagctcaaccgatattcgcgatcggatcaagcagggccgttcgatccgctatatggttcccgataaggttgccgaatatattaaggagcatcagctatatcatgaatgatgaattgatttatcaagagcatttgattccaatgacgcgccaagagctgattgagcatctgcgggccgccttgcgtgataagcgttttgagcatgtgctgcgtgttgagcaaaccgcaattgaattggcaaaacaatatggcgttgatgtagaagcggccagcattgccggactttgtcatgattatgccaagcagcgtgctgatgaggactttatcaaggtaatcaaagccaagaagctggatcctgatctattaaactatggcaacgcgatctggcatggttttgtcggtgctgagatggttaaagacgaactgggcgtgcatgatgaagatattctgaatgccattcgcttccatacaacgggtgcagcctatatgaccaagctggcacagatcatctatatggcagattatattgaaccaggtcgtgactttccggccgttaaaaaagcacgcaagcttaccaggcaggatctgggagctggcgttgcctatcagaccaagcatacgctgctttacctgatcaaaaacaacgccccgattcatccacagactctggcaacctttaatgcatgggtgccgcaatatggaaaggaaattgattaatggacagcaaagaattactaaaaatggccgtacaggcagctgatggtcggcgtgccgaagacattacggccttaaaagtcgatgcgattacgccaatggctgattatttcgttattatgaccgggggatccaatcgtcaggtccaagccattgccaacgcgattattgaagccgcgcatgaaaacggcgtcgatatcaagagcgtcgaaggcaagcaggaggcacagtgggtcttgattgatcttggcgatgtggttgtacacgtctttcgtgaagaaacgcgccattactataatctggaaaagctttggtccgacgcgccactggttgacttgagcgaatgggttaaagaatagtcatgatctacggaacgtttgcccagctgtacgatgaattgtttgaaagcgatatgtatcagcaatggcgtgaatttgtcgagagccggctgccaaaaagcgcgcagacgattttggacgttgctgggggtgcgggacgactgggcgttttattggcacaagatggctatcaagtcgtggactttgacttttcagaagagatgctgagtctggcctttaagcatgcccaagaagcgcaggtaccaatgacgctggtacaaggcgatatgcgcgatctgaacggcttggaacagtatgatgcgattacctgttttgccgactcgctttgctatctggatgattttaacgatgtccaggcaacgcttaagcagatggcggcgcatttaaaagatgatggctggctgctgtttgacgtcattacgccgtatcagaccgatgaaatctaccctggctatatgtataactatgaagatcctgatgagcagcgggcctttttatggcgcagctatgccgatgatgacgttgagcatggcgtgatccatgaattaaccttttttaaccgcctgcccgatgatcactaccagcggctgcatgaaacgcattttgagcgtgcctatgagttaaagaactggcgagaggcgcttttaaaggctggctttaatcagattgaggttaaagctgattttggcagtcaagcgattgacgaaaaaacaacgcgttggttctttatttgtcgaaagcaggtggattaatgcatgccgtggggttggtaaccgagtataatccttttcataacggtcatcgctatcaccttagccaagcgcgggagctaacccatgctgaggttgtcgttgccgtaatgagtggcaattttacgcagcgcggcgaaccaacgctgcttgataaatggcagcgcgcacaggcggcactgaccaacggcgtcgacctggtcgttgaactgccaatctttatggccgtacagccagcccatcgttttgcggccggagccttggaactgttagcagccttaggagttgatgacgtggtctttggcgctgaacatccaaaatgggattttaaacagctggtagccgcggagcaaaactttacggctagcggctttagtcagtacaacgcgacttttgccacgcagttcaatgaacagctgaaagatcagaccggtttgtcattgactgaccctaacgatatcctgtcatttggctattataaggcacagatcaatgaacgactgccgcttcgtctccacccgattcagcggcgtggcagtcagtaccatgatgagcgcattgagggaaagattgccagtgccagtgcgattcggcaggctgttttagagcatggcgattttaagcaggcagttcccgtccagacggcccagcagctgcaaaagcttcagcaagtgccaagctgggacgcaatgtacccgatgctgcgcaatcagctgattcaagcccccgtcgagcagctggcccagatctatcagatggcagaagggctggaataccgcatgaaagacgcggctcagcgtaatctgagctttgctggctttatgaaggcggtcaaaacaaagcgctatacctatgcgcatctgttaagagtctatctgtatacgatcctgcagcttaccgagtcgcaggtgagtgatcatcttaaacggccctatctgcatgttttgggctttaatgaacgcggcagagactatctgcattcgattaagaagcaggttgaattaccgcttttaaccaagattgatcaaaatctgcgtgacgatctgctcaatcttgactatcgcgcaggtaagctttaccagacttttacgccggttgagcaggatttaaagcatgcgccggtgattgttaagggtgtcaaggaataaacattgacaagcaaacttgggactagtataataacgcttgttgcattaggaggttagtaccgtgaaatggacgttggctgaacttcatcgctatcatgatgagccgctgcatattcaaagtacttttgatctaaacgcatcactgacagaacggttccctaatcaagtccttaactgtcagcctgttgaggttgacggctacgtggtctatgatcagggtgatgctactttaagcgtcaacgttaagacaacgctgaccgtaccatccagccgttcgctgaaaccggtcgaattgccattggattttgcttttgccgaaacctatgtcaatgatgagacgcatgctggtcgctatgaagatgatgacttggttttcgtcttgcctgatccgcatgatacgattgattttgacaatgttttggcggaaaatatcattgagcagattccaatgcaggtattgtccgaagatgaaaaaaacagctcgcagatgccaaatggcaagggctgggaagtcattgccgaggacaatatcaatcaggcaccggataaggaacatgttgatccacgtttcgctaagctaaaaaacttatttcctgatcaggataaccaaaattagcgaacggttaaaaaccactagtggatagattatttgaaggaggtgtcacacatggctgtaccagcacggaagacatccaagacgcgtaagcgcaatcgtcgtggtcacatcaagctgactgtgcctggcttggctccatgtccaaactgtggtgaactgcgcaagtcacacatggtttgcccaagctgtggttactacaacggcaagcaagctgttgaaaacaactaatcacgtcgattttattcgattaaagacctttctcgaggcgccggacctgggaaggtctttttttatgtaaagattgttaaagattgaaaaaattttaattttaacacagtttaattaatctcaaaggtagggtagattaattttgtgtgataaaattggtgtggttattatgtgggagtaagacccaccaatttaaacgaggagcgttttaatatgagtcggattttaattattgaagatgaagaaaacctggcacgattcgtagaactagaattaaagcatgaaggatatgaaaccgatgttgagctggatggccgcgccggactggatgctgccttaaatcaagactttgacgtaattctgcttgatttgatgctgccagaactgaacgggattgaagttgcccgtcgcgtgcgggaagtcaaggacacgccaattatcatcatgacagcgcgcgattcagttattgaccgggtttctggcctggatcatggtgccgatgactatatcgtcaagccatttgccatcgaagagctgctggcccgcgtacgggcactgctgcgtcgaatcagcattgaaggcggcaatgccaagagccatcagacaacggttacgtataaggacctgacgattgaaaaggaaaatcgcgtcgttcgtcgtggcgatgagatcatcaaccttaccaagcgtgaatatgaactacttttaatcctgatggaaaacatcaatgtcgtcatgtcgcgtaaggaactgctcagcaaggtctggggatatgactccaaggttgagaccaacgttgtggatgtctatatccgttatctgcgtaataagatcgaccgccctggagaaaagagctacattcaaaccgtgcggggtactggctacgtaattcgttcctagtcgataaagaagggtctttatgagcgaaaagcaatcaaaatcatctcgcttcgtttcgctcaaggtaaagtgggccattggcacggccatcggatctttaatcatttcaatgatcgtggtgatttcgctgttcagtgccttcacgcaaaacctactacagcaagaacgcagcgagcttaatcataatatgtccgtcgtggtgcgtcagctggggaatgctggcgaaagttctctgaccaagggcaaggtgcggtcgatttttgagcatgagaccaatctcagcagcacgaccgaattttatcgtcagcctttggtccagggcttaagcaattcacgagtgacggttaccgtgatgaacagtaatgggaaaaagattttccaaactgccaaggccacgctgccgcttaaaacgtccaaacaagctaaaaccgaaatggtcaaaggcggccatcatcaaatcatggttggccgcgagccgatcttatcgcatgatggcacgatcattggctatgttcaggtcgaaaatgatctcaagcagtactatcaagtctttaaacgcttgattttgatttcggtgctggccctttgtctggtcgtgattgccagcggtctgctgggctatttcctgtcttattactggctgagtccattaaacgatattcatgataccttgacggtggtacgagatgatccaaccagcgatgcgcgcgtgccaaaagacgttactgaattaaatgacgagctgggcgaattatcgcgcatgtttaatcaaatgcttgatcagactcagcgctatattgatcagcagacgcaatttgtcagtgacgtttcacacgagctcagaacgccggttgccattattcaaggacacatggaaatgctgcagcgttggggcaaggatgatccccaggtcttggatgagtcaattgccgctgccttaaaagaaacgacacggatgaacagtctgatcaaagaaatgcttgatctgacccgtgccgaacaagttgacgttaagtttcacgatgccgtcactgaggttaaagacgtggttgaacaggtctttaacaatttcaagatgctgtaccctgactacgtttttcgttttgatgacgatctgcatgaagacgttccagtacacatctatcgtgatcatcttgaacagattctgatcatcttgtttgacaatgccgtgaaatattctaaggatcgcaaggaagttcatctctccttatcgcgcaacctgaattccgttgaaatcggcgtccaggactttggcgaggggattccgcaagaagacgtgctgcatgtctttgaccgcttctatcgtgttgataaggctcgcagccgcaaaaaaggcggcaacggtctcggactggcaattgccaagcggctggtagaaggctatcatggtcatattgccgttgaaagtacggtcggctctggatcgctgtttcggattactttaccgatcgtgaaggaaaaaccgattgaaaaagacaaataagcgtaatattcaattaccgcaaacaaaataaaaacctcgtttcaaatgctgaagcgaggtttttatatttaggctgatttagtcagatttgcttttctctgggcgtcttccatcagtttgagccggtgatcctgctgatgaaccaggaaaaagccaaccagcgtgatcaaaagctccgttactggtacggcagcccaaacgccattaatgccgaatagccaacccattaggatgatggccggcagcaagacaatgtagcctcttaaaagcgatagtgaaaacgaaagcgtggcacagttaatggcggtcaggaaaataatcattaacagattgatcgctgaaaataaagtgctggtaaagtagatcggcattcccaccatggcatagcgagtcagctgcagagaatgatcatgattgaacagggtaatgatcggatgacggaacgcaaccagggcgacaaatgccaaaactgcaattgctgccgtaatctttataccatgtcttaaagccagccggacgttgcgaaaatgccgcgtcccatattcgcgactggccagcggctgaacccctaaagcgaccccattagcgattgcaacggtgacgatggcaatgtttgagatcacgccataagctgccacggcgtagttgccgctgagctttagcaaaaccatgttgaagacatagattgaaacgccggtgctcaattcgtttaagcatgctgaaacgccaagcttggcagccgttttaagcgttttaagtcttggccagacccagtgccattccagctgccgatatggaaaacgtttatgaaaagaaagcacgatcagactggttgctggcgaaacgactgctgccaaggcggccccctcaatctgaagatgcaggccaaaaataaagaaccagtcaaagatgataacgacaaaactttcaatcagagcagcacgcatggttaaaccagggtgattgtcattgcggatgaaattaacggaaatgtagttggccatggtaaccggcgcgtcaatcgacatcagccgcagatacttgattgccatgcccatggtctgatcattggcccccagaatcgttgccagcggccgtgtaaacagattgattaaaataatgactgcggtccccagcaaaacggcaaaaataaccagttcactgtagagcgtcttaacgcgttccggatggtcaatcttgttcaatgaaaaataggcagcgccgcccactcctaaaagcaggccggtacagctgaaaagactatagatgggcagtgccaaattcaagacggtcaaacccattgctccggcagccattgagataaaaagcgtatcaatcagaatatagattgaaaggccgaccgaagcggtaacgttgcggacgatgtagttgtttaactcgccgatgatcgattcatgatgtttcaattttcaccatccctttgctttcggatcgctgattagacaaaccttgctcatattataaaataaaaaccgggcagcgtaatggttaagctgcatcagatcaaaaagaaaaagccgattcgtctcaaaaaagaatcgttgagataaatcggctctgatgatttagatgataatgccattgcaatgatcgagctcatgctggacggcctcggcagcaaaaccagttaatgaaagcgactgtttttgccagttcagatcaaaatattcaacgacgatctgctggtagcgagttgctgggcgctgaccatcaagactgaggcagccttccttggtctggtaaggctctttttgatcgtcagttttggattcagcatggctacgctgactggtcccaaagatacggcaattaccgcaactggcgcgccgatcatattggctgccatcccaacacaatccgcggaattggccgcgagcgtctctaaaaggtctttagctaaagggatgtcttgtttggtggcagggcgagctttttgggctagaatctgcaggttgcgacagattggcttgatcataattacgagcttcctttctaatgattttggtctggatttataaaaagcaccgggtcatgatcagaccgcgatgctttagaatcaattacttggatgaatgatggtgctgcttgccggcattgcgacgccgattcttattggcagtcggcttggttttggccggggactttttgagctgttcgatcgtatcagtcgtcggcttggtggcagctggctgggctggaatcgggtctggcatcttaactgggtgatccttcatttcttgtttgatgttttcacgcagctttggtcgccaggcatttaccagccaggtctgcagaatggcaaacagggcgctgaccacaaaatacagtcccaatccggcagaagaagaccaggcaataaacaggatcataacggggctcatcagcatcgcggcgcccatctgcttgcgctgttctttaggtacgccgatcatggaaagccacccctggaccatgtaggccaaaaacgccagaattgccaaaattgcgcttggcttccctaaaggcattcccatgaacgtagcatgataaagatctggcgagtagcggatggctgcatacagggcagcaaagattggcagctgaattaataatggcaggcagccgattccgccagtcatcgagatgttgttgtcgcgatagagctgcatcatctgttggctgaccgcggcttgttcctgtggcgtcttggcgtctttttgccgctgctgcagctcacgcagttgcggctgcaccattgccattttttcctgcatcagcgttgattttttcatttggctcatcatgaccggcaaaagaatcaagcggacgatcacaacgatcacgacgattgcccagccatagttgtttcccatgtgctgagccagccaagtcatcaggtgctgcatgggtttggccatgtagttgtagacccagccgattggatgtccatgcttgtcagtacgtacgcagccgcttaagatcagcagcatggcgcctaaaagcgtggccacggtgagacgttttttcttcattttaaatagctcattcctttgacttcaataaatttaacattttgtatcttaccttaaaaagggcttaaaatctagcaacttcaacaagatcactgcattttaaagtcctgccagtcgctttcaatggcgcgtggctcgatctgcatgccggcaactttggcatatgggttgggaccagcctgaacttctttgacaaacatcttgactgctttggctggaccttggacatcgattgtcacgctgccgtcccattcatttttgacttggccgaccagaccgtgttgtaaagccagttcgtgagtagaccagcggaaaccaacgccttggacgcggccagtaacgacaatatgataattaagcataaaaacccctcccataagcggttgacgattatcaaggatcattaggataatggtataattaagttaacgataaactgaggtgaaaaattagactatggaagaattaacttcaattcacaatcaacgcgtcaaaaactggaaaaagctgcagacgcgcaagtaccgtcggcaaaccggccaatacatgctggatggctggcatctggttcaagaagccattcaaagcggactgacgattcatgagctgatcggcaccaaggcagcactggctgaacatagtgatattgtatcacgggtcaacgcggtctatcaggtcacgcctgaaatcatgcgtcatattacagagacgattacgccccaaggtatcgtggcaatcgttgacatgccgaatctcaagcgcaagccagctttaccgttaaagggggcctggctgctgctggatcgggtgcaggacccgggcaacgtaggaacgatggtcagaactgccgatgcggccgggtttgcgggagtagttgctggcgatcggaccgctgacttctgcagcccgaaagtcgtccgttccatgcagggcagccagttccacctgcagctgtttgaaggcgatctaaacaagtggattgctgattttaaacagcagcagtcgccagtctatggcacgcagcttaatccagccgccaagaatttccgcgctgtgcatcctgggactgattttgccttgattatgggcaacgagggtcaaggaatgagcgatgagcttttaaagcagacgacggataatctgtatattccaatgcgtggtcaggcagagtcactcaacgtcgcagtttcagccggcatcttaatgtttcagctgaatgcccaaaactaaatcctcagttgtcgtcaatcctgctgagttgcttactattaatacttacattttataagagcttattaatttatttttgatggcaaatcatgtatgatattgacaaataagggaaggggccagttactatgaaaaccgaaaacgaatggcgtcaagacccagaatatgtatccttggtcaaagatctgctggaacagccggccgttaaaaggcttgcgcactataagcagcatcatcattctaatcgcctgcagcattcgattgccgtttctttcgacagctacaagctggcaaagaaaatgcatctggactacaagagtactgctcgcgccggactcttgcatgatctgttttattatgactggcgaactaccaaattcaatctgggatcgcatgcctttattcatccacgggttgctttgcgcaatgccgaaaagattacgcatctgaacaaaaaagagcgtgatattatcttaaagcacatgtttggtgctacgatggccgtgccacgctacatggaaagcttaatcgtgtcaatggtggacaactacgaagctgagcatgagtttttcggtccactgcgcaaaaaacttgaacagcaaaaaaaggttgtggattggcatgcgactccttccaaaaacagtaaaaagatttagttttgaagaggggaagattacatggatcaagtaaaggccaaacaggatgattttacgctgtgtccaaagtttacagagacatttgccatgctgggtaaaaaatggaacggactgatcattgaagtcttactgcatgaacatacacagcgtttcaaggatctggccgcgcacgttgataaatgcagcgatcgggtgctttgcgagcgtttaaaggagctggaagaagacgggattgtttcacgcaatacctatcctggcgagagtcgggtcgattattcgctgactgaacgaggtcgtgatctggcgccagttatggaggccgtgcacgaatggagcgagcagtggtgcggcaaagactaaaatcaggacttgaccacgttgccatgattgcctaaaatagccttatatttaactaaaacgactttgatggaaattagtagctgaatagacggcacctagggagaaatgatcatcgactgcaagtcatttctgctttcatcagtgaatttcacttccggagtcggtaccttgtatcccggttgacgaccgttatcagtcatttgagcgtatgacattgtcataaaccagggtggtaccgcgaacaactcgtccctcgattcgtcgaaggacgagttttttttgtggccacgctaaggaggaaaattgatgggtttaagagaaaaacttgaagaattgcgtcaacaaggtctcaatgaaattgcaaacagtgatgacctaaagaacgtcaacgatatccgggtcaagctgctgggcaaaaaggggccaatcaccaacgttttacgcggcatgcgtgatctgagcgctgaagaacggccaaaagtcggtaagtttgccaatgaggttcgcgatgagctgcggcaggctttagaagacaaaaagtccagtctggaacaggcattgatgaatgctaagctgcaaagcgagtcaattgacgtgaccttgccgggaaccccggttgcacaaggccagccacacgtgattcagcagattattgatcaattggttgatctgttcatcgggatgggttatgaggtcgcagtcggcgatgaagttgaacaagaagaatacaactttgaaaagctgaacctgcccaaggatcacccggcccgcgacatgcaggatactttctacattacgccatcagttctgatgcggacgcagacttcaccaatgcaggcgcggatgatggaaacacacgacttttctaagggaccgctgaagatgatctcgccaggcaaggtctaccggcgcgatactgatgatgctacgcacagtcatcagttccaccaagtagaagggctggttgtcggtgagcacgtgacgatggctgacttgaaagggacgctggaagtagttgcccaaaacctgtttggcgatcagctgaaggttcgcttgcggccaagctacttcccatttaccgagccaagcgttgaagccgacgttacctgcttcaactgcctgggcaagggctgtgcaatctgtaagggcaatggctggattgaagtcttgggtgccgggatggttcatccaaacgttttgaagatgtcaggcgttgatcctgatgtatatggcggctttgcctttggactggggccggaccgttttgccatgattaaatacggtgttgaagacattcgtgatttctaccaaaacgacatgcgcttcttgacgcaatttgatcagaaaggataatttcaatgaaagtttcataccaatggttaaatgaatatctgccgcttgaaaagaaccagattgaacctagcgcgctggctgaaaaactggctctgacctcggttgacattaatgaggtctactcgccaagcgatggcctgagcaatatcgtcgtgggccagatcgaatcggtcacgccgcatccagactctgatcatctcaatctgtgccaggtcaagatcagtgaaggagcggtcgttcaaattgtctgtggtgcacccaatgtcagccaggcagccggtaagaaggttatcgttgccttagctggtgccaagcttaaagacggcaccaagatcaagcgcggcaagattcgtggcgaagaatcaaacggcatgctgtgtgcactgcaggaaatcggctttagtgacaaaattgcaccaaaggcttatgaagaaggcatctggttcttgccagacgatgccaaggtaggcgatgccgtctttggctacctgggaatggatgacacgatcattgataccgatctgacgcctaaccggggcgatatgctgagtatgtatggcaatgtcaatgatctgagcgcgatttatgatctgccgaataatttcgtttcacatgacgttaaggaaaacggtacgcaaaaagctgctgacatgctgaagattacgatccctaatccacagattgcaccagcctacaaagcccgggtcatcaagaacgttaagctgggcgagagtccaatgtggctgcagattcgcctgtggaatgcgggcattcggccaatcaacaatgtcgtggacgttaccaactatatcctgctcaagtatggtcagccaatgcacagctatgactatgatcggctgccagcgcatgagctcagcgttcgccatgcgcatgagggcgaaaagttcgtaacgcttgatgaggctgaacaaacgctgcaaaaagaagacatcgtggtaacctcaaacgacgagccagtctgcctggccggaacgatggggggactgaatacggcagtcagcgatcagacgcaaaacgtggtcttagaagcggctatctttgactcagtcatggttcgcaagcaggctcgacgcttagatctgcacagcgaaagctcaatgcggtttgaacggggcgttaatccagaaacggttgaaacggctctgaacgaagctgcttactggctgcagcagctggctggcggtgaggttgaacagggaatcgttactggcagtgaggcgccaatcaagtcaacgccaatcacgatgtctttgactaagatcaatgccgtgctgggtacggatctgaaactggctcaggttgaaaacatctttgatcgcctaaagtttgcctacacgcaatcggatgacgatacgctggtcgtaagcgtaccggcacggcgctgggatatcagcattgcagccgatctgaacgaagaaatcgctcgtctgtacggcttcaacaacattccttcaaccttgccaaccatgacgcggacgttgggcggattaaacgagcgccaaaagttcttgaaggccacacgccattcattacagagcatgggattgaaccaggcgatcagctattctttgatgaatgaaaagcaggctcagcagtttacgattgaaccagctgttgaaccaatgcagcttgactatccaatgagctctgatcacacgacggctcgtgaaagcatcatcagtggtcttttggttgacgtagcctacaataccacgcgtcaggtagaagacatcgcgctttatgaacaaggccgcgtcttcattcccaaaggcggcgagcgtcctgaagaacaagaacacgttgctggggccatggcaggcagtctgttggctgacagctggaatctaaagcggcgtccagttgacttttatcagatcaagggaatcgtcgaacgctacctgcacaacatggcgattgctggcacgatcgaatacgtggctgacagcactcgtcctgagatgcaccctggtcggacggccaatattttgttaaacggcaagctgatcggctttgttggtcaggttcacccccaaatggccaaggacttgaagattccagcaacctatgtctttgaactgaacgtcgaagcactgctggctgccgacaagctgccaaaacagtaccgtcatatcagcaagtacccagccgtaacgcgtgatattgcgctgctgatcgatgaagatgtgacgaatgaagaaatcgttgatctgatctaccaaaaaggcggtcaatacctcaaagacgttcatctgtttgacgtctacacgggggctaagctgccagacggcaagaagtcgctggcctacacgctgacttatcaagccgatgataccacgctgacagaagatcaggtcaatgaagcctttgccagagttgaaaaacacctgcaaaacgttttgaatgcagaaattcgttaattgcagtcactgattagggaacgtctaaaaaggcggtccctttttgctattttgtttgaggaacttaaaatgccccattttaccaaacaacagattcggcgccaaaacatcgtgaccctgcttgtaattgccattctgatcgttagtggtctgattgcgcatggctggtttaatcatgagctgctgccggtagatgccgatgaccagaccagacgtgtggttgtgattcctaaaggtacgaccgataaacaggccggtacgctgcttaaaaaacagaaactggttcgcaatgcctatgtattcgactattatctgcagacgcacaagacgcagggtattaaggcagggcgcttttatttgaaacgaagccagtcaacgcctcagatcgttgaaaaactgcagcaaaaacccacggccgcgacaaatcctgctgaataaacttgtcgctgctatctggctgcgctatactaagtttcgtattgataaataaaggagaattttagcgtgaacaatgatgacaaacgtccaatcattattggcgtaacgggtggctccggcagtggcaagaccacggttagccgagccatctacaatcagctgcatggacaatccatccagattattactcaagatacctattacaatgaccaggctgacatgacgatggaacagcgtaaggccgtcaactatgatcatcccttggcttttgatacggatcttttggtcgagcagctggatcaactgcggcacaatcaagccgttgaaatgccggtctatgattacaaagcctacacgcgggctaaggagaccgtgcatgttgaaccacaagacgtaattatcctggaaggcattttgatcctggatgatgaacggctccgtgatctgatggatatcaaggtgtatgttgataccgacgacgatattcgtatcatccgccgtattcagcgtgatatggaagagcgcgggcgttctttggactcgattattggtcagtatctggcaacggttaagccgatgtatcaccaatttatcgaaccaaccaagcgctatgctgatctgatcgtgccagaaggtggtgagaaccaggtcgcaatcgatcttttatcgaccaaggttcgcgatattctggttaagcgcggtcatactgaactaaagtaagcataatgatggtttacaattaatgttgagcatgttaacgttgcaaaagacgaaattcaaaaaagaaatctaggaaaatttaaaggagttgttgaaatggctgaagaaaaaagctacccaatgacggctgaaggtaagcagaaactggaagaagaactggaaaacctgcgtttggtacggcgtccagaagtaatcaaacgaatcaagatcgcccgcagctatggtgacctttcggaaaactctgaatacgaatctgccaaagatgaacagtcattcgttgaaagccggatctcacagatcgaacacatgctgcaatactcagtgatcattgataacaatgacgtggctgccgacgaggtttcgatgggacgtcaggtaacgtttaaggaactgccagatgaagagccagaaacctaccaaatcgttggtgaatccgaatctgacccgctgaacggcaagatctccaatgaatcgccaatggctaagggtctgattggccacaaggtcggcgaggaagttgaaatcgagattccaaacgggacgatgaatgtcaagattctggaagttaaataatctgtaaacctttgccatctgatcggcgagatttattgggtctttgtcagattggattggtgaagatcaattccctgcttcaaaatgaagtggggttttttttattgctttattgttgacaaatgtaatttgaaagtgcagactgattatattaataattacatgtgtaaacaaaaaggaggctcaaccaatgcttaaaattttgattttattgatagctgtaattttgattgctgcaattggctggtggttttttggccatcatcaagaaaaggccatgacggcgcggcttaacgacaacgatcaagatcaaaaaatccggatcgaggtcaatggtggctactcgccaagtacaatcgtcttaaaaaagggcgtaccggccgaattggatttttatcgcaaggacccttcatcctgtctggaaagagtaatttttccagaacagggaatcaatgagcagctgccgcaaaatcagctgcgccagattgagtttgataccagtaaagccggcgagtatgagtttgcctgtgggatgaatatgtttcatggcaaggtgatcgtcaaatgatgagcatcaaaaaacgtttctggctggcacttttgctttctttgccaatgctttatgacatgctggccatgctgtttgcctggccgatgctgccaaacggtgattggattgcgctggtactgacgactttgattatgctgatatcaggacgggcatttatgcaaagtgcctgggctgcctttttgcatcatcatgccaacatggacacgctggttgcggtagggacgctgacggcatatctttacagtatcggtgccctgatgcatcatcaaggcgtgttttttgaaagtgctgcttatattatcgtctttgtcttattaggccagtatctagaagacaagatgcgcacacaggcatcgcaggcaacgactaagctgctggaactgcaggcaagacaggccacggtaatcagaaacggtcaagccagtgagattccgattgaagaagtcgcgattggcgatcggctgctggccagaccaggagaaaagattgctacggatggcagaatcgttaaggggcattcaacggtcaatgagtcaatgattactggcgaaagcatgccgattgaaaaacagactggtgatctggtaataggcgggacgcttaatcaaaccggtattttagagtacacggctgaaaaggtcggcaaggataccatgctggctcagatcgttgaaattgtcagacatgcccaatccagccatgccccgattcaaaaaatggctgatcggatcgctgatgtttttgttcccattgtattgatgattgcgattgcggtgtttgccatctggagcgtctttttgaatgccacgctgaccagatcactgacctttgccgtttcaacgatcgtaattgcctgtccatgtgcgctggggattgccacgccgactgctttgatggttgggacaggacgggcggccaaaatggggattctgatcaaaaatggcgaagtcttggaaaccgccagtcatattaaaaatattgcctttgataaaaccggtacgcttacacagggacaaccgaccgttacggatgtgatcggcgacccaaagcaagtcttaacgctggcagctgccttagagtcgctgtcagagcacccactggctgaagcaatcgtaaaagcggcgcaaaagcaatcaatcaccttgccaaacgtgaccgaattcttaaatcgggcagggcagggcgttaccggtcaaatcaatgggcatcaggtttttgtcgggaagcctcaactggccagtcagccgcttgataaagaatggcaggatcaaatcaaacggctccaggaagtcggcaagacaacggcagcggttgggcaagatgggctgatcattggcctgatcgcgattcaagatgcaccgaagccgtttgccaagtcagccatcgtaagactaaagcagcaggggatgcacacggtgatgattaccggtgataataaacgggcagccaaagcagttgccaaacaggtcggcatcgatgaagtgattgccgaggtaatgcctggcgacaaggctcaacaggtcaaaaagctgcagcagtctggggtgacggcatttgtcggtgacgggatcaatgacgcgccggccctggcagtcgcagacgttgggattgctatgggatcgggaaccgatgtcgcaattgaaacgggtggcatcgtcttggttaaaaacagtctcaaggatgtcgtcaaggcgctgacgattgctaaaaaaacttttgcgcgtatcaagctgaatctgttttgggcgctgatctacaacttgatcggcattccgattgcagccggcgtctttgcgcgttggggactggtgctcagcccggcactggctggtctggcaatggccttcagctcggcttcggtagttgccagctcattgatgctcaacgctgctaaaatcgatgactaaaatcaaaaccactaaaaaaggatgacgtcagctgcgtcatccttttattttttaaatgaataaagtattagcgcttttttcggcctttcttaagccaccagatgctgccgctaattaccaacaggctgattgtagttcctaagatcagatatggtggaatgtagtacatggaaaccttatgcttgccagtcgacattggaattgccataaaagtacttaaggcttttttaggcgtaacggttttgccatcaaccttgacgtgccagccctgatcataagggatggtagtcattaaaagatcctggccagctttgagattgaccgtgcccgagattcggttggcggcatagctggagacctttaatggcgattgctttaaggtcttgagactggcattgaaggctttttgattaagcatgtagagactgacgttttgcatccagagcgttgagttcttgagactaaagacgatcttgatggttttacccttagcgtggttggcgacgttgaccgttaccgtattacgataggtatcgtattgagtcaaggccttgccgttgatcgtaatcgtggcattgttcttgacgttggcgcctaaagtcaggtaataagaattattggtcgtcggggtaaactcaagctcaatgcttgctggcgtcagcagattgcgttttttaaacgtggttccggtaatctgaacggcggattggacattgccaaacgtgacgtggttaaagttctggaccaaaaacagcgactgattgacgccgcgacccgccagcgactggaagatctgtgactgataggccaatggatccagcgtgttatgcgtcagattcaagacttggctgctggcaccaaacgcaatcggcagtgcagcttgattggacttgatattgaccattgaagtctgagcaatcgttttttgctgcttgagatcgggtctgagactggtcgacggcaaaacggtactgccattctgcttgccattatgccgttcctgtaagaagtacttaaagcctagcagtgaatcggtaacctgtgtgccatccgtgtaggtgataaagccatcgccatcgggctgcccaattgtccccatgaatgctggctgagcgggttccagcgttgagccaaaatgatcgccgctgttgaaatcagcttggaatgggtcatccttggttcgcataaaggtcttgccggttcgataaaggccgctgtctagcgatttgagcttggtaacggctttatccagttctttggtataattgccgaactcagcctgtgagacataagaaatgttgtttagcgccgtaaatgcgctggtgctgacgtcacagaccgccaacaaaatcagcagcaggtcatagagtcgtgaactgccgtaacgcgggatcaacagcgccaaaatggcaatcgctgcaaagccaagtccgatcagcagctgattgcgattgatatacgaaagatgactgacctgttttagcatcagataggcaaaaatactgccgactaaaaccgctaagccaagcgcggccggccatttgattcgaaagtcaggctgcagagtgcgcgcggccagccagatgcaccaaaatgaaaacaggtaggaaaagcgatacggataccaaactgggaactgaccagcgtgccagaacagatccagtgcctcaatacaaaaagaggccagcaaaaacaaggtaatcagaccggctgccagacgaccggcaattttttcgcgccgattgaaaaagtaaaggacggcgcccagcataatcagcatgccaacataaatatttggctgaccgcttggcatctgattgaaattgaatgatccgggcaccagtttggccagcatctttaacggattatactcaagcttccagttccatgacgtggtcgtataagtgcccttgctctgcgttaaggcataggcagtcggcagcagaacgaacgcgctgatggctccggcaagcagtgagctgcccagatagcgtcccagggtatagccggctgcatgccattgccaagtcgttttctcactggcaatcgtccaaattccaaataaaatggtgaagatggccaccatccaggccatatagtagttgtcgatcaaagccactgccagccacagcgtataggtccagggactgcggccggacaataatttgcgctcaccatagatgatcagcggcagcagaaacaagacatccagccagagcagattgaactggttggccaccatccagcccattaaggcgtagggggtcgaaaaaatccaaatgcgtggcccctgctgaatcttttcgcggtcaagcacccaggccatcgctaaaccagccaatccgtatttaagcagcgttagaatggcaatgccgctggccagatgctgtgcggggaaaaagagcaatagcagatttaacgggctccaaaggtagtaggcgttggtaccccacatctcaccgcccagtcccttactaaaggaataaagcaggctgctgggatgatgcagaagcgatgagcgcagataggcaaaaaagtcgacatactgctgaccaagatctacagtcaagacagtactgttgccaaatggtgccatgccgcgataaacaaagtagccgcccataatcaagacgggcagcaaaaaactgatcagcaaaaccaaacggcgctgacgaacggtatgtgtcatatcaaaacagatccttatctttaggaatgaaaattacgtttttcattatagccataaagtgtgaaaacttcgtggtttccttgcttaaaattcgttaaatcatctcataataggtttaatcttgcaaataaaagtgtatagttaaactcttgaggacaatcttgcagttcgattcggtcgtgctgcaaaaaatttgttaaaatagacttattctgtctaaggagattattaaaattgaagttcttaaatcgctttaagggcatcttcgatcaacgcaaaaagagcaaaaaaaccgcgcaatccgtgattccatcgcgattgaactttttgctatgggtcgtagcgctccttttactggccttggttgcccgcttgttttatctgcaggtgctgaatggatcatcttttaaggctgaggttaaaagctcggatacgaccgtgcagaccaacaatgttcagcgggggatgatctatgactcatctggcaaggttttagtcggcaatcaggttcatcaggcaattacctatactaaaggcgctgacgttaccagtgcggatctgtataagatcgccaatcgcctcggtaattacgtcaacgttggcactaagaccaagctgacgcagcgtcaggcagaagactactatctggccgacagcgataatctaaaggcgattgtcaagaagctgcacctgtccagtcaggttaccagcaatggtcaatacaacaaggcattggcctacttgaacaagcatccagaagtctacaagctgaccaagctgcagcagaataaggcgcggatctatgctgcgatgagcggcgcctactcgctgtcgacgacctatatcaagtcaaccggcgttaccgctaaggaattggctgaagtcggcgagcatctgagcgaaatgccaggggttaagattgggaaggcctggacgcgaaattatccacagggtaaagacattcaaaccttaaccgggacgctttcatctgggctgccaagtgatgagctgaactccatgcttgctcaaggatactcacgaaacgatgacgttgggcaaagctatctggaaaagctctatcaatcgactttagccggctcgaaatcgcagactgaggttatgacgactggcaataccaccaaagaaaaggttaagtatgccggcaagaagggtgacaacctggtcttgacgattaattccaagttccaaaagcaggttcaaagcattctggaaaagaactactcatcagctgggatcgcttattcaaccggggtctatgccgtcgtaatgaatccaaataccggcgagatctatgcaatggctgggattgaccgggacccaacgactggcaagcagactaccgatgagatcggggccatcaaccatccgattacaatgggatcggttgttaaaggggccatgatcatgggtggctttatgagcggtgtcatcacgccaagcaacaataccttgaccgatatgccgatcaagctggccgggaccagtgccaagacttcttggttcaacaagactggtagtgccaacattgccttgaatgcggccacggctttggaagtttcatccaactcgtacatgatgcagctggccatgaaagaagggggcatgaaatatgtctctggtggtgcgattgaccttgacccatcgatctttaccaagctgcgctactacttcaagatgttcggcttaggggttaagacagggattgacttgccaggcgaaagctcgggctatgagggtccttccaaacagtccaacatcggttcggcacttgacctttcgtatggtaactacgatggctatacaacgattcagctggctcagtacatgtccacgattgccaatggcggctatcggatgcggccgtacatcgttaagcaggtgcggggaaccaacaaggatggttcgctgggagccattgaatatactactaagccggaagtcttgggaaccatcccagccactgctgccgaatggaagatcgtcaaagaaggtctctatgacgtggttcacggctcaagtacctacattactggtaagaaactggctagcgatacgccatcgatctcgggtaagactggtacggccgaaacgttctacaagaacaacagcacggttacgctcagctttgccggctatgcaccatctgataatccacaggtcgtagttgccctggctattccaggcgcaagcaactctgatggtggggccaacctgacgatggcttcgcagatctttaaggccttttggaaagatgttaagagctcgaaagattatcaatagagctgtaaataatagctgtcaagggaatttccttaacaatcttggacaaaactctggtcaaagcagcgaattgatgatatagttgtacgagttagggttacgaataaccaattaaatcttaaaaaagtttggaggttgccaccaatgcgtgtaaacattactcttgaatgtacttcatgccacgaacggacttacttgaccagtaagaaccgtcgtaacaacccggaccgtcttgaactgaacaagtactgcccacgggaacgcaaggttacgctgcaccgcgaaaccaagtaattcaaatctaaccaagactcagctgctgactggcagttgagtcttttttcttttcaaaaagaagcatgtctggctgctgatgcatcttcttagcttgatgatgacctctgattatgatactgatctgaaacgcttggttgttgaagaaggcgtttggcagatcaatcgttggcatagctggcctttaagctgaagactgcttttatggattgggggaagcaatttggtattttggtgcaaattatgcgaacggttgcaatttttgcgcaaaaacgcttgcataaattgccattagcggtgataattactttttgtaaacgtctgtcaatacgttttacggagggagagagaaaattgacacattcaaaaaaggaaatgcgcaaggcgtatcttgcccggctgcagcagctggatcaaaatacgcggctgcgcgaacagcatcgcctagcgcaaaagctttatgatctgccgcagtggaccaatgccaagacggttgcactgaccatgagccagtcgtttgagctggacacggcaccgctgattctgcatgccaggcatgagggaaaaagagtgctggttccgcgcacgttgccgaaaagacaaatggagtttgttcaaattgatgaggataccgaatttgaagaaactggatttggcgtcttggaaccattggcagggaaggtcttgcaaccacaggagatcgatctgatcgttgtaccaggagtggcctttactgctgatggcaagcggctgggctttggcggcggctattacgaccgttacctggcaaactatttaggccagacggtttctttggccttgactacacagttggctgatgcagctgagtggccggttgaggaccatgacgttatgattggtcaggtcgttaatctagagcaggaataaacatgaaagaagcatggcaaaaagcaccgcttaccagtctgatcattttgattcaagtcattgtattcgtcttgatgacattggcgggcggctcgactaattcccaagtgctgattgaatttggcgcgcgctatacgccgctgatcaaggcaggagaatggtggcgcttgattacgccaggattcgtgcacattggactcacgcatctggtagtcaacagcgtaacgctttattttatcggcatgtatattgaaaatctgtttgggcactggcggtttttggcgatttatctagtaagtacgctgatgggcaatctggccagtgcggtctttttgccacagtcaatttctgctggtgccagcactggtatttttggcctgtttggcgcctttttgatgctgggactggccttttgggatgagccggcaattcattcgctggcccatcagtttttaattttggtgctgcttaacctgggaaccgacatcttggtaccgggaatcgatctggccggtcatctaggcggccttttaggtggcttctttatggcggctgtggttggcgcaccgcgtttgggcaggatggacttgctaaaacgctttctaagtggcactatattgattgtaacgattacagtttttttggaaatgggattgctaaaatgaaaccaattcgtgagattcgcacgctatatgatgttcaacagcttttaaaacgtttcaacgtcttcgtctacgttggcaaaaggctttgggatattgagctgatggctatcgaagttgacaatctttatcaagcaggtgtcttggacaaggatttgtacatgcaggctaaactggttttaagaaaagagcatcgcattgaagaagaactgaatcaaaaaaacaaatcgccttattgaggcaagggatttattgaggttaaaggagaaattagagcatgaacaagaagttaatcggtgttgaccttggtgggaccacgatcaagtttgctattttgacggatcaaggcgaaatccaacaaaagtggtcgttgcggactaacattttggatgaaggttctcacatcgttcccgatattattgaatccatcaaccatcacattgatctgtacaagatggaccgcagccagtttatcgggatcggcatggggacgccaggaacggttaaccgcgaagaaggaacggtcattggcgcctacaacctgaactggaagacgctgcagccagtcaaggaacaaatcgaaaaaggtactggcctgaagtttgctctggacaacgatgccaactgtgccggcctgggcgaacgttggaagggtgctggccatgagggtgacgatgtggtattcattacgctgggaactggcgtcggcggtgggatcatcgctaacggcaagctggttcatggtgtcaatggtgctggtggtgaagttggccacattatcgttgaaccaaacggctatgaatgtacctgcggcaaccacggctgtctggaacaatacgcttcggctaccgggatcgttcacctggctcaggatgctgctgaagaatacgaaggcaacagccgtttgaaggccatgatcgacaatggcgacgagattacggccaagatcgtctttgacctggctaaggaaaacgactttttggcaaacgaagtcgttaagaaggttacgtactacctggggctggcatgtgccaacatcagcaacacgctgaaccctgaaacggtggtgatcggcggtggggtttccgcagctggtgaattcctgcttaagcgcgttcagcaaaacttccaaaagttcgccttcccaacggtgcggacttccacgcagcttaaactggctcagctgggcaacgatgccggcgtgatcggggcagcttcattggcgcttgactttatcgctgatgaaaaataaactatttatttgaaagctattaaaaggcaaggaagcacgtctaatacgtgatgaattgcctttcttaaattaaaacaagcatgtttggaggaaattgttgtggtactgggaatgagttcgggatggttgatttttgacatcatcgtattggcaattttgattggctggggagtaagtgctgggatcagtgcttatcggcgcaagcattatgccacggtgccggatgaagatgccttccgtgagggcatgcgtaaggcgcaggtgattgatctgcggcaaaaggatgcttttgataaagggcacattttgggcgcccgcagtcttccatacatctatctcaagcagcagtatggcgaactgcggccggatctgccggtttatctttatgatgacggcatgcagctgagtacgcaggccgtgactttcttggccaaaaaaggctaccgcaagctctacatcttaaagggcggctacgcggaatggcacggtaagacgaagaaagccaaatacgctgactagataacaaaaggctgttgcaagcttgcaacagccttttttataatcttaagagaattacagttggtgagaagagcgtcccttgcgagtagcagcgcgacggttctcatcaaaacgattttcttcttcttcgatgggcttaacgaccgtcttgtggaaagctgctacgctgcctgctacggcaccgagcgtcgttaaggttcccaggataaaaccacgtgtaaattttttcaaaagagtagccccctttatgtcatttggctttattatgaccgatttttgattgatttaccagtaatttaagacaaggaagtgttaaatttgactaaagcaattgcgatcgttggtcctactgcagtcggcaagaccgcgctgtcgattcaattagctcatcatttaaacggcgaggtgatttcaggcgattcgatgcagatctatcgccatttggatatcggcacggccaagattacgccagcggaaatggagggcgtaccgcatcatttgatcaatattcgcgacctcaaccaaagattctcggctgctgagtttcaaaaactggccaacgaacagattgaacagattgaacataaagggcatttgccgatgatcgttggcggaaccggattttacctgcagacgctgacggaaaatctggcattgggcgcggatcattttgatgaagaatcacaaagaatccgtgactactggcataaaattgcagagcagaatggttctgaatacgtttggcagcagctgcagcagaaagatcctcaggcggctgctcagattccaacgggtaatttgcgacgcatcattcgagctttagaggtcattgaaaaaaccggtcatcttttttcgcagcagactcagactaaaacggcaaatgattttttgctgatcggcttgacgacagaacgttcggttttatatgaacgaatcaatcagcgggtcgacttgatgattaaaaatggtctgatagatgaggcacgctggctgtatgaacagggcggcgaaaactatcagtctggcaagggaatcggctatcgtgagctgttttcgtactttaagggtgagacaacgcttgacgatgcggtagctaaaatcaagcaggattcccgtcactatgccaagcgtcaactgacctggtttagaaataagatgaacgttcaatggtatgatctggttagcggtcggaatacgactaatgaaattgaagccgtcgttaaaaactggttaaaaaattaaagttaaacgttagtcaaactaattaatcaacgcgatcgactgtgaaagccctatcaaaaattgacttattctccttcaattggtaggctattaaagtaatcagagggaaggctgaacataagcattagcaatgaccaatcccttaattggtctagccatctgaaactagttgtgaagtagcaatcgtggaaggaatggaataaaatggcaaaacacgtattcactaaagaagaagttcatgaattggttgaaaaggaaaacgttcattttctgcgggtaatgttctcagatctgtttggtacgactaagagcgtggacctgcctgtcagccaattagacaagctgatgaacaacaagatgatgtttgatggctcttcaattgacggctttgtccgcatcaatgaaagtgacatgtacctctaccctgacatgtcaacttggctggtctttccttggggtgaggaacacggcaaggtagcccgcgtgatctgcagcgtgcacatgactgatggtacgccatttgctggtgacccacgcaacaacttgatccgcgttttagacgacatgaagaaggcaggctttacttcattcaacattggtccggaaccagaattcttcttgttcaagactgatgaaaagggcaatccaacgactgaagtaaacgacaacgaaaactactttgacatggagcctgccgatgctggtgaaaactgccgtcgcgacatcgttttggcactggaaaagatgggctttgacgttgaggctgcgcaccatgaagttgctcctggccaacacgaagttgactttaagtacgctaatgctctggaagctgccgacaacattcaaacgttcaagtttgttgttaagtcagttgctaaaaagcatggtctgcacgctacgtttatgccaaagccattgtccggcatcaacggctctgggatgcacaccaacatgtcactgtttgacaaggacggcaacaacgccttctacgatgaaaaaggcgaactgcaattgtctgacacggcctaccacttcctggctggtatcttgaagcacgcgcgcgcactgacggcaatctgcaacccaaccgttaactcttacaagcgtctggtaccaggctatgaagcaccggtttacgttgcatggtctgcatctaaccgttcaccattgattcggattccagacgaccgcaagatgggaacgcgggttgaaatgcgttccgttgactgcacggctaacccgtacctggcaattgctgctattttggaagccggtctggacggtctgcgcaacaacctgacgccaatgaaggaagttacggaaaacatctacatgatgacgccagaagaacgtgaagccaagggcattgaggatctgccatccaacctgcacaacgctttgaagagcctgcgtgctgatgaagtcgttcgtgaatcgatgggcgaacacctctacaagaacttctttgaagccaagacgcgtgaatacgacggttaccgtcaacacgtttctgactgggaacgtgacaagtacatgctccaatactaatttgtgttttgccaaaaaggcctgccaagctgcaggtctttttattttagcgacgaaaaaaacgcagcgttgtaagtgacgctgcgttttttaaatcagaatcgtgacaaaaactattcactgagctttttggcatctgcatccagcttagcgaagcctgaaccactaggctttttgttgccacgcttttccatagccttacgggccatttcttttcgttcttgcttactcaacttacgtgccataatagtttcgcctcttttcttgacattcaagtagtccacatatgtgtaatactcgaacaactatattatagtcattctgaataaatttgcaaccgttaccgtcaatggtaaagattttgcaactacctggattaatcgctttaaaagttgtcaaaaatccgctaagattaaatcagtattaaattaaggagttaaagctatggcaaatgttgaacagacaaatggtgcgcttgatgtaagccaagcaatcaataaacaaattgctactaagatcaagtatctgcaagaattggaaaccgcggtcgatcatcatgatgactgcaaggtatatcaattgctggacaatcaacgctatgctgctgaaatcgagcatcgcgagcagcagccgaatgaacagggcgtaatgaacctggtcgatgatctggctgatcagttgagcaattttttgagtgccaacttgattcaatatttgggcaaggcctatccattcttttactacgaggaataccagactggtcactaccgcatctattttggaaattggtgggatcggcggcggtttggcgaattagacgtgctgaatatccgctttgcctttgatcaggaagaataccaaaagctggcacgcgcttttgagttgagcaagcaaaacaagcgctataacagcgatcgcatcgaacagatctccagtgaaaacgatcgtctgcaaaaactgattgacagtcgtcaggaacgtgagcaaaagcgggccgaactgcagagtcagcttaaggatgccagtgcgcacagcggtttgtttgaatccaataaaaaccgtgaagcacggcagataatcgttgaacagatcagtaagttggaagatgaagaacaagaatcgcgaacagcagctgatacgatcaaggaaaatgagcgcgtagtcttggatctgtccaaggaaaacacaatcttgagctacgaacaaaagagcattgttgatacgtttggcacgtttgaggactttgaactagccaaccggaatctgtatgccagctatcttaagagcctgggcggcaagcaagcgggggtgagcgcagatgagcaataatcaaatgatctcaacggcggccgatcgcgttcgctcgctaagtgattcgatcgcccaaggcctggaagttggtcagcgctatgtggctctgcttaatcagctgacttcgaccaaggatccgaaagaactgcttgcggcaacggaaaaattggaagggctcagcctggaaaatgcatttgtcaagttcccacagcactatcagctggccgactactatctgcttttaatggcgcggatgctggaattaaacaatgagtctggcttgacaatcgaagaaaacgatattcaccatcagctgttggccaagatttcgccaatggaagatcaagagcggtttacttttgagattgatccgcgtaacggcggggccttctttgccgagcagcatcatcatgaaccactgttttatctgaatttgaagcaccagattctgaagttcagcaatcgggcactggttgactttttcatcgtgcgtcagacgcagaaattcagtgaccttgatctgcaagccgtggtgcagccaatgatcaagtttgctctgctgctggaaaaacagctggacttcgtgattgacctgggcatcttagaaactggcaatggcgcgcggttccgtctgcaaaaaccagatctgccgctgacgattatcgatcgcttgtttgtcaagaccacggataccgactatatgctgctgagcctgccgcaaaacaatggtgccgaattgcggctggatcaaaacgtccgtctgcaattggcttttgatccggatgactacagccaggaatggagctttcgggtattagacagcgaggagcgcgtttcattttttgatgtcttgctgcactatccgctggttcgcgaatggtatcttgacaaccgtgaatttttagcagtccggaccgatgcaatgatttttgctgctgatgagccggaaaatctgacgatgacgacgcctgatcagccagccagtcaaatcgaacagccgactgctgatttggttgaaacaaaagaagcagaagaaaaggaagattagtttgttagatattactaagttgctgcacgaatcaattgaatttgactggcagctggatgaggatcatgatattcaacttggcgccgaagctcgtgtacaaaacgtttttactgccttggacgttgagctggcagagattgccaatgccgcggaatggttcaaagtgtggaaggaacatcaaggaaagcagcttcccggccggacgcatcatcagacggtattagaagaatacgttgacgcgctgaatttctttttgctgtttagtgccaaaaagcagtggacgcatctgatcgtgttggatgagcaaatgctgacccggatcaaaaatggcaaaccggctgaaaaggtaccagattggaataaggaatatctggcaattaaaaacttcttatatggcagctacttcaatcatcggcaagaagatttccgtcatgcctggcatctgttcttaaaactggggctggttgattttggctttactgaagatgaaatcatggcagcctatgaagaaaagctgaagatcaatattcagcgtcaagaagacaactattaagtcaatcaagctcgctaaagccgtacgtcatgcttttgcgagcttttttgcaggatcgcaaaagaaaggcagcgctgattataatgctttaagaaccggtttgtcagggaccagctgtttcttcagataataaaaacgacattcgccatttgacggatgccgtttttgttgataaggaaaggcgatgcttcttgccgttaagttatgggacttagcggcggggattttattgccaaaagatttgaccaactacagataaagaaagaatcaacgaaatgataaagagtggcaacattttgtgatcccatcaaaagcattgtctatatgtttcattattgttacttttattaaaaaatgcaatagttttgtaacataaaactatatcttaataaaatcttaaattttttttgctaaatagactaaaaagagattttttagatgaacgtttatgagacaaaaaacatcgctaatcaaattaattaatgattagcgatgttttctttaaatgagatatataaccaataccgtttaagataattgtaagggtaacataaaggcaacaaaagattttatttaccagcaggcaggctatgaaatggtaattcaaaaggctgacataacagtattttgagtggtaatgatgccttatgatttttactaatggggcaagtgggaatcgaacccacaacctttggtttagaagaccaatgctctatccagttgagctattgccccagacctaattaagtatattatattccacgaaaatgtcaataatacagttgattagaccattgcaaaacattatatgttaatggaagtctaatttattgacaaagcgcttacatcgttttaatctaacggtagaacaagtttgtagaccagctacatgttttaacctaaagagcgttttttagattggaggcgtagtgtcaatgacgggcagcaaggttgatcctcgtgtagttaagacccgcagtagtctccgcaaggcacttgtatatctgatgaagcatgagaagcttgaaaacatcagcgtccaaaagattactgaaacggcaaatattactcgaggtacgttttatctgcattacaaagacaagcgtgattttatcaagtcagcaatgaatgagatcctggatgatctgtttgcacaaattatggttgagcgccagatctcaacgtctggcaactcagttcaggtgctgtctttaaatgaagcctttcaatgcatcgaaaacagtgcagaagtctttgatgtcttattgaataatgaacgtaatgatttcttctatgcacagctctatgaccgcctttgtcaggaattaacgaaatatgccaaacagttggatagtgaatttgacgatttcgatgttccaatcaaaatgcaggtttcatttttggcatccgccgtgctgggcgtaatcaaaagctggctgcaggatggcatgatctatacgccacgctatatgacgcaaagcatgatgaagatgctgcagcagttcagcggtgagggaatgcttttaacctcgttttttgatggtaaggtcaagtcagccttagaaatctagtaaaaaatcaccgagctttttggacttggtgatttttattttgttgtggcttgatttttattgacgcaatcaaaatgttttgatatgatattagcgttgtatttgtgaaccaacaactacaaccgcacgcaaccgagttttaaaagcttcggctgctcggccggcgagtcttagaaattaaggaggtgcacaaactgatgtacgcaattatcgttactggcggcaagcaatacaaggtagaagtaggtcaagctatctacgttgaaaagctggacgcaaaagaaggcgaaaaggtaacttttgacaaggttatctttgtaggcggcgacgacgttaaggtcggcacgccatttgttgacggtgctactgttgaaggtactgttgacaagcaaggcaaggaaaagaaggttgttaccttcaagtacaagccaaagaagcacacccacaccaagaagggtcaccgtcaaccatacactaaggttacgattgacacgatcaacgcttaatggggtgattcaatgattcgcgcggtttttcataccaatcaggatcatggaatagcttcgtttgagatgactgggcatgccgatcatggcgattatggacaagacattgtctgtgctgcggtttctgctttggcaatcgcaacggtcaatggcttggaaagagtcgttaagcagcctgctacgattacagcagaccatgcgaatggcggtttgcttaaggtcagctcaattgatccgggacacgattcccagattttaatgcagacattcttggaagccatgcttgacattcaagaacagtatgctgaaaatattgacataaaaatgtcttaaaaacaaatttcaagctggaggtgaaaactatgattatggatcttcaattcttctcccaccacaaagggggcggttcgactgccaacggtcgtaactctgctggtcgtcgtctgggaactaaggctgctgacggttctgtcgtaacggccggttctatcatctaccgtcaacgtggtacccacattcacccaggtgaaaacgtaggtcgcggtggtgacgacactttgtttgctaagatcgacggcgttgttaagtttgaacgcatgggtcgcagcaaccgtaaagtttcggtttacccagttgccgaataataaaatcaagctcaaagcatttgatagttttatcagctgccttgagcttttttgtttggttggcgctgtcaaagcaattcagatgaggaatgataaaatgaatcatttatttgaaaacggaaagccgcaatcaattccggccgtcttagcaaaccgtgatcgacgcgtggccctgcagaatcagctgacggcaaaacatccagagcagaccgtgattgctgctaagctgaatattcctggaccaatcaagaacaatcaaacaatcagagacttttttgcggctggtttagcagtttttgaaaaacagctggccgctaaatttcagtttaggatggctgagcaatggctaggggagtcaacggggccagaacgtttctatctggttgatggcccagccgtgcaggtcaaacaactgacaacagaatttgaagagtctcaggctgctcatcggctatttgatcttgatgttttgagtcgtcaaaacaatcagaccgtttcgatatcgcgaaccgaactgggactgcctaagcgccaatgcctgatctgtggccaaccagccaaggaatgtgctcgctcgcgacgacattcggttgctgagctgcaggatcgcgtggcagcattgatcgaaaattattgatgtaataataaaagctccaacttttgagaaatctcaagttggagcttttgctgatttttagtagttgaacagatcagtggacaggtagcggtcgccgccatcaggggataccgttacgaccttcttgcctttgcccagctgcttggctaactcaattgcgccataaatgttggcgccggctgagatacctggcaagaagccttccagacgaccgactgcttgaccggtcttaataacatcatcgctggaaacttcaataatgccgtcgtagacttcttgatccagcgtcttaggaatgaaaccggcactgataccttggatcttgtgcttgccagccttgccttctttaagcagtggtgactcagcaggctccaaggcgtagaccttaatgtttggatcggcttttttcaaggcgtggccgataccgctcagcgtgccgccagtaccaaccccggcaacaaaagcgtcaggcagatcgtccttgccaaaagcatcaatgatttcttgaccagtcgtcgcttcatgaattgctgggttggctgggttttcaaactgcattggcataaagtagcctttggtgtcaaccagttcttgggctttggcaattgagcccttcattccatcggcaccaggcgtcagaatcagttccgcaccatagccctgcatcagcttgcgacgctcaacgctcatcgtttctggcatgacgataatcaggtggtagcccttggcagctgctacgctggccagcccaatcccggtgttgcctgaagttggttcgatgatcgtgtcgccaggtttgagcttgccttctgcctcggctttttcaatcattgccagcgcgatccggtctttgatggagccagcaggattgaagaattccagctttacgtagacgtcggcggcatcttcgggaacaatacggttaagctttaaaagaggcgtgttgccgatcagctggtcgattgaagtgtagatttttgacataattttttctcctttaggcaatggttagtgcgttttgtgaatattcagctgttttttgcagccagttcttaaaatatagctgctggactttttcccacttgaattggggatcagtcagcgtattaatgtctttaaaataattcttaggcaatgcgtagtgacgatcaggatgggcagctgtttcccgttggtattcggctaatagtgccagacgatcgtattcaaggtgggcaaacaaaaagtcttgattgtcgctaccggttagcgaaagcaggtagtcatcactagacacggcgttgatcgtcagtccaggcgtttggcgaatctggtcatggtccagctcggcatagcgtgcatgcggtgccgggaagggaatggtcaggccatttaaaacgggggtttcaaccaaaacctcattgtcaaagacgccgaagtattttttggtcaattgccgtttttcaatgccatacagatagttggcggcagccatggcaccccagcagatgtagagctgcgggatgtttaggtcgaccagcgtatcaatcaggcgcgtgacctcatcatgatattcgacctgtgcaaacggaatctgctcgatcggggcacccgtaatgatgaatccttgcagctgacttactttgttaaggtccagcggttcagagatttgttgaaccagttcagggaccggccgattacggtagtggtcaacgggatagaaaaaagtaagctcaaccgtgggatcaagggccttaaagattgatgaaaaacgctgctgagtggcaactttgtcatgcatcaagtttaagatgccgattttaagacgcggattagtcatcaggtgctcctttcctaacgattgcgatagttaaacaatcagactttcaccggtgagtttgtcataatttaaagtgcgatggatacaaaaagccccacaaactattgctagtctgcggggctttacaatcgactgggttgtcgatcaggctgtttatacgaatgcaaaacaagccttttccgcagaaagaaaaaggcagcaacaagtcatgttcatagcaaagttagacttaatcatgatgcacctctcctttctggttatttatcaacgcatctttaaacatgcccttattttacatgacatcttacaaaatgcaagtagattatcaaaaaattattaaaaaacggtgattaaccgcgccagcccgcgatatcgtgcggggtaaagcgatagtcaagttttttctgataggccttttcataagcagcctttttttgagcatagtctttttccatcatcaacttggcgttttcgttgaccgaaagctggggatctggccaaatcagcggcagaacgtgcaaccgatagcgggtctgataaaaatcgtcgttatttttttcggctttgggcaggtcgatgatttccgtaaaacaagatatgatcggcgcgttggccctggcagcgtagtagtaggcaccacgcttgacgggacgaggcttgcggtagttgaaccacatctcttgttctgaatagatcagaacccagtgcccatgcctagtctgctgcgcgattttttgcggcagcgtgcggccaagatagttgacgtttttagccagcggtaagacatcgagatgattcattaaaaagccgatcaagccgcccattttgagattggtttcttgaatgacgataaacaggcgacgatgatttttttgggccagcttgcggatgacggtattatccagctgattaaagtgattgctggtaattactgcgccttgagttggcgaaagcggcttaagattttctagtccacaaaacgtggtatcgtggttgaaccagtccgtaattccacgcattgtggttctggcaatcaagttgtcaaagcgagcgcgccaatgagtctgatcctgccaaaattgattaatgatatctaggctttctgctgaggtcatctgcgggtcgtcaatttcgactttttcgttaaagaggccctgctgcgcgtgatcggcaatattgttgatcacttgatcgcgatggtcgccaataatcatgaaagccgcacctgctctccttggtcctgcagcttcttaaacgtaactggatttttcggcagctcgtcagcgtgattgagcatgctcatcaatttttcccggtcaagctgctgcatggctggcgtatagtgggcccgcaccgttttgagctgctgggcgtaaggcgttttttgagcggcttgccagaagtactgatcatacatcacttgatcaaaatgccatggcttgaaaaagaggttgtagtgaatcagtttgggatcgtcaacacgttcagcagcaaattcatcatctttaggcatggcattccatttttcgttcaggtaggtaatgcggccgctgcacatgacgtttagataatcttgatcgggagcgatgcagtcgacatgatatttttgcagcagatacaagaagtgctgagtaaaatcgtcttgacgcagttgtttgaaattcatcagcaaaacgccagagttgatgtattcggctgccggtacgccgactgcatttttgatgtaggtctgcattggggcaacgtgttccacggaatggtcgggagctgccccaatcagatcgtcattgagcgcgatggcaaacatctctgccgggtcgccgttccagaccgtatcgctgtctacatagattgccttatcgtattgcgggaaaagatctgctaaaaacagtcgataaaagatgctgggcgtgaagaaatcggcccgcaaaaagttttctttgcgattttgaatgacccccagcttggcatcattgatttcataaaaaataatttcaacgttatcgcgcgtcagacttttaagattttgccgcgtagcctgccgcaagccctgatgaacgatgatgatctgatattggcaatctgatgagacgtaaggcaagagtgattcaatcgctacggcggcatagggtgcaaagtcgtcgctgatcgtatagaaaattggaattggttgagacatgttgaccttccttatagttcggatttaagctgccgatattcttccaacagaccatcatattcatgcagtcgcaaatctttatggacgttgctgatctgccatggcttaacggtcagaatgtggaaccacgggaagaaacggaaactggtggtaaagtgctgaaaaacggtgtcgtgatgaagacgtcgttgatcattgaaccgccgcggcgcgatttttttggcgtgcgaaagacggttgatcgcggcttgatccggcatgaacatgtggcgcgtggcaatcatgcggcgtgccttgacgaatagattggttgccttgatctctggcagattcaaaagcagaattcctgaattgatatagtcggccatgcgcatttgatggtggaagaaccatttgccatagtgatccagtacgccgacgacctgcacgccagtcagatcttgatagtaaaaatcgtcaaaaggctcgcgacagataacgtcattgtctagataaagcaggcgatctggcatgtcgggaatcaagtcgacataaagacgcagcatggaatagggcgtaaagcgggaattcatgttggctgacggctgcgattcattgaataattcagtgcagtcgatcagatgcagcgtattttgtggattataggactgaagctgctgggtcaaaagatcggcggctttttggctgaacggttcgtattcgcgggtttcagtagccgttttcatggtaagaacatagatgtttaacggctctttgacatggtgaagcagagaaagcgtaacgatcaagacgccatcttcagcgcggtgatcgccacaaaataaaatattcacggtttcatcttctttcttgaacgtatttgatggattcatagctgctgcagcgggcgcgctgattcattgcggcttggatctgatcgtgcagccagacctgctgttttttggccgattggttttcagcagggatgaacggtccatcaataaaaacagttagacgcggctttttcccaaaacgcggcttttgataggtcgtcgtcatgcaaaatgccgggctttgcgttttaactggaaagcgaaaactggtgtcgggaaaagggcggatttcagtataggcaggccagacgtgagcttcaggatagatgaagacatgtccctgatgctgaacgactttttggatggcttttaagagctgtgcagtttggtgaagcgaattgccaaccggcagcgcgccgccaaaagaaagcagtgggccgatcacaggaatcccccagttggctggagctgccagcgcgtagaaatgccgggcctgaccgactaaaaacggcatgaatacgtcgttgatcggctgcgtatgattgccatagacaaagtatccctgcttttggtagggactcagcttttccaggccgatgattcgagtttgtcgatagccataagtatacagataggcaaacgctttggcactgctgcgcaccatcaaagaccagcagcgttcagccggcttagtgcgcagccagcaaaaatcatcaggcagctgaaagtcttgatgcgcgctttgaactacgtcatcagttggttcggtataataaatggtttttaccaaacttttcaccttctaaaattgtagcagttaatttaaaattaacagaaattagtctagaagttattatactcaaaaaatattgcaagtaaatacttgcaatgtagtaaaattaagcaggaaaggagatgggccaatgaaaagcaagtcagccaccgatgaaaaaatcatgcaggcgtttgctcaattggttgaacagcagggctacagcgcaacgacaaccgtacagctggcccagaccgctggcgttaatgaaagtacgatctttcgtcattttggcgataagcttggcttggcaaccgggttgatcgtcagatatcgcaagagtttgatggacatcatagctgattttaagccggtttgggatctggaaaccgatctgattgatttttccagatgttttcgaaagcagtggcctaagcagcatgtgatggtaatgctgatgagcacggtcaaggacccagcgcaaaagcagaagctgcatgcggcgactcatcagattaaaaatggcattcaagaacagatcacgcaatatttagagcagatgcaaaaacgcggccggattcgagaggacgtaaatccagagcagattgcactaaattttatttggctcaacatcggtcagttttggaccagccgcttttgggaaaacgagcagcaccagctatcagatgagcgcttttatgaactgtcgatacgtccattcgttcatctcttgacgacttaatggcttaaaataatgattgataaagatgaaaaagaaaggttgttgaatatggcttcacgaattgaacggctgcggaaaaagtttgatgcttcatatattgacgcgtttatggttaccaatgaggcaaatattttctatcttaccggctttgacttgatgcagggggatggcgagcttttgattaccaaggatgccgccattttgattaccgatgatcgctatgctactgagctgcaggaatttgacagcgatgaggtcgtggctacgatcacgcgggactactggggagctttaaatcagatctgtcagggcatgcagattgaggtcatcgggtttgaaaatacgattgactaccggatctatgacgtcttagatgaaatcatggccgctgacatcgtaccttttgatgggctgattgagtcgatgcgggcaatcaaggaccccgatgagattgaaaagatccgcttggctgcccggctgcagtcagctggctatgaatacgtcttgagttttattaaaccaggaatgaccgaaagacaggttgccaaccggcttgatttttggatgaaggagcatggtgccgagtccgcctcgtttccgaccatctgtgccagtggtgccaacgctgccatgccgcacgcaacagccggcgataaggaaattgaagaaggcgatatcgttacgctggactttggctactttgttgaaggctatacggcggacatgacgcggacgtttggaattggcgatattgatccagagctaaaggacgtctataaaatcgtcaacgaggcccgtcaagctgtgattgaagctgccagggtcggaatccacggtgaccagttggatgctgccggccgccagatcattgaaactgctggctatggcgatgagttcaatcatggcatgggtcacggcattggcttgagcgttcatgaactgccaagcagctatggtcccaatgccagcgatgtgatcgtacaaaacaaccaggtcattaccgtggagccggggatctatattccagaaatcggcggggtgcgcattgaagacgatattttggtaacgcatggcggagttgaagtgctgacgacggcgccaaccgagctggaaatcgttaaatattaagatgaaaaaagagctagacagtttatataagtcaattgatcaaaaaggcaaagcagccatcttaaaaaatcagtttactgatccttatctatgtcaagttaaggcagattcgcgacgtggtttgacgctgcttgctcggctaccggttcatgtcggcagaaacatcggctatgctcagcagaaactgcgaatcgccaatcccaatctctactgttatccattgaccgatctgcatctgaccgttttggatctgatcggagcacgggctgatttttcgctggcaccggctgttttggcggcttatcaaaacagcatcaaagaactgctggcgaattgccgcccgttttcagtcacgctgcaaggcttgattgccagtcccagcggtattttggcggcgggatattattctgatgagctgtttgagctgcgggaggcgctgcgcttaaagctggctaaagaattgccgcttgctgagcgttatcagacagcatccggtcatgtcacgattgcccgttttaaagcgccattggacgatccaaacgggctgctttttgacttggccaagatggatcaactgcgatttggcagctttgtcgtcaagcaggtagacttggtaattcacgattggtacaatcatgatgtaaaagtaattgacgaatttgcactgaccgcgctaagctagcatggttgccaattttggcggaatagtgcataattaaaaggatgtcttaatgacgaaaaaactggagggctgacaaatggcagaagattccaacattatcttaaacagcgaagatcaatcgttgggtacgattcaaatcgctccacgtgtcttagaaatcattgcagggattgccgctggtcaaattgagggcgtttcacgcatgcatggctcgattgccaacagcgtcagtgaattactggggcgttctgaccatcgtcgcggcgttaagctttccaacagtgatgacgaactgtcgattgacgtcgacgtttacttggaatatggcgtttccgttcctaaggttgctgctgagattcaagataaaatcaagcagcaggttacgctgatgactgatctgagcgttaaggaagtcaacgttcacgtacagggcgtaattacggaaaaagaagagcaacaggttgaccccaatgatatttttggggaacacgaaaacaaagatggtgaagaatagtggaaattagtcgtcatgcgatccgtgaatgcgcctttcaaacgctttttgcattggcttcggatccggaaatcgatcgcgaggcaatctacgcagaacgcttggggctcaagccggatgaagaggtgccggcctacttgccagagctggtcaatggcgtcttggctcaccaagatgaactggacgctcagatcgaatccaagctggctccaggctggaccttatcacgcttggctcgccctgatctggtgattctgcgcctggcattgtacgagctggaatacacgcaggtaccaaatgccgtggctattaacgaagccttacgcttggcacacgacttcagcgatgaaaagtcgtaccgctttatcaatggtgttttaggcagcattgaaagcgagcaaaattaatcaaaaaactcatctccaaagcggggatgagtttttttgttgcggctttaatgctagaatataaacatatgcaatttttatgcagtctgataaggagagattttagtggcaacattgatcgacggtcgggcattggctaaagaagtcaacgcccacactaagcagcgtattgagaagctaaaggaaaaaggcgttacgccggggattgcaacgattttggttggtgatgatccagccagccagatctacacgcgcagcaaggaaaaaaaggcgcacagtctggggatgaagtcggtacgagaacaattgccggcctcaaccacgcaagctgaactggtacaggcggttgagcacttaaacagcgatccatcgattcacgcaatcctggtacaagagccgctgcctaatcatcttgacgacacggcaatcgttaatctgattgatccgctcaaagacgttgatggttttcatcccatcaatgtcggtaagctctataacaacgttcaaggcaattatccagttgcctgcacgccacggggaattatgacgatgctgcgccactaccatgttccattggccagccaggacgttgtgatcgttggccgcagcacgctggtcagtcggccgctgcaggcgctgctgatcaatgaggatgccacggtaacgattaccggacggcgcactaaggatctagctaagcgaacgcgtgaagccgatattctggtcgtggcagccggcgtgcctaatttgatcaaggccgatgccgttaagccgggagccacggtgattgatgtcggcatcaatcggctggatgacgggacgatcgttggcgacgttgactttgaatcagtcaaagaggtcgcgggaatgattacgcccgttccaggtggggttggtccaatgacgattgcctctttaatggaacaaacggttgatttggcagaatggagcgcggaaattaatggataaaaaggattgcctgacggttaatcaactgactcgctatatcaaacgcaaatttgattttgatccttatctgcaaaaaaatctttggatcgttggcaagctgaccaactttaagcaaagagcacgccatcagtacttttcgcttaaagatgatgacgcgcccgaagatcagcaggccgtaatcgatgccgtcatgtttggcagcgactgggaaaaagtcgacttcacaccggaaaacggcatggaggttatcttgggcggcaaggtgacggtctatgaaagaaacggccgctatcagttttatgtcaatcggatgctgccggttggcgtcagtgcagcccagctggcatttcaagaaacctataaaaaactgaaggccagtggggtattttcgcatgcgcaaaatccgcggccactgaatcggtttcctaggcggattgcgattgtgaccagcaatgatggggccgttaagcatgatatgattacgcggatccgcaacaacaatcccttggctcaagtggttttttatccagcgcaggtacaaggcgagcgggctgctgaggatctggctcgccagatccagcgcgctggtatcaatggtacgtttgatacgctgatcgtggcgcggggcggcggctcagaagaagatctgatgccgttcaactcagaaatcgtggcgcgagcagtagcggccagcccgattcccgtaatctcaggggttggtcatgaaactgatacgaccatctgtgatctggcggctgattatcgggctcaggtaccgggactggcagcggaaatggcgacccagctgcatttgctggacattctgactgaactgcagcgagcccgtacgcagatggctaatacgattcagaaccaactgcagcaggcccagcagcagctgcaggtcttaaccagcagctatgtgttttctcagcctgctcgtctgtatgaaggcgaacagcagcatgttgaccagctgactgaaaagctgcagcagtccatgcagtggcgcctttcgcaaaccagtcacgcctggcagcgcttgttggattcgcttttattgaatgcgccagccaatcgactgcagcagaatcgacaacagctcacacaactgcagcaggcaatggttcatgctatggataagcagctgctgtcggcaggcgatcggttcaagaatctgctcagtcagttggattcactgagtccgctgaaagtgatggcgcgcggctacagctatgtaaccaaagaagataataaagtcgttgccagcaccagtcagctgcagcctgatgagcaagtggcgctgcattttagtgatggcacggctgaagcagtaatcaaaaaaatcaataagaggtaaaaaatggcaaaacaacctagctttgaagaacagatgagtcagctgcagcaaatcgtcaacgagctgcagcagggcaatctgtctttggaagaatcattgaacgaattcaaaaccggtatggaattggcaaacggtctgcaaaaacagctgcaaaacgctgaggccacggttgctcatctgatgaaagacgatggcaaggaagtcgaggatccaaccgacagccgcaacgatgatggctcaggacaccagggataccgttcacagtttagcggccagggatttgaagacggtcaagacgacaacgttgatcttttctaatttgcgattaatgaaaggaatgagcaaatggtcagcacgataacggaacttaaaaaacggatcgatgcctatctagaccaggctctgccaatggacatcgaccagccgactttaaaagaatcaatgtgctactcggttgaagcgggcggcaaacgcttacggccggcactgacattggcaacgattgagatgctgggcaaaaagatcgaccagaatgcgctgcgggctgcctgtgccttagagctgctgcatacctactcgctgattcatgatgatctgccagcaatggacaatgatgatctgcggcggggcgagccaaccaatcacgtcaagtttggcgcggggatggcgatgctggctggtgacggcttgctgacgctggcttttcaatggctgacggacaatcagctgccagttgccgttcaggcgaatttaacgctggctttggctaaggcggctggtcccagcggtatggttgctggacaggcacgcgatatcgagggcgagggccagcatctgaagctaaccgaactgcagtatctgcaccgtcaaaaaacgggggctctgctcaaatacgcggttcaggcaggcggtatcatcactgagcagccggttgcagtcattgaccttttaggaacgtttggtgcgcagtttggcttagcttttcagatctatgacgacattatggacgtggtagccacgccagcacagatgggcaaggcaactcaaaaagacgccgctgagcacaaaaacacctatccaggactgttgggacttgatggtgctaaagaacagctacaaaaagcccttagtcaggcaaaggcggctcaacagcagctggcagaactgacaggacgatcaatggctggttttgatcaatttttggcatactttaaactataggacgagattatgattgaaaaagaacgcgttgatattttactagtcaagcagggcctgttcgattccagagaacaagccaagcgtgccgtaatggctggcgagatcctaggcaagaacaatgagcgccttgataagccagggcaaaagattcccattacgacaacgctgcacatgaagggcaagaagatgccgtacgtcagccgaggtggtctgaaactggccaaggcactcaaggtatttgacatctcggttaaagacaaagtggtactggatattggcagctcgaccggcggctttaccgacgtgatgctgcaaaatggcgccaagctcagctatgccttagatgttggtaccaatcaactggtttggcagctgcgggacgatccgcgcgtcgtggtaatggagcagaccaacttccgctacagcaagctggctgattttatgcatggtcagccggagtttgcctcgattgacgtatcgtttatttctttgagtctgattctgccgccactggcccagattctgaaaatgggcggctcggtcgtggccttgatcaagccgcagtttgaagccggtaaggagcatgttggcaagcatggcatcgttcgtgatcgtaaggtgcatgaagaagtgctgcagcatgttctgggctttgcaaccgcaggtcatttcgatgttttaggcttggatttctcgccaatcaaaggcggtcaagggaatattgaatttttggcgcacctgcagctggttgatcgagaaggccgcatcgcaccagaagttgacatcgaccagacgatcagcgcggcttatgcggaactgaacaagcaggattagttttggaggctttgtcaatgaaaaaatcagaacgtcagcgacacattcaagaaattatttccaatcaatacgtcgaacgtcaagaagatctggtcaagctgctggccaaatccggcattcgcgtcacgcaggctacgatttcacgcgacatcaaggatatgcagctgctcaaggtgccaagcgtaggcggcggctatcactacagcctgccagcccggcgtcaggacaataaagaagaacggctggcaaacgtgatggggaatgagttgcaggaaatgaaacgcagcgatcgtttcgtatccttgtcaatgcggccaggcaacggtccggtagccgccatgctgatcaatcagatgaaatatcccacggtgtttaccgcgattggcgatgacgctacggttttgatcgtctgtcactctgccggggccgccgttgaatttgaacgtacgctgcaggcactacgctagactgggtgatcggctatgctacaggaactgacaattgataatttagcgattatcgagcatttaacgctggattttagcgatcagatgacggttttgactggtgagaccggggccggcaagtctattattatcgatgcggtgggtttattggctggcaatcgcggctcacaggagtttattcggcatggcgaagaaaagcttcatctgcagggccagttcacattaccggatgatcagcgcgtttttgcattactggatgatctgggaattgaacgtgatgatggcacgctgattatttcgcgtgagattcatcgcaatggccgcaacgtgatccgggtcaatggcgcgctgatcaatactgccacgctgcgtagaatcggtgctcatctggttgatattcaagggcaaaacgatcatcagcagctgatgcagccagaaaaccatctgcacatgctcgatcagtttgcagccgaccaggttaagccgctgttgtccaaatatcaagaggcctatcagcgctatgccaaattgaaggcaacgctaagccgcaagcaggctgactcgcagcagtgggcccagcgtctggacatgctgcgctaccaggttaaagaaatcagtgctgccgatctgcacgccaatgaagaagatgagctgaccagcgagcgcgaccgcttagagcattttcaacagatcaacaatgcgctgcagctggtcgtcggaatcttaaatgaaggcgaggcaccggttttggatcaggttgcccaggcaatgaatgaggttcaagaaatcgcgccgtttgactcggcctatgatgagttgagcaagtcgcttggggatgcctactattcacttcaagatgctgccaatgccgccagtcgtcaattagacatgcttgaattcgatgacggccgtctggaacagatcaatgaacggctgaccattattggtgatttggaacgcaagtatggcgatacggttgaagacgtcttggcatattatgaaaaaattcataaggaactgtcgacgatggagcagaccgccgattcagatgatgagcttaagcagcagctggccgcggtgactggcgagctgcaaaaactgggcggtgaattgagccaggttcgtcaaaaagccgctcatcagctcaatggccaggttcatcagcagctaaaagaactctatatggacaaagccgtttttgaggttaagtttcatcaaaatgagtcgatgaccttttatccggatgggattgacaatgttgagttctatattcaaaccaaccctggcgaaagtatggggccattggtaaagattgcctctggcggggagctttcgcgggtcatgctggccttaaagacgatttttgcgcagcatgagggcgttacctcaattatttttgacgaggttgatacgggggtcagcggtcgcgttgcccaggccattgccgataagatcaagctgattgcccagcattcacaggttttgtgcattacgcatctgccgcaggttgccgctgttgctcagcatcattttctgattcaaaaaaccgtgcagaacaatcgtacgacgacgcacgttacgattctgcatcccgaagaacgaattaatgaattggctcggatgatctcaggtgaagaaattaccaagctgagtcgcgagcatgctaaagaattattgcagatggcgcattcataatccacgctaggtttagtatttgctaagtgcgtcacgttaagctgctaggtgctttacatccgtgaacgtgcagaagctggattgaaatatatggatgcgattatccagctgctgccgctaagattacggaattttcggttaagaacagatcaaagaaactttatcaaatttgattgatgaagatcaaaatgggacgccttgtcaggtgacaggagtcccattttttattggcttgctatccaatcagtgtaaaaactgcttaaaatcaagctttgatcattgaattaacttgttggtcaaagaagcaaatgatgaatatcgaaatcgaattacgatcatcgagtcagtcatcggatagtcgcaaaaactgcaagcaaacatcttgttgaaatcgagtcggttattagattttggcaagatcgattactaagcagagatgattgagtacatcgcaatgtctgtggggcgaatgatttgattttcagctgaccgtgaagcttagttcctatggtcggtaaaccagaagaaaacggtggctattataggcggaaaatggtaatcacgtgctatccttcattacctaatgattcctaagatggcagtggactaaacgataaaagatcaagtgttatcggaaaagttggcaatcagctgattgaaatttcagcattacctatttacctcgatatattatatacggtataatattataaaataaaactgaaagaggcgaaacgagagatgaaaattcaagtttcagctgatcttttggatggcttggtgctggcgctgcttgaacgcaaagattactacggctacgcgctgactcaagacatgcaaaaagcgattacgatttcagaatccactctttatccggtattgcgccggctaaaaagagatcagttcgttgaaacgtatgatcagccatatcatggacgcaatcgccgctattatcgcattacgtctgctggtgaatcacatctggcacgcgttaagcaggtatggaaagactataaggaaagcctcgattcgatttttgaggtcagcaaatatcctgtaaaggaggatcagacacatgacttctgaaactgcaaagtacatgcagatgttaagacgttaccttcgcaagctgccagatgatgagattgatgacatcgttgaattctacagtgagtatttggcagatgccggcattgataccaaagcagaaattgaacaggaactaggaacaccgcgtcagcttgcattaaagatacttgctgatcactccatcaaagaagaggctgaagatcagcgggtagtctcaaaaaccaagattaagacgacatggctgatcattcttgcgctgttggccactccggcaaccttgattatcggcttgattctgctgagcgtgctgattgccatctttgcagtcgtctttagtggcgtggtggtagttatatcacttgccgggggtggcatcttcctaacggcggcggctatttttaccggtctgagtcttttgtttaccaacctggggacaggacttttctacctagggattggcttgctcggattaggactgttgctgatcgtgattccactcgtctggggctgttctgtctggatcgttaaggcatgcacgcgcctcgttcagcacgtctattacaagtacatcaaaaaggaggcggcaaaatgaaaaagaccattgtaagcggcctggtcatcacggtgattggcgctgttgtgctggcgtttggcattgggatgcatggtcagcgggcagtaatttttgacggcttgactccgcacgtgatatcaaaggccaagacaacacggacccaaacctatgccaaagctgagcggattaaggcagacgtaagcgatatgaatgtcgttgtcaaatcgggcaagaccttttctgttaagtatgccggtgaaaagatcaatcagccaaccattgaaaagaaaaacggtacggtgatcatcaattctaagagtcataagcatggctttagctttaatggcttcagtttttcttcaactggcttttatcatggcgtggcaaacgacaagctgacgattacggtaccagagaacgtaaatctcaagcatttggcgctgcgggttagtgatggcaaagtcattcaagaactagctgccaagatgaaaatcgaaaaatatgatttacgggtaaatgatgccagtcaagtcagcttgagcaatctggaaattgagcgggccgacttccgactcaatgatacggatactgcttttaatggcgtaacgatcaacaatggccagctgcatcttagcgacaatgatcttgccgttaacgattctgctttaaccaagacgctgattcagacggctgattcggatattacgatgaattcggttgccttggatggcggcagtctcagtacccaggatggcgacgttcattttaacgccatcacgattaccaatggctactcgattacagccaaggatggcgacgtggaagcactgaacactaaagcggatggctactcgacttcggtcagcgacggcgacaatcgcttattcaatcagtccaatgacaatggaggtacgcttactcaaaacgatgccgcgccaaatcgcctgcaggtcactgcttccgatggtgacgtgacgattagatagggggatcattatgaaaaagctgacgaaatcaaacgatcggattattgccggtgtttgtggcggaattgcagagtattttggctttgacgcaacgatcgtacgactggtgactgccgccctggctcttttcaccgcgattgtgccatcagtcattctttacctgattgcggcaatgattattccagacgcatcgccaaagaaacctgaagatgatggtccagttttctacgagtcagataaaaaataataactaaaaatgcccggtgattgtcagcggaaataagctgatgatggcagggcatttttgcttgaatcgattaggtaaaattcaattatgaaatttgaaaaaggcggtctattttttatagatcgtcttttaatcatcattcaatgcagcttcttgacagcgctttcttttgtaaaacgtgaccatacgaaggctttattaaaaaaatccaaaccagtgggaagcttaacgttattcaccataaaacggctccagtccaaagattgatacatttttagccgattatctttactcttagattaaaagtaaataaactttgtattaacttttgattagaagggagcctgcttatgacatctttactacgcaaaaaagatatcaatgccttgattagtcacgcatcgccattaaagcgaacgctgcgtacctgggatctgactttcctgggaattggtgccatcatcggtacggggatttttgttttaactgggaaaggggcccttactgcaggaccagccctttccatttcatttttgatcgcggcactttgctgcggctttgctggtctttgttatgctgaatttgcatcaatggcaccaattgctggttcggcctacacttattcttacattgcatttggtgaaatcatcgcttttattattggctgggatctgatcctggaatacgcgcttagtgctgcaacggtggccgttgggtggtcgggttattttgtcaacctgcttgataattttgggattcatattccaacggctttaacggcggcggctgggaccacgcctggcgttaccagctactttaatctgccggcattcttggtcgtcttgatcattacctggatcatctcaatgggaatcacgcaaaccaagcgagtcaatgatgccatggtaatcgtcaagctgctggtcatcattctctttattgcctgcacggtttggtttatcaagccggaaaactggcacccattcagtccatatgggtggtactcacatcaaaatggcacggctgttgggatcattccaggtgcatcgatcgttttcttctcgtttatcggttttgattcagtctcatccagtgccgaagaaacgatcaatcctagcaagactttaccgcgtgggattctgctctcgctgattatctcaacgattttgtacttctgtatgacgcttacgatgactggtgtcgtccgctacccagttttccggaaatatatcaatgcgccggtgctggcagtactggctaagactggtcaaagctggctgtcgattatcgtatcgattggtgctattcttgggatgaccaccgttattctggttcagctgtatggacagtcaagaatcagctattcaatgtcacgggatggtctttttccgaagttcttcggtcaagttgatgaaaaacaccaaacgccttttaaagggacttggttttttgggattattacttcgcttggggctggcttgatcaacttaaatattctttccgaactggttaacattgggacactgactgccttcatcctggtttcggcgggaatcttgatcatgcgctatacgcagcctgatctgcatcgtggttttaaagcaccgggcgttccgtttaccccgatcatttcgattattttctgcttaacgctggtggcagggcttaactgggaaacctgggttcgattctttgtctggctggctctgggaatggcgctttactttggctatggtcggcggcattcgcatttaaatccaaactacaaaggagctgattaaaatggcctacaaaaatattttagtcgggattgatggttctaaacgtgctgaacgagcttttgaaacagcggttgatctggccaaggttttttcggccaagctgtacttggtctgggtagtcaatcgtgaccgcgggatggattcatcatttggagtcaatgaggatttctaccaggattttgccaaacgtaccaaaaaacagctgcagatctatttgaaaaaagcacaggataaaggagcagatgccagtgccacggtgattatcggcagcattaaaaccgtgcttgcctatgattttcctgatcagcatgatattgatctgattgtccttggcagtaccgggatcaatgccgttgaaaaaatgctgcaggggtcgcataccgattatgtcgttcgtcatgccaaggccgatgtgctggtagtcaagtagatagattttttatcgacacgtcattaaggaggaagtttccatgagtaaaattgcatcactggttccagaaagtttaaagtcatccaagccatcactgattcgagtgcttaacaataaatacggcagtgatccagaagtcgttaatctgacagttggcgagccggattttaaaacggccgatcatgttaagctggcggcaatcaaaagtattcttgacgatcatacgcactatccgcacaactgggggacactaggtctgcgtaaggcaatcagcgaatatctggcagacgacttggaccttcactatgatccagaaggcgaaatcttcgttacagaaggtgccagtggagccatcagtacgattattgccggtttatgtcagccaggtgacgtcgtattgatcccttgccctgcttacacgctttatcgaatcaatgccgagctgcgtgatgccaaagcggttgaactggaaactgccgagcctgactttaaggtgacgccggaattattgaaaaaggcgttggacaaatatggtgaaaaggtaaaagtactggttctcaactatccagtcaacccaaccggtgtcacctacactcctgatgaggtccgcgcactggctgatctgctcaaggactacaacgttgccattttggatgatgagatctatgccgacttgctttatgaaggtgagcatctgccaatggctaagctgctgccagaccagactctttatgtcagtggggtgtctaaaaatgccgcaatgactggctggcgggttggttatatctgcgggccgcgtgatgttttaggagcactggccaaggtacatcaagccgcaatttcgaccaatgccactatgaacatggatgccgctgaagaagcgctccgtcatggtaaggctgatactgctcaaatgaaagcagaatatgatcggcggcggcagttcttaatgaccgctatggataagattggtttccaatacactaagccaatgggggccttttatctgtgggtcaagattccagacagctttgatggcgattcgatggcctatgcagagcatctggcagaaaaagctaaagtagccattgttccggcagcggctttcaccaagcttcccgtgcgctactttagaatctcatatgcggcttcaatggaaaaacttaagcgggcagttgatggactggccaaagtttttgcagaagatggttcattctacgactagtgatgctgaattgccggcagtcaagctggggatgtcagcagcttgataatgcgacaataataaaggacaaaagcaaaaacaggctcgagaaattttctcaagcctgtttttatatacataaattagtatgataagaaatatcgatatatttatgatattgtttgtgtttaaagaatttggcgccagttctccccataacgtcttctcagttctctctcggctgagccgctaagcattagatcattggattgggttgcccaatatacgagatcttcttttgtggcattatgagttttttcgaagttattgctgatctttttatcaaggtctgcatctaccttaaatgcccagtaaatgatagatacgatccctaaaccaattgctcctagcatatgactccacttaatgccttttttagcgtgaagataccaacaaatacctaatacgattataagaataataagaagcataatagctctcccctaagatctattgctggataaaaacaattgctaattaatattattaagttaaataacattatatatatctatatatatggtcaatactttaattttattaactgataaatacatataatttggttttctaatgttgctaaaaaagagtgctttttcatcacaaagtcagcaatcttgaaaccgttgaatcaatcatcagttggtcgccgaagaaatgcaatgaacaaacaattctgaagtcggcaccaatcaatatcagggttgtgtcaactgccaacgattaagaaacggtggcagaatgcctagtatttgaagatataagaaaagagcccgccagtcagcgagctcttttgatttagacttgattaatctttgcgcttgttttgattatcctttaagtgattgcggattggatagcttaagtagatcgtactggtcatgacgattggcaagatgattaccaagatgatcagaccaacgattaccgtcatagcaacttcaatcagcgttggaatgccagatggaatcaaagcagcaaacgtaccgctcaagatgatggcggcactgataacgacggtcccgatgattgcacaggcatagtagattcgctcgcctggcaggtacttgttctcgtcgatttcacgataacgcgtcatcaagaagatactgtagtcaacccccaaggcaatcagcataatgaagctaaagaatggtgtattccaagccagcatgctgcggtgcatgaagatgccgaccagccagtggttgattgacagtgaggaaatgtaggccaacaacagcgaacccagaatgtagactggctgcagcagtgaatgcgtgataaggatcaatgcaatgccaatcccgatcaacatgatggcagcagtccggacaaagtcgccgctggccgtgttcttaatgtcgttgatccgtgaagactgaccgcccatggcaaccgtggcattgctaagggcagtgcctttcaatgacttacgagccatgttggagatgttttcggcatcttttgtggctttttcatcactagggttggtgtcaaagacaatcgtaatcttggtgatcttacggttggatgacatgtagttgtcgattgctggcttaaaggtcttgctgtgcagaactgacttaggaatgtagaaggtttcagcagctgccgacttctgcagaccagtcagatagctttgaccctcgccaagtccagagttcagctggttaaggccgttagtgatctgtggtgagctttgcgccagcttgttgatgccggtgttaagctgcagactgccggcactaagctgtcccatcccggcacttaactgttgactgccagagtaggcagagttgatgccattgcttaactgtggcgatgcggctgccagcttgttgataccagtgttaagctgacccagtgcattggtgccttgaccaagtgcgctttgaatctggttgaggccgctggttaactgctgcagtgctgaaacggcacctggcagcgcaacattggaggcttgagccaattgagcaacctgagccttcagcgttgcgacctgcgtattaagattctgcagactggaagccgaaccggcaacgttttgcaaggaaccggccagtgatttgtcggcattaccagctgtctgcaggttttgagccacgctttgcagctgactggccagcgcgctggtttgactgttggtctgagaagcaatctggctttgaatgccgctaagaatctgctgcatagctccttccatcacggccttttgctggtcgttcaggttggcttgactttcagcagccttaaactgagtcatgacagaatcaagactggctgagctggaagaaccggcagatccttgaatgctctttaaggtattgcctgcctgttccagctgactgccaatgatttgagcctgactggcaacgttttgcaggttggattgaatgccagtcgtatcaattgaggtaccagcactctgcagggcactgttcagctgttggatcccgttattgatctgtggcagaccgctttccagctgttgaagctgtgaggcattggcgccggtcaattgagaactgagctgctgactcatctggttcatgccgttgaccagctgctgactgccggcactaagctggtttaagccgctggtcatttgattgccgccagaactgagctgtgccagaccagaagtcagttggttggcaccagtagccgcggaattgatcccgctgttcagctggttggtaccagttgcggcggagttaaggccatttgtcatctgctgactgccggcgcttagtttgccaagcccgttgcgagccgttgaaacgccgttgttaaccgtcttcatctggctgttgacgtaaagcttcttgatcttggaaccagatggctgagtaacggaagccacggtcttaacgcctttggtatgcttaatctgttccgtcaactggtcgatcagctttaagtctttttcattgtccagcgtgtggttggacttgatataaagcgtggcgggctcagccgttcctttggagaagtgcttctgaacgatcaggaacccttgcttggatggcgttgagtcagcgatttcggccgtgtcgtcatagttcagcttgttttgataagtgaagtagaatggcgacaaaacagccagaaccaagaccaacgcaatgattggatgggccagggaatgcttggaaagaaaacgccagaacggactttccgattcaccgttgaaggtcttaaccggccagaacatagtcttacccatcgtggtcataaagaacatgttcagcgtcagcaagacaatcagcaaaacggcaaccccaacggcaaccccagctgcggatttgtaaactgagaaacgggccagacccagtgctgagaaaccgatcaagatggaagaacctgacatcaggatcgtcttgccggcattccactgggcgtttttggccgcctcgaacttatccatgccgtttcctagattagccttgaaacggtcataaagcagaatgttgtagtcggtaccgatcccaaacaaaacgatcaccataaagacttgggtaaagttactgaatgggaaattaaagttcttaaccaggttggtaacgattgaaaaggcggtaatgaacgaaaccccaaccgtcagcagcgagatcaatggaacgatcggtgaccggaagaccagtaccaagacgatgaagataaagataaccgagatgacctcagtcttcttgattccttcttggatggctcccgaaaagtcgtcctgcaagatgtcggcgccagtaatataggttctgatgccatccgtcttaacggctttagtaagctgcttgttgatattggaaactgatttctttttagaaacgtttaactgaaccagttcggtagtcttgtcttttgagatcaggttcttcttggtagccgagttttcatatggggtcaacatactcttgatgcccagttcggatttgtgacgcttcagatagcgaatcgtctggttaacgtttttttgatccgatttggacattgcaccgtcttgattgttaaaaacggcgacaacctgataggtattgttttgatgatgtccccaatgattgccaatcgtgctggcaacctcactttgaacgttggcaggcagtgagattgtcgagtgctcacgcgttaattgattgacgttaggcagcatgaagatcgagatcacaacaatgagaatccacgcgatcaaggatccaacgtggtttttaataaatcgcatctcaaaatttctccttacctatttatataaaaaataatgcaccaaaattgcggcttgcatgtcctaggctttttcaacggggtcaatcagtcgaaaaagcatttgatggtagttaacggtcgcaacattttcatcttcatcttggtagagtggtgtcgtttcaagaaaaatatagcctaaaaccgcacctatcaagacgtgtgaagaaatcagccggttgccatctacatcaacgacttgatcgaccagcttgatcattcgcttgatttcttgatacattgccgagtcggttgaaaaacgctgggcatggtacaggatcgctgataaagaagcatgggccagtaaaaaatcacgaacgatatccgcgaattttaaataggccttggaaccggaaagaccgataatgccatcaacgacctgctgatacatttgctgcatcaatcgagcaccagtcagcgataccatttcttcacggttagcgacatagttgtaaagcgattgtgagcgaatgtcgagtgctttagccagattgggcatggttaaagcttcaagcccttgttcatcggctaatttttcagcagtagcaagtaccttttcccgatcaagggttcgtcgcttggtcatgaaatccctcctttactttttttaaccagaataatataacattactaaatgtagataacaatctacactctgtagtttatttgagtgagacgttctattatgagatatatgtcgcaaattattccatgacggcataaaaaaagacctgcaacatttggcaagtcttaggataaagggtgggcaatgtagcgtaattgatcgaaatcaaagaagtaggaaagattttttgattgaaccaaatagcgatcctgaccaagcgattttaaatagccgcgtacctcaaccggctggcccgcagcagttttaggcatcagctgcagatagaccagcagctgatcagccaatgctttttggataaacattttcctttgaaaagcgggctggggatttaataaatcaggaataggagcgaactcaatcggctcaaacaaatggtgcagactttgggagataattttggtactacgattaataattgactgccgctgattttgcatgatcattcctccgaacactcgtttgtgactatagtatacgaacaagcgttcaaaaatgcaagtgataatttcaatacagctttttatttgttgagatgaacgggctaaatgccggtaaataagggggtggccaccttagttgatattgagatgaccattgctgaaacgagatgatcaacagccatattaataaaaagaatcgccgtaagcatggtcagaaaagatcatttcatcatcaggggatatttttaaaatgcttcagttgccatcgaacaaacgcaggcgctggccaaaagaattcttaatgcaagtgttctcgtaagcacgaagaatcagttgcaaggtcagcggatgtttttgagctgtgattcaagtaagagcaaaattacgatccagctgctgattaggcggatcttgaaatttccattgaattatgaccgaatttattgcagaatatggtattattaaacattaaaagagctatgagaaaagaaggtatggaagcaatatgagcaagcgaggaatgctgattgttttgtctggtccatcaggcgtaggtaaaggaacggttagaaaagcgctgtttagtcagcctggcaatgattttcaatactcagtctcaatgacgacgcggcagccacggcccggtgaagtcaacggcaaggactatttctttgtttcaaaagaagagtttgagcagcacattcgcgaagggcagatgctggaatatgccaagtatgttgacaactattacggcactcctttaaaatatataaatgatacgctagacgaaggtaaagatgtcttcttggaaattgaagtcaatggtgccatgcaggttcgctcaaaatgtcctgatggcgtcttcatctttcttacgccgccggatctgatggagctgcgccaacgcttgatccatcgtggtaccgacagcatggaagtcatcaacaaacgaatccacaaagctttcggcgagattcaaatgatgcagaactacgactatgccgtggttaatgatcaagttgacaatgcagtcactaagatcaaagacattattcgttccgaacgcttgcgggtacctcgcgtaatgccggattaccttgaaatgttaggagattcagaaaaatgattctttttccatcagtcgatgaattgctcaagcgcgttgactctcgctactctctgattatgctggcaagcaagcgggctcacgaaatcgataagtaccgtgctgacaaatggcgtgccgaaaacgctgatcagtcaaaggacaattacgcagccgaagcattggcacaagatcatccattgctgctggatcattactactcaaccaagtcagtcgggatggcgctggaagaaatcgaagccggcaaggtaacgattgatactgatcatacggaagacttgcaagactagttgcagctgccaaagagcgacaccagacaaaagttttggtgctgctctttttatttttcatcaaggaggcaaacatgacgaagattgcggtacatatgacaggtgggattgctgtctataaggcagttgaagttgttcgcggcttgcagaagcaggggcatgaggttcgcgtggcgatgactcaaaatgcagcccgctttgttggcccggcaactctggcggcgctaaccaagcatcccgttttaatcgatcagtgggcggcgactttaaacggtcaggtgccgcatattgaactggcagactggagcgagctggccttagtggttccggcaacggccaatctgttggcaaaaatggcagcaggtctggccgatgacgctgtttcagccacgcttttggcaaccagcgcgccaaagatcgtggtcccagccatgaacgttcacatgtggaacaatccggctacgcaaagaaacattgcccagctcagacaggataacgtcatggtaatggatccggcaacaggtatgcttgcagaagggtatgccggtaagggacgcatgccggagccagctgcgatcgtaaaacaggtgcaggattacttaaccaatggcccgctgaaaggtaaaacgctggtagtgactgctggtggtaccagagaggcgcttgatccggttcgctatctaggcaatcgttcctctggcaaaatgggaattgcaattgcaaaagcagcggccaatgcaggtgcacgggtcgaactgattgtcggcagcgtttcggcggtactgccgcattctgatcgcattacggtgacccaagccctttcaacgagcgcgatggcggctgccgtatccgacaagtttcaaactgctgatgccttgatcatggcggcagcggttgcggattttcggccagccgttttggcggatcaaaaaatcaaaaagcatggtgatggcaccttgactctgcatttggtaccaactgaagatattttggcaaagatgggcgcgcaaaaacgctcagatcaagtagtaatcggctttgcggctgagaccaatgaccttttgcaaaatgccaatgccaagctgcaaaagaaaaatgccgatgcaatcgtggctaatgacgtttctgagccgggaatcgggtttggaacggatgacaatgccgttacgattctgcggccaaatcaggcaccgttgagatggtcgcgccagtctaagatgatgattgccgaaaaaatcgttgctttgacggccaacctgctgaaagtgggtgattaaatggctgaactggcccaggtaatcgttgacgtaccgacgatgcagactgaccagccatatacctacgcgattcctaaacgcctggaaagccagattcaggtcggcatgcgcgtaatcgtaccatttgggcggggcaagcgcgaggtgcagggctttgtcgttggcattgatcagccgacggaatatgatggcacgctcaaatcgattattggactgatggatctggtaccggtcgtcaataccgaactgctgcaactgagccgctggatggccgatcaaacctatgcattctggatctcgtgtttgtatacgatgctgcccaatgccttaaaagccaagagtcatcgagtggtgcgcatagttgatgaggttgatgagcagacggccctggatctttttcaaggagctgatgagctggattttgaacggtatcaaaatgatccgcaaatcgtcagccagctgctcaaactaaagcggcagggtaaggtctcgtttgagtatcaagttgaggaccgggcccgtgtcaaaaaagaaattgccattcagccattgatgtcgtttgaacaatatgaagatgagcgagtcggcgttcgggccaacgcgcacgcacaacagcggctgctttcctatctgcagcagattgacggccaaaaagtcaaacttaagcaggccgaagagcagtcggggttgaaagctggaacgtttaacgttggcgaaaagcgcggctggctcaaaaaaatcgcggtggagacctatcgaacgccggctggtatgatacctgatgatcagcatctggattcgccattaaaattgaatccggatcagcaggcggccgttgcccaaatcgatcaggccatcgatcaagcccaaaatcaaacctttttgctgcagggggttaccgggtcaggcaaaaccgaagtctacctgcaggcaatggctgaagctttaaggcaggggaaaacggccttgatgctggtgccagaaatctctttgacgccgcagatggtcaatcgggtccgacggcgatttggtcagcgcgtggccgttttacacagcagtctttcagatggcgagcgctatgatgaatggcgccgaatcgagcggggcgaggctcaggtagtagtcggcgcgcgatcggcggtgtttgctccacttgaaaatctggggctgatcattatggatgaagaacacgaaaccagctataagcaagacgaaacgccgcgctatcatgctcgtgacgttgccgcctggcgtgctgagtatcatcatgcaccgctggtattgggatcggccaccccgagtctggaaagccgggcgcgggcactggctggcgtctatcagcttttgagaatgccaacgcgggtcaatcagcggccgttgccaccagtagaagtcgttgacatgcggccggaaatgcagcgcaacggcgagaccaacttttcagaccggctgttgaatctgttgaacgagcggatggaaaaaggcgaacagagtattttgatgctgaatcggcgcggtttttcttcatttattatgtgccgagactgcggcttcgttttgaagtgtcccaactgtgatatctcgctgacgctgcacatggactcaagaacgatgaaatgtcattattgcggccatgaggagccgattccttcaatctgtccgcagtgccagggtcgccacattcgctactatggcacgggaaccgaaaaagttgcggccgagctgcagcagctgatgccaagcgcgcgtgtgattcgcatggatgttgatacaacacggcgcaaagggatgcatgccaagctgctgaaagaatttggcgagcatcaagccgatattttgctgggcacgcagatgattgccaagggactggactttcccaacgtgactctggtgggggtcttgaatgccgatacgggattggacctgccagactttcgggccagtgagcggacgtttgatctgctcagtcaggtcagcggtcgtgccggtcgtgctgataagccgggaaacgtcgtgattcagacctttaatccagataactacgcgattcgctatgcgcagctgcatgattatgaagacttcttcaaggccgaaatgaacattcgctaccaggctggctatccgccttattactacaccgttcgcatcatggccagtaatgaagacgaacgtgcggctgccaaggccatctatgaaatcagaaaccagctcagtgtcaatctaagcaaagagacggtcgttttagggcctacgccgcggccgattgctcgaatgaaaaaccgatactattatcaaataatcgttaagtataagcatgatcccaagctgcacgcgcttttaaaggacatcatgcgtcaaacgcaggccaagagccgtcaagacaccttggtcagcattgatccggaaccacagtattttatgtaatcaagaaaggatttgttgttatgtcagtatcagtcgtatttatgggaacgcctcagtttgccgtaccgattctgcaggctttgattgatgatgaggcttatgacgtaaaggcggtcgttacgcaaccggatcgccgagttggccgcaagcatgaactgcgcgcgacaccggttaaggaattggccgttaaatatggaatcgaggttctgcagcccgaaaagctgagcggcagtccggaaatgcagcgcgtgatcgacttggcgcctgattttgagattaccgcggcgtttggtcagtttttgcccgtcaagatgcttgaagcggctaagattgcggccatcaacgtccacggctcgctgctgcctaaataccgtggcggcgcgccgattcaatactcaatcatcaatggcgatcaagaaaccggcgtcacgatcatgtacatggtcaaagcaatggatgccggcgatattattgcacaaaaggcaattccgattaccaaacaggacgacagcggcacgatgtttgaaaaattgagtctgctgggccgcgaccttttgatggagacgctgcccaaaatgattgttggtgacgtacagccagtcaagcaggatccggaaaaagtcgtcttctcaccgaatatcaccagtgagcaggaacgcattgactatcgcctgccagctgaccggattgatgacaaagtgcgtggcttgcggccattcccaattggcaacatgattattgatggtctgcagactaagatctacgacgtcacgccattggatgaaaaaacggatctggcaccgggacaggtcgtacgcgttgaaaagcatgccttgattctggcggctggcgatcatacgacttatcggatcaatcggctcaagcctaagggcaaacgcgaaatggacatcacttcctatttgaatggtcatcaaaatctaaaacaaggagttcaggcaattaccgatgaagaataagcaaatcaataccgcacgcggcgctgccttaaaaacgcttgatcaggtgctgcaaaacggcgcctactctaatctgcagctgaatcagaatctcaagagcagccagctgagcgaagtcgacaaacgcttggctaccaatctggtctatggtgtcttgcagcacaagctaaccctggaatactggctggcgccttttattaagggcaaaaagatcgaaagctgggtcaagacgctgcttttaatgtcgatctatcaatatcgctacctggatcgcgtgcctgactgggcggtaaccaatgagtcgatcgaactggctaagcagcttggcaatccgggaacccgtcgttttgtgactggcgttttgcatgccgttttacgtcaggggctgggggatgttaacgccatcgaggatccaatcaagcggcgttcagtcgagttcagtctgccgcaatggctggttgatgaattgatcaaacaatatggtcagccgacggccgatgcaatttttaaggccgtcaacgaaccagctcgcgtgtcactgcgggtaaatgaggccaagacgactattccccaggcaattgccattttaaaagagcagggcgttgaagttgagcctagccaggttgccaaggccggtttggtggttaaaagcggcgatgtcgtcaatacagacgcgtttatgcaaggattggtcacgattcaagacgaaagcgccatgctggccgtagaaagcatgacgattaacccagcagatcaggttttagatgcctgtgccgcgccggggggggaaaaccgtccagattgcggctgccttggatgaaaaacagggtggcagcgttacggccttagacattcatgcccacaagatcaaattaattgaaaaaaatgctcagcggcttggcgtggctgagcgcgtccatgcctgtcaactggatgcacgcaaggtagatgaaaagtttgaggatggccagtttgacaaaatcttagttgacgcgccctgcagcggaattggccttttgcgccgcaagcccgagattcgctatgataaaaaacttagtgacagtcaaaacctgcatgaaattcagctggcaattttaaatgcagttgccccaaaactaaaaaaaggcggtataatgacatatagtacgtgcacgattttgcagcagggaaatgatggtaccgtgcaggcctttttagccgcgcatcctgaattcagactgctaaagacgcaaacggcgcgtgccttgaaaaacgcgcgaacgggggcaaccttgacgattttgccaagcgattatggttctgatggattctttattagcaacctccaacgtttgtagaagggaatatagacccatggaaacagcctatcaatcagatattggacaacaacgatctgaaaatcaagatcgcgtcgatagttttgccacggatgccggaatgcagctggatttggttgcagatggcattggtggcaatcgtggcggggatgttgccgctcaaacaaccgttcagactctcggtcagcgcttcttaaagtctgcgcccaatgatgaggcagctgctaaacagtggcttgctgatcaggtgcagcagatcaatgatcaaatcattgacgaatcacgcaagaatgaaaattatcagggaatggggaccactttggtagccgccattttctttaatgatcggcaaaaaatcgtaattgccaatatcggcgacagtcgtggctatatcatgcatcaaaacgtcttgacacaggtcacgattgatcattccttggtaaatgagttagtcaagaacggcgatctaaccgaacaggaagccgccgtgtcaccacagaacaatattataacccgggcaattggaatctcgcatgatgcgcagattgatgtcaacgtttttccatttgaaccgggagatcaattgctaatgtgctcggatggcctgtccaaaactgttgataagcaggaattgacccaagtgctacaaagcgatgcaccgctgaaggacaagtgcagcgttttggttgaaaaagccaatgcagctggtggcccggacaatatcaccgttctgatcagccaaaatgatcaggagagataaaatcaatgaaacccggatatgagcttaatcaccggtataaaataatcgaatcgctgggtgagggcggcatggccaatgtctacctggctcacgatctggtgctggatcgcgatgtttcggtcaagctgctgcgcttggacctgcgcgatgatccgagtaccaaacgtcgctttgaacgagaagccatggcggccactcagcttaacgatcctcatatcgttggcgtttatgatgttggcgaagagcatggcattcaatacatggtaatggaatacgttaagggtaccgacctgaaaaactatattcatgatcactatccaattcccttgccgcaagtcatcgacattatggaacaggttttgtcagcagtgcagaccgcccatgctaacggcattattcaccgcgacttaaagccacagaatattttgatcgatgagaataaaaatattaagattacggattttgggattgccatggcggcttcgcaaaattcaatgacgcaaaccaatagtctgttgggatcggttcactacctttctcccgaacaggcgcgcggcagcattgcaacgccgcagtctgatatctactctttaggaatcatcctatttgaactgctgactggtcaagtgccttttgaaggtgagacagcggtttcgattgccttaaaacactttcgcgatgagattccgtcagtgcgcaaattcaatccgcagattccgcagccgttggaaaacgtggtctatcgggccactgccaagcacccttgtgaccgatatcacgatgttgaggcaatggcggctgatctgcagacctcgttggatccatcacgggctgatgaaccaaaattcgtagttggtcaacgttccagcaacgaagaaaccaaagtattggatctggatgcaattaaagaggccgccaatcttgatgagaccagcgatgaaaaggttgatgacgacaccaaacaactgacggcaacgcgacaaagccgtatgaaacgctccattcagcgccacccaattcgcaaatgggcggttattttagtgttgctggtcgtggccatcggaattggtaccggtctttacatgcatcgatcggtcagcgttcctgacgttgagggactgacggcggcacaggcggaaaagaaactgcaggcaaatcatctgcgcttaggcaaagttaccgaaaaaagcagtcagaccgtggctaaaaatcatgtcgtcaaagttgctggcaaccagcgccacgcccatgccggccagtcgatcgatctggttgtcagccgcggcgttaagacctggaagatggctgattacgttggcgacggctattctgacacggctgatgagctgcgcgataaaggctttgtcgttaagcagactaaaaaatattctgataccgttgcaacggggaaggtcattaaacaaagcgtcaatgccggcacgacgatcaatcccagccagcagacggtcacactgacggttagcgccggcaagaagcaggtcacgattccaagctttaaaggcaaggatgtcagtgaagtgcaggattttgccaataagcaccagctgcaattgacgacgacgcagaaaaattcaacaaccgttgctaccaaccatgtgatccagcaaacgcctaaagcaggcagcaagctgacgcatggtgataccttgaccgttcagattgccagcaattccaacgagttaaggacgaccaatattcaaatcaacattccgtttgatggtaatggcggcaagaaggaaaaccgagtacaggtatatattcgcgatgcctatcataacctgacgatggaatatgaggatattaccatcaatcaagaaacgacgattaacgtaccatttacgctgcgtaatggtcagactggcgcctaccgagtaattcgcaatggtcagactattatgagcgcgacgaatattacaggataagttgaggtgtaaagtgcaacaaggaatcatccagcaatcgctcagcggcttttttgacgtgctttgtgacggtgcagtttatcgcacgcgtggtcggggcaacttccgtaagcgcggcattaagccaatcgttggcgatcaagtagaatttgcagacggctatctgcttaaggtgctgccccgtaagaatcagctgcggcggccgccagtagccaatgtcgatcaggcagtcgtcgttacggccgctaaacagcccaagttttccagcaatttattggatcgtcagctgattgctctggaaaaacaagccattgaaccaatcatttatttttctaagacggatctgctaaatgatgaagaatggcaggatctgcagccgatcttagctggctatcgggcaatcggctacgcagtaattgcgcagcggccgccgtttggccaaacaacactggatcagcttcaacagctgcttagtcatcatatcgttacgatgatggggcagaccggggcaggcaagtcaacgctgctgaatcatctggcgcctgaattaaatctggcaactggtgaggtctcacaggctttaaaacgcgggcggcataccacgcgtaaagtcagcctgatgacgattggcgaggccttgattgctgatacgcctggtttttcgtcatatgaagattttgatatggacgtgacggagctttcaaaattatttccagaaatgcgtcagttggccccagaatgcaaatttcgcggctgtctgcatctaaaagaacctggctgtgccgtgaagaaagccgtcgagcatggtacaataatgaagagccggtatgacaattatgttcagtttaatgaactgattgtcagccaaaaaccaaactattgaattgaaacgagggaaaaagattatgattaaagtagctccatcgattttgagcgcagactacatgaatcttgaaaaggacatcaagctggttgaccaggctggtgctgaagaactgcacattgacgtgatggatggcacgtttgttccaagcatttcctatggcccaggctttgtaaaggcaattcgtcaaatcactgacatgtacctggacgttcacatgatggttcaaaatcctgaacacctgattccagcaatggcagaagctggtgctgacaacattggcgttcacgttgaagcaacgccgcacattcaccgtgccctgcagctgatcaagaacgcaggcaaggatgctgaagtcgtgatcaacccagggacgccggttgagatgatcaagccggttctgcacatggttgaccaagtattggtaatgactgttaaccctggctttggcggtcaaaagttcctgccagaaacggttgccaagattgctgaattggatgcaatcaagaaagctaacgactatgactttgacattgaaatcgatggtgggatcaacaatgaaacggttgttgactgctacaaggctggcgccacggttgcggttgccggttcatacgtctacaatgccgaagacccactggctcgcattcaagcactgcgcgacgctactaaataatcaggttaattaggttaaaaacgtgacgaagcgattcgtcgcgttttttgagaggctgcttatgaatgaaaaaatcaacattatggttggcgggccagaagcgctgattccttatgatcaagtcgctgatcatcgctctgagacttggctgggcgttgatttaggagcaaccagactgctggagcatggtattgttcccgaatatgctgctggcgactttgattccagcacgcctgagcaattagcacgagtcaaagcggcggtccaaaaagtagatatctatccaccggaaaaagactataccgatactcagatcggtattttactggcaatgaaatattaccagccagcttcaatcacgatctgggggacaacgggaggccgcctggatcagctgctggccaacctgtacacgccattgatggagccatatcgtaagtacctggcaaagattcatctggttgatcgtcagaatacggttgatttttatgaaccgggcagctatgagatttataaagtgcctgagatgccgtatctggcttttgtcaatctgacgccggtaactggtttgacactgcctgatgaaaagtataatctggatcattttgacagctcgctgcccatttcttggtccagcaatgagtttgtcgggacgatcaatcatttttcttttgacactggaatcgtggccgttattcaaagccgtgatgtccattcacaggggcctttcaagggtgtcaagtgaaaatacttgaaagaaaactattgcattgaaagcccccctatggtaaattatttaggtgagttacagcgcgcatctcagcgcggagaaaataactgatgaggagaggagggttccacatggctaaggatttcatgaccggtaagcggacgcgcttcggcaacaagcgttcacacgcccttaactcaagtcgtcgtacctggaagccaaacctgcaaaaggttaccattttggtaaatggcaagccaaagaaggtttacgtttcagcacgtaccctgaagtcgggtaaagtgactcgggtttagtccaaagaaataggctgtccgccttgcgggcggcttatttttttgctgattggtttaagcaatgcgggctaatttgctttttgacattgctgtgctatggtaagatgatagagatatcaacttgatgacaaacgattaagggaggccattgaagatggcagttaagattaaaacaaagtctggcacgatcgatattgctaatgatgtgatctcaacggtcgtaggcggcgccgctaccgacaactatggcgtagtaggaatggccagtcgaaatccattaaaggatggcgtcaaccagattctgcggcatgacagctacagcaagggcgttgttgttcgtcagcaagacaatggcgtttccgttgacgttaacatcattgttggctatggcacgaagatttcagaagtgtccaagagcgtccaagaaaaggtcaagtacaacctcgaatccatgctgggcgtcacggccaatgcggtcaatgtatacgttcaaggcgttcgcgttttgggcgatgattaagacgtgccacgggaggaattgattttgacagttaccaagattactaatcttgaatttggtaagatggttcaagcggcagccgccaaactgaacgctcaagccgaattcattaattcattgaatgtattcccggttccggatggtgatacgggaaccaacatgagcatgtcaatggccagtggtgccaagtatgaacgtgatgccaccagcaccagcgttggcgatttggcgcaagcattggcaaagggccttttgatgggtgcgcggggcaattccggcgtgatcctgtcacagattctccgtggctttgctaagggatgtgctgacaagcaggaattatcggccaaggattttgttgacgcctatgccaatggtgcccaaacggcttacaaagcagtcatgaaaccgacggaagggacgattctgacagttgttcgtgaatcggcccaagctggtttaaatgaggtcaaggctggcaatgacgatctggttgacatcatggaaaaaatctatgatgccagtgaagcagccttgaaaaagacgccggatctgctgccagtactcaaggaagtcggggtagtcgattctggtggtcaagggctggtgtttgtcttgcaggccttttatgaatcattaagtggcaagattgctgaaaacgacctcgttaagcttgataatgcgcagattgatgaaatgatcaatgccaagcatcatcaaagtgctcagggcaagcttgaccctaacgacatcaagtatggctactgcacgcagataatggtgcggattggtcgcggtaagcaggtcacgcaaaagtttgactacgataccttctataactatctggccaagctgggtgacagtctgctggtaatcaatgacgatgaggttgtcaaggttcacgttcatactgaattcccaggcaaggtactttcctggggtcagcagtttggtgatctgcagacggtcaaggttgacaatatgcgttggcagcaagaagagatcatggaaaaagacgaaggcgagccgacaccgcttgaaaaggccaaggaagctgaaaagccggcgctggacacagcagtaattgccgtagcctctggcgatgggattgccaagctgctggaaagtcttggcgtaacccatgtgatcaacggcggtcagaccatgaatccaagcattcaagaaattgccgaggccatcaatgaaagcggtgctaagcaggccttggtattgcctgacaatggcaacatctttatggctgccgatcaagctgccgaagttgccgatattccaactaaggtcgttcatgccaagacgattgcgcagggcatgagtgcaatgctggaattcaatccagaagctgacctggcagaaaaccaggccaacatggaaggcaacctggatatggttaagagcggcgaggttaccaacgcggttcgcgatacgacgattgatggtcaaacgatcaagaaagatgacttcatgggaatcgtggatggcaagatcgtcaatacggcggccgatgtcaaaacggcagcaatcgaaatggttaagcagatgctggatgaagacagcgagatcgttacgattctttatggggtcgatggcgataaagaaactgctgaagccatcaaggaagccattttggccgttgatgacgaattagacgttcagatctatgatggtggtcagccagtctatccatatctgatttcggttgaataattatcagcgctgaattggcgtaatcaagtcgtgtcgtcagcaggcgatgcggcttttttattaccagcaataaaagggggcgtttgtttgaaaagtctgcaggatccagttggctgcctaaaaggggttggcccgaaaacggttgaggcactggcgactttagacattaaaacggttgaggatctattgacgtactttccttcacgctatgatgactttgccccgactgatctgagcactgccaaggatcgtcaaaaagtaacggtgcatgggacggtgagctcagaaccgattttgacgcgttatggctatcggcggaatcgcttgagctttcggctgctggttgatcgcaacgttgtcttaacgacttttttcaatcagccatatttaaaaaacagcattatcctaaatacccatgttaccgtgcagggaaaatgggatgccgcacgccagcagattctgggaagcaaattgtttacgcagaaccaagagcgtgaattaggcgcgatctacccagccaacaagcatgtttcacaaaaaacactgcgtaagttgatcaaacaggcctatgatcaatataaagacgtcattgcaacgctgctgccgatttcgctgcgccaacgctatcagctgatggagcgccgcgaaatgatcaagcagatgcattggccaaccatgccgtttgttgccaagcaggcgcaaaaaacagctgcctacgaagaattcttcttgtttcaactgagactacaggcaattcggcgggcgcaccggcaagacgatggaaatcagattctgtataacaatcaggaactcaaggaatttatcaaaacgattccctttgagctgactgacgcgcagaaacgctcggtcaatgagatctgtcgcgacctgcgcgcgccttaccagatgaaccgtctcttacaaggggacgtgggatcaggcaaaacaatcgtcgctgcgctggcaattgcggccacggtcaatgctggctaccaggctgctttgatggcgccgaccgagattttggcggcccagcatgctgccaaactggctgatatttttgaaggcacgcatgtcagcgtcggtcttttaaccggttcaatgactgctaagcagcataagcagctgcttaatgagattaaagcgggaaccattaatctggttgttggtacgcatgctttgattcaagacaaggttgattatgccaatctagggctggcgattattgatgagcagcaccggtttggggttcgtcaacggcagctgctgcgcgaaaaaggcgagaatccagatgtcttggcgatgacggccacgccgattccgcgtacgctggcaattacaacctatggcgagatggacgtttcgatcattgaccagttgccagctggccgcaagccgattgaaacgcgttggctgcgagaaaatcagagcggagccgcgctgtcgtttttaaaagaacagctggcagacggcgcgcaggtttatgtagtcagtcccttgattgaacagtcagaatcaatcgatgtaaaaaacgcaaccgacctctatgaaaagtttgccgaatatttcgcgcccgattaccgggttggactgctgcatggtcggatgagcagtgatgaaaaagcggcggttatgcagcagtttaaggacaatcagctgcaggtactggtggcaacgaccgtaattgaagtcggtgtcgacaatccaaatgccacggtcatgctgatctatgacgcggatcgctttgggctggcccagctgcatcaattgcgcggtcgtgtcgggcgtggacagcgccagagctattgtctgctgattgccgatccaaaaactgaggatggtcaggcccggatgcagaccatgactgaaacgacagatggatttgccgttgcgcagcgcgacttggagcttagaggttcaggtgacgtcttaggaaccaaccagtcaggcctgccgcagtttaaagtcggcgatccgattggagatttgaagatgctgcagacggcgcgggctgacgcaggcgcgctcttggctgcaccgcattgggatgaaaaagatgagaatcagccgctggtactgtatttaaaacgtcatcagctggaaacgcactttgattaaggagagaaaaaatgattaaatttgctgtagatgccatgggcggcgaccacgcaccccaggcaatcgttgctggagttgaagcagcccgtgatcagtatgccgatttggaatttgatctgtacggagatccgcaaaaagttgaaccgctgattaaggatcagacgcggctgcacttggtaaaaaccaccgaagaaatcgaaatgggcgaagaaccagtcaaggccattcgccgcaagaaggattcctcgatcgtgcgggccgcgcaagccgttaaggaagggcaggccgatgccttcttttcggctggcaataccggcgcgattctggcagcgggcctgctgatcgttggccgcattaagggaatcgatcggccgggtctgaccagcgttctgccgattgcggagccaggcagctcacggcacagttttgtctacctggattgtggcgccaatgctgaggccaaggagcgcaatctggttcagtatgctcatttgggccgtttctatgccgaaagcgtgctgggaatcgaaaatccacgggtggcgctgctcaacaacggtgctgaagaagacaaaggcgaccggctgcataaagaagtttaccagcagcttaaggccgaagaaaatctgaattttatcggcaacgtggaagcgggcgacttgctggttggcaaggcagatgtcgtagtcagcgacggctggacggccaacgcggcactgaaggcaactgaaggcactgctaagatgtttttgaagctgatcaaaaacgggatcttaaatggcggtctgcgggccaagatcggctacctgttcttaaagcccgtctttaaaaatattgccaagcagatgagcacttcgacttatggcggggccgtactgcttggcttgaaggcgccagtcgtcaagacgcatggctctgctgatgcggttgcagtcaagaatacgattggccagattcgcaccatgatccagaccggcattataaaagaagccgttgactacttcagtcccgaggaaaacatggacaatcagcctaaaaactaatacaataggaaaagttagttcaaaataaaattgtgaggtagaacagacgatggataaaaaggaaatctttgacaaggtctcatcaatcgtagccgatcactttgacattgatcgggctaagattacggaagacctgaacttaaagaccgacctggatgccgattccatcgactttgtagaattcgttctggaagtcgaagatacttttggtgctgaaatcgaagacagcgaagccgaaaagctcagcacgatcggtgaagtggttgattacatcgctgcccatcaacaggacaaaaaataagcaaaatcaccgggaccgcgatgaagcattactttgtcggcggtctttttttcaatggaaattacacgaaaggaagtttttctcattaaagaactagaagactatcttgccaaagagtttggcattcattttaataatccggatcttttagctgaggcctttacgcaggcatcatacgtcaatgagcatccgcatcagggactgaaatactatgagcgaatcgagtttttgggtgatgcagttttgcagctgtttgtttcggaatatatctacaagcggtttcctgagctgccgcagggtaaattgacgcgactgcgggcagcgatggtgtgcgaggacagtttttctaagtttgccaaggaatgtcactttgatcaatatattcgtttggggcatggcgaggaaatggccggtgctcggcagcgggccagtctgctgtgtgacattttcgaagcttttattggcgctttgtacttggatcaaggccgcgatgccgtggaaaagtttattcaccgcgtcatctttccgaaactggatatgggctggtttgaccacgccgttgatgccaagaccagtctgcaggaattcttgcagcgcaacggggatgttgatattgaataccatctcctcagtgaagccggtactgaaaacgatccgcagtttaaagtcagcgtcagcgtaaatggcaaaccgattgctcaagggatcggcagctcaaagaagcacgctgaaatgcaggcggcacaggcagctttgaatcagctgcgcaaaaataactaaaaggcagggaatcccgatgcgcttattgtcgcttacgttggatggctttaagtcatttgcccaaccaacaacaattgaatttcgtccgggaatgaccgggatcattggccccaatggcagtgggaagtcaaatatcatcgaggctattcgctgggttttgggtgagcagtcggccaaaactctgcgtggtaataaaatggcggatgtcatctttaatggttctgaagaccgtgcgccattaaatcgggcactggtttcgattgcctttgacaacagtgatcattatctgaacagtgatttttccgagcttaagatcacgcgcaagctgtatcgaaatggcgacagcgaatatttgatcaacagtcagcaggttcgcttaagagatattgttgatctgtttgttgactccggcgttggtcgcgagtcgttctccgtgatctcacaaggccggattgccgagatttttaatggcaagcccgctgatcgccgtgccattattgaaacggctgctggagtatcaaaatataaacaaaataaggcaactgctgaaaaacgcctggatacgacgcgagaaaacctcaatcgggtcaatgacatcgttgccgagctggaagatcagctggagcctttagccgagcagagtgcgttggctcaagactacctggagcaaaaaggcaagttcgatctgcttgacaagaccaggaccgtccgtgagctggattcgaatcaagccgcgttgaaacaaatcgtcgccaagcaggaaaaagcacagaccatggcggctgaatatgacgaacaggccaaggcggctgctcaagcgctggcccagcagcaggctcagcaaaaacggctgttagtcgtcaaagatgagctgcagcaaaagattctggatgccacgacgatcattggcaagcttaacagtaaacagtcgctgtcctctgtcagacttgaacagcgcgaaaatgaaaaacagcgcctgcttgcccggcaaaatgagcttaaacagcagctggctgcaactgaacaggcacttctgcagcagaatcaggcaattgccgatcagcagcaggcgattaaggaacatcaaaaagcgcttaatgaggccaaatcgcaaagtgcggaacagcgcgcgcagcagctggctcaaaaactggaatcaatgcgtgatcagcaggttgatctgatgcagaaacaagctgcggcccataaccagcagacgtttttgcagcgcagccatgaacaggccctcaatcagtatcagcagcacagtgatgaactgaaaaacgtgcaggaacgcttggaaaaagcccagcagaatgctgatcagcaggcccagcttgtaattgccgctcaaaaagaacggcaagccaaaacccagcagctcgatcaggaaaaagctcagcaggctcagctgcaaacgcagtatgagcaggttcaacagagctggtatcaagcgctgggggatgtgcgttcgtgtcaaaaccgcgtgaaaaactatcaggcaatggctgccgactataccggctattacagcggcgtgcagaacgtcttaaagcagcggcgccagtttaacggtttgtacggtccggtcagtgagctgatcaaagtaccgcaagcctatacgactgcactggaaacggttctgggcggtcagctccagcatttggtggtggccactcaaaacgatggtaaacagattatcaactatctggttcgtcagcgcggcggtcgggcaacgattctgccattggatacgctgcgcggcggttatcagcctcgcaatctggcacgcctgcgcacgctgcctggctttgtcggtcgtgccagtgagctgattcagtatgatccacgctttcaagtcgtaatcgatcatctgctgagcaatacgatcgtggccgataatcttgatcatgccacgctgctcgccaaagaaggccagcaccaggttcgcgtcattacgctggatggtcagctgatcaataccagcggggcaatgactggtggggccagccgcagtcagcggattggtctgttaagccagcagcagatggttgaaaagatgaaacaagagctgcaggtacaacagcagcgatccagtgagctggaacaaaaagtatcgcagctggaacaggcaaggcggagcaatcagcaaacgctggccactttgcagaatgaaactgcccaggccaatcaaaaactcagtgaagccaaggccaatcagcagctcgctgacagtcagctggctgagcttaagcgtcagttgaaagctttggactaccaagccaatgcagccggcaacccagatcagtttgcccaagagatggccgcagccaagcaaaacgaacaacagctcgctgatgaactgacgcagcttaaggtcaccatggagaagatcaagcagcagcaaaatgatctgcagaacaacgccagtgcccagcttgaacagcttcatgaaatgcagcagtggctggccgtggcgcgtgaacggctgcgtcaggctaaagagcagcgcgcggaactgcagacgcgtcaagagaatgccaatgagcagctagccagtctggaacagcaattacaggcgcttgaccatgatgatcagctgcaggccgatgatcgccagacaacggccgccgcattggctgaggctcaacagcagcttcacgacgcgcaggatcagttgaaagccagtgatgaaaaactgacgacgctgaatgatcagctgcaggatgccaatgagcagaacgatcggctgcaggcattacagcgcgcggctatcgaagatctttctgggatcaagtcgcagcgggcccgtttggagatgctgatcgatcaaggactgaatcgtttaagcgaaacctattcaatgacgcttgccgatgccagacaagagctcagtccactgtctgatgatgaattgaaccggcagctgaagcttttgaagcgcggcctggatgagctggggccggtcaatactggtgccattcaggaatatgaacgtatttcggagcgctatgactttttgtctggccaaaaagccgatttggaaaaagccagagatcagcttaaggaaaccatggatgcgatggatgaacaggttaagacgcgctttatcaagacttttaaagaagtatcggccgcctttaccgaaacgtttgccacgatttttgaaggtggtcaggctaaactggtgctgactgatccggatgatgttttgactagtggggtcgacatcatggcccaaccgcctggcaaacgcaatcaacagctgagcctgctttctggtggggaaaaggcgctgacggcaatcgcgttgctatttgccatcttgaaggtgcggccggtaccatttgccattttggatgaacccgaagctgccttggatgaggtcaacgttgatcgatttgccaagtacctgagtcgtttcggcgaggatggcccacagtttatcgtaattacgcaccggaaaggaaccatgatgaatgccaacgtcttgtatggggtcaccatgcaggaatccggggtttccaagatggtttccgtcgatgttgaagaagcactcagatcgcaattaggttagaaagaaggcgtaaaaatgggattatttgatattttccgtcgtaagtccaagcagaaaaaagaagaagcccctgaatcagcggccagtgaaaatgctgaaagtcaggccgctgccagcgaaaatacagccagtcaaagcacggctgctgaatctgaggtaagtgaaggcacggccggtcaaagtaccgcaattgaatccgaagcagccagtgcggcaaatgatcaaaaagaagcggctgctgaaattgacgatgcaacggcagctgccatgcaggaatcggccgcggcagccgaagaacaagctgctcaatctgatgccgcacgtcaagcagaacaggcagccattgaaaaagcacagtccgaagccgccaagcaaagcgccgcggccgccgaggaacaagccgctcaatccgatgccgcgcgtcaagcagaacaggctgccattgaaaaagcacagtctgaggccgccgagcaaagcgccgcggtagctgaagaacaagccgctcaggttaaatcagctcagtcacaagccgcatcagaagccatcagcggtgaaaaaacagcagaacaggccgcctcgcagtctgccagcgttgaaaataccagttcaactgcagctgatgagcgcgcaactacagagacggtcaaaaaagctgcggcagctgaagaaacggttgaagaaccaactaaagcagctgagccgcagtcagacgctgaccacgattcggctgcagcagtgcaagccgaaacggaagccacggttgaacaaaatgatgaaaatgatgatgaggctgcttcggaatcccaggccgaagaatcgacgacagaaaagtatgatcgcggtctgaaaaaatcgcggaccggctttggggccaaactgaatcacttcttagccaatttccgccacgttgacgaggatttctttgaagacttggaagacctgttgatcgaatcagacgtcggctatgacatggcgatgaagatctctgatgagctgcgggaagaagttaagctgcaaaatgccaagagcaagcaggatgtctccaacgtcatcattgaaaagatggtggatctgtatgaagatgctggcaaggatgaaaaccctgatctgaattttgccaaggaaggcccaaccgtgatcatgttcgtcggcgttaatggtgccggtaagacgactacgatcggtaaaatggccaagcgctttaaggatgaaggcaagcgcgtcctgctggcagctggagacacgtttagagccggggccgttgagcagctggatgtctgggctaagcgtgatggcgttgatatcgtcatgggtcctgccaatggtgatccagcagccgttgtttttgacggggtgaagaaagccaaggaagaaaactacgacattctgctggttgatacggcaggacggctgcaaaacaaggtcaacctgatgaacgagctggctaagatgaaacggatcatggctcgtgagattccagatgcgccacatgaggttctgctggtattggatgcaacgactggtcaaaacgcgctgaatcaagccaagctgtttaaggaaagcacggatgtttccggaatcgtgctgaccaaactggatggcacggcgcgtggtgggattgttctggccattcgcaatgagctgcatctgccggttaagtacgttgggttgggcgaaaaggttaccgatctgcagaaattcgatgccagcgattttgtctacggactgttcaagggcctggttgtcgaaaaataagaggtggcggccgtggatatcgaaaaaaacgagcgaatcaatgcactgtttgagttttatcagccattgctgaccaaaaaacagaacgaatatattcagctttactatgccgatgactattcgcttggcgagattgctgaagaatttgaagtttcgcggcaggcggtctatgacaacatcaagcggaccgaaaagattctggaaagctacgaggacaagctgcatctgtatgccgattttgagatgcgcaatcgtcaggcggatcgaattcagcgttatgtcaaggagcattatccttatgacgccgagctgaataatctgattgccaacatggaaaacatggaagaagaataaaataagctggccggttcattttgagttggccggctttttggtataataagaaatgtttgaactataaattaaattaacctcatcgattgcgattgaccaagcacgatgaaaagaggagaaaaaaatggcatttgaaggattgaccgatcgcctgcaaaaagcgatggaaaaactgcggcgtaagcctaaagttacggaagccgatctgcgcgaaaccatgcgtgagatccgcctggcacttttggaagccgacgttaactttgctgtagttaaggactttgttaaaacggtacgcgaaaaggcagctggggctgaggttctaaaaggcttaaatccagcacagcagatcgttaaaatcgttaatgaagaattaaccaagctgatgggtgaggaagccgtcccgctgaataaagcaccgcacattccaaccgtaattatgatggtcgggctgcagggtgccggtaaaacgacaacggccggtaagctggcactgcgtctgaaaaacgaagaaaacgcccgaccaatgtttatcgcggccgatgtttaccgaccagccgcaattacgcagctgcagcaggttgctgaccagattggcgtgccggtatttgaagaaggaaccgaaaaagatcccgttgatatcgttagagacgggatggaacaggccaagcagaatcataacgactatgtaatcatcgatacagctggacggctgcagattgacgagcagttgatggatgagctggtcaacatcaagaacctgacacagccaaatgaaattctgctggttgttgatgccatgactggtcaaaacgcggtcaaaacggcgcaaggctttaacgacaagctggacatcacgggggtcgtcttgaccaagttggatggcgatactcgtggtggggcggccatgtcgattcgagccgttactggcaagccaatcaagtttgtcggtgaaggtgaaaagatggaggatctcgacgtcttccatcccgatcgtatggcttcacgaattttgggcatgggggacatgatgaccctgattgaaaaggcccagaagaatttcgatgaagaaaaagcccaggaaaccatggacaagatgcgggccaatgagtttgactataatgactttttggagcagatggaccaggttaccaagatgggcccactggagaatatcttaaagatgatgccggggatggccaataatcccgcattaaagaatatcaacattgatccaaaacagtttgcccacatcaaggccatcattttgtcaatgacgcctgaagaacgggaaaatcctgatctgatgaacccgagtcgtcgtcgtcgattggcagcaggttctgggcggccaatcgttgaggtcaaccggatgatcaagcagttcaatcagatgcgcaaaatgatgaagcaggttaccaatggcaattttggcggtctgcagaacatgatgggcggtcagatgcctggcatgggcggcaaaatgggtcaaatggcgatgaatcgcatggcgcggcaggctaagaagcgtcagcagcaaaaactgcggaaactgcgcaacaagcacaagcgccgctaaaatcaaccgatcaaaaacttggttggcgatataattcaatcctgagcagttttctgttcagtcaataccctgtctcaataatgaggcggggtttttattttggttaatgagacatttgatactcataaaccggcaaaaaagatgaccaaaccgttttacgaaaaagttggtctttgaaaactccttgtgtaccaaggctttgggcggctcgatgcaattattttatttttagagcttgcaaaaaataaaagctttggtattatttagttagttacttatgtaattaactaagaggataaatagggagggttggtcatgcaatttgaatttgaccaaacggaaccaatctatcaacagattgccgatcagctggaagacatgatttttactggtctgttgaaggaaggtgaacaggcgccttcaaccacgcagctttctcaagaactgcacatcaatccggcgaccgtgctcaaaggaatgcggcagctggttgatcggggcctgctggaaaagcatcgcggcttgggaatgtttgtagcagcgggggcccaagccaagatagtcgaagagcgtaaggacgcattttatgaaaactacattaaaagcctgctggaagaagccggcaagctgggaatcactgaagagcatctaatcgaattgatcaaacgggggtatcaagatggaaacattaaaggttagtcaaattaccaaaaaatatggtcggcagacgattttagacgacatcagtctgacgattcaaccgggcaagatttacgggctgttgggacgcaatggggctggtaagtcaacgttattgaatctgatcgttaatcgaattctgccaactaacggtacgattaagctgggcaacgatgagatcaatgacaatgacgcggccttaacgcagttttatctgatgagcgaggtcagtctttatcctaagcacgtgaccttaaaacagatgtgggaaatggcggatctttcttatggcagctttaactttaatcgggcacggcggctgctaaaggagttcgatattcaagacgagaacgtaaagttgagcaatctttcgacaggtctgcagacggcggccaagcttatcgtggcattatcggtcaacgctaattatattttcctggatgaaccgatcttggggctggatgccaatcaccgcgatgttttttatcaagaactgctcaaggcctatgaagaaaacgtcaagacctatgtgctgtcaacacacctgattgaagagattcagcagctggttgaacatgtctttattttggataataaaaagattgccgttgatactgacgttgaagatctgttaggcgagatgtttgtaatcagcggtccggcaatgctggttgaagagtatgttaaggatcaaaacgtattgggaacgcgcagcctggccggaatcaagactgcgttcgtacgtggggcgctgagtgaagaaaaggagattccggatcagattcaaatcaagcatccggatctgcagcaggcatttatctatctgacgaacaaatagggggagaactatgatttcatcaaaacaaaaaatcgtggtgcagactgatctgtaccgctgcggcaagggctttgtcatcgctgcaatctggctggcggcaattcaggcattctttgccatcttgaacctgattttaggacacattgactggagcagctttggcagtgatctgcgcggcatcttcagttcttggagctttatccttagtttggtgccattcttctattttttgattatgccatacagcacttttaaatggacgattcaaaacggcatctcacgtaagaccatgtggcgttctcagatgctcagcgcggttatcattacgctggttcaagaagttctgatcgtgctgtttgaagtcttggcagatggtcatccggcagaggcgtttatcgttaacagcagcgtgtcgacttggcagggaatcttgtttgagttgctgctgctgtttgaaacaaccatgacggcaatggcaatcggctacttctttagtctattgaatcgtaagtggaaagtaatcgttgcgattggcggcccgattctggcagcattctgcatctattacctgacgctgctattgatcaaactgggcgtcttccagtttattggatcaaactggtcaatcgatttgagcggtcaggcagctaaaacggcaatcatcgttacgctggttgtctcagcaatcgtttggacgcttttaatgatgctggtctcacgcatcagtgccaaacacatgcagctgcggcgcgactaatcattaaacgatccctgccgatcaatcaggcggggattttttgattgatagtaaataaaaatcggatcgtgctgcctggataaaacttgaattgcttggcgtgaaataccgtgatttcaacggttttgattggctgaggacttatggattcaaggaaaagaagacgaagatatgcttaaaaaggatttttttgaaaaaagtttagcctgtcaagaaaaaatactttacattcacttgaatgactggtatattattagctgttagaaaaaatcaaggaggtgtgaatcaatgtcagtaaagatccgtttaaagcgtatgggttctaagaagcgcccattctaccgtatcgtggttgccgactcacgttcaccacgtgatggccgcttcatcacgacgctgggtacttacaacccactgaccactccaaaggaagttaagttcgacgaagacgccgttatggactggctgcaaaagggtgcccaaccttcagatactgttcgcaacatgttccaaaaagcaggtatcatgaagaagctccacgaagccaagtacgcttccaagaagtagtggtaaatagtcatgactgagacaaatctagagacactgattcgtaccctggtcacgccgttggtcaagcatccggatgcagttcgcatcaccgaatcagagactgatcggtatcaccggtacgtcctcgacgttcatccggctgacgtcggtcgcgtgattggtcggcagggacacgttgcttccgcgctgcgtaccgtagtcgaaggcatgcgttctaagcggcccaactctaagaaagtccggttggtgattaatgaccatcgacattaaataaaaactcccacaccaaccctgtgggagtttttctattattcggaggatttttaaatgcaatattataatgttggtaaaatcgtcaatacgcatggtattcgcggcgaggttcgcgtgattgccacgactgattttcctcaagagcgtttccaaaatggcgccatcctttacctaaagcagtctgccggtgagccattacgcctggaagttgccggcgcgcgtcagcataagggaatgtggctggttaagtttaaaggctacgacaacatcaatgacgtgcagagtttccgtgaccacgagctgatggtgactgaagacgagcagcagcctttagaagaaggtcagtactactatcatcagatcattggtttgacggttaagacgctggaaggacgcgaattaggcgtgatcaaagagattctttcgccaggtgccaatgatgtctgggtcgtcaaacgagccggtcaaagcgatcttttattgccggtaattgatgatgtggtcaaaaacgttgatctggacaagggcgaagtcgacgttgaattaatggaaggactggaataatgcgaatcgatgttttaagtctgtttccggacatgtttaagccaacgctgggtcagtcgatcgtggggcgggcccaagacgatggctttttggatattcatgtaactgattttcgtcattttacgactgacaagcacaatcatgttgatgacgcgccgtttggtggtggtgccggcatgctgctgcaggctcagccgatttttgatgcgatggcggccattgacgaagaagcacaaaaggaaaactatccgaaaggccgtgtcatcttgatggatccggcggggcgcaagtttgatcaggactatgctcaggaattggcccaagaagaacatttgacgtttatctgtggtcactatgagggctatgatgaacgcattcgccagctggtaaccgatgaagcctcattaggtgactacgtgctgacgggcggcgaattggcggctatggttatgattgatgccacggttcgattcgtgccgggcgttttgggcaatatgtcttcttcaatgggcgactcgttcagcaatggtctgctggaatatcctcaatacacgcggccagctgagtttcgcgggatgaaggtgccagaagtgctgaccagcggcaatcatgaaaaaattcggcagtggcgaatgtatcaatcgttaaagcgcacctgggaacgccgcccagatctgattgaacaggccaaactgtcccgcgagcagcagatcatgcttcaagacattaaattgggtgaagacccaacgatgcagtaggcgacgcgcatgattaagaacaagtttttaaaacgactgctggccaaagaagatccaaccgtctatcagctcaaggatgcatcgctggaaccttcattgacgactttggatctgatcggtctggggacggggatggtcgtaggcacggcgatctttaccttgccagggatcgtagctgctgagcataccggaccagccgtaccattggcgtttatcgtggcggcaatcggagcgggactttctgccttggcctacgcagaaacagcctcagtgctgccgtttgccggttcggcgttttcttggatgaacgtcttgtttggcgagttttttggctggatcgcgggctgggcactgctggcggaatattttatctccgtagcgttcgttgcctcgggatggtcggcgtatatgcagggctttttgggtagcttcggcgtaaaattgccagttgctctgactggtggatttaatccggctaagggctcgtatgtcgatattttggcggcaattgcgatattgatcgtcggctgcttgatcgcacgtggcattcatcaggtcagccgcgtcgagaatacgatcgtggctgttaagctgatcgtgattatcatgtttgtcgtgattggcgcgactgccattcatccgcaaaactatgtgccgtttattcccgcgcaccgaccaggaacgacttttgggggctggcaggggatcttggctggctcttcgcagatttttattgcctatgtgggctttgatgcaattgcggccaatactgctgaaaccaaggatcctcagcacacgatgcctaaaggattgattggtacgctgctgttggggactggctttttcatcgctgtctcactggttttggtagggatgtttaaatacagccgctatgctaataacgccgaaccggctgcttgggcgctgcggcattcaggtcattatttaacggccaatctgctttcggtagtagccttgattgggatcttttcagccttgatcgcaattctgctggcctcatcgcgtctgatctatgcgtttgggcgggatggtctgctgccaagccggttgggtcatattgatgataagcacgttcctgatcacgcattatggctgatcacggtgctggcgatgattcttggttcggtattcccatttacgtttttagcgacgctggtttcggccgggaccttgattgcctttatctttgtctcgttggggatctacgcgttaaggaaacgggaaggcgtcgacctgccggaagccaagtttaagatgccaggctatccggttttgccagccatctcggttgtctattcaatcgttatttttgctggtttgaatattgatgccaaattactgatgatcggctggttcgttattggtttgataatctactttgcttatggaatcaagcattcaaacctgaatcagcagctcaaaaaggttgtcaagtaatttacccttgcagtcgccaggggaatatgttatattatgtcttggctttttatggccataacaacggtattccgctgctgaaatcgggcaagaatatcgacgaaaggaaaaaatattatgcgtcaaaaccaattgattgaaaagatcaccgccagccaactgcgcgatgacattccagaattccgcgctggtgacacgattcgcgtccacgccaagatcgttgaaggtactcgtgaacgtatccagatcttccaaggtgtcgttatcaagcgtcacggtgcaggcatttctgctacttacactgttcgtaagattagtaacggtgtcggtgttgaacgtactttcccagttcactccccacgtgttgctaagatcgaagttgttcattacggtcgcgttcgtcgtgctaagctgtactacctgcgtgaacgtactggtaagtccgctcgtattcctgaacgccgtcgcgacgttaagtagtcgagtgtcgaccaaaacccttgctgtgcaagggtttttctttttgcctaattttcaaaatgccaattgagtttgtgaatttttgccaattatttgcttgtggcagacaactggcagacactttgctataaattttccaattgatcacgatttttcacaagcgcttcgtgagtaacgcgtgtgtagatttcttgagtaactcgactattagagtggccaacccgctgctggatgacatacatcgatacgctgttctttcaatctcaaatgcagtgtatcgttttttgttttagcgtcaatggtctaatattactgttgataaaaaacaaaagcctatgaactagattatgctgaagagatgactactcattatgaaagtgcaacgtataaatttattttaggtgctatcgagcgggacaattatcctaaatttgcttttgatggctggtgttaattgacggggtacaacaatccgctttttaatttcttataacctggacatattgttaaactgttctttctgtatgcaatcaattctcgcgggtcgtaactgaatcaacagttaatgacaaacagatcgcaatgaaaacgaattaacaatcacgtcaataccacatttgatagtcagtatatattggcacgatgctatatgggcaaagaattaataattagttttagtagatttggtgattattacgaatttaatccgatctattggcatctgtgcagccattaacggtaaaaatactgatgctactaggatgaaagcccaccaatcaaagaaaagatgtcatgcagtgcctaccttgccaaaggagttgccgaagaatgaaaataacaccgaaaactaatctaggggatgttaataataattttgctggttcatgggtggttgttcatatgaaagatggacgcacattgcatttatacattgtaaatacggatgatgaattccaacgcaacgatgaagatgatgagcctaaattaaatgccattatctataacacaactggcagcaattcgtatggaaatggaatagcttttgacgatgtcgattcgattgagttagatgataatcactaatattgacagacatctggtaatgaagttaaggaaacggaacaacttaggaaattgtatgagcgtaagtctaaagaatggagtgggaaaaatggaagtgattgataaacaatttttttctcaaaagaatatcagcgtgattacaattccatcgattaatattaaagctggacaaactttaagggatgaacttggcaatacgtttgaagtttctgaattggttcctaatggtaagctggcattgtctggtaaaagctcattgatagttaatggggaatttaaaggtaatacattagaaattgtttaactgaaccaaattttagaagaaaggcaggcaaaaatccgtggttgaatggtacctagtatctaatacagacaatgaggttacgtatcgtatggttaatggcgacactcacaaaactataggaaatatgactgttaacaaagaaacaaaagcctataaattggattatgctgaagagatgactactcattacgaaagcatgacatatgattttattttaggtgctatcgaacgtaacatttatcctgattattcttatgatggttggtgctaatgacttatgtatctatcgcgggtcgtaaccgaatcaacaattaacgctaaacggatcgcaatgaaacgtgaattcttaaaagatcttgggtaagcacacagtaacaacacgtattccaaccgccacacggaccacctatacttgaggaaactcatatataggaggccttttttgatggctcaaaatgaaatcgttgaagtcagcgccgcttcaacgatcgcaagactaatcggtgcgtattagtagcatcacttttgattcagaaggtacggctcaacatctatcaagatgctgggtctgctaatacggctgtcagccaagcttaagagcaaacaaaaaagcccacagcatgatactgtgagctaataaaagagcgcccttttgaggagcgcccagccagcttgtaagttaggaagcactcactgcacacggcttagtatttatcacaaagtcattataacatactctgattatgttacattaataaagcacacatgagcaggcttaggaaacctaacttgtgctgaaaggagacaactcccaatgtggcatttgtgcttagtatttatcatcgtgcctaataagcacgttaaaaattaattaagcgactgtccaagtagcagtcaccagcgctcatcagtttggatactgattgggcgctttttgcttatcaaaattctggtaatgtaaatgacaagcaaccggtactcaacgattagaggtagtgatattatgacgatatctgcgactactcataaatcgccatcttaaactgccataattgtacattttcaaattgccatttctatacaatttttaactgtccctgacatctttcacttgatggtaagcatgatgttcatattcatatttcccagatgaaagaaatgcaagcaaatatttggacggaaaatcgtactaagaagcatcatgcctttgacaatctgattcagcaaaagctcaaactggatctgcatggtcaaaaagtcggcgtcgcgattggcaatggtcaaaacggtgagatgctcaaagaagtcgtgaaaagctaccatgggaatcccaagctcatcgacgccttctctggcaaacgcaagacgctgcgcaaacagaccaagaatctggacatattgattttggtaacggcctatgcctcgcatccatcttcttgggttttgaatgaagcctgcaaggactatggcattaagtttgccgtcagtcctaagctggccgttcgatcattcagcaaggcactttaccgggctgagcatcatctgacggcctttgagcagggaaatcaggaagttgcgtatccagttgcttaagcaaaataatgcaaaataaaaatagctccgtcacgaagatcgtggttgagccattttctgtctttgatgttctcgaagtattcatgggcgatgtgaaatggcagaggtaatttttactgagtttgaagttttttgaatattgcataatgagctgctaaaaaacctaaccacccttccataacgacatatctaaattaagcataccaaaacggccctgacgcaaaacttgcggcagggtcgtgctgttttagatgaattttgagacagccagctttaaaattcaattcgcttctggaaaatcggctgttggcgcaggtcgtaaatcgaaccggcaattggcgtaatggcaaatggtcttaaaatgctgcgccgttcagaatagtttgccgaaatctgctgcatttccggtcgtgcggcaaaaatctgctccagatactgctgatcgacctcagctgccgtgccggttaaggtgaagccaacactgtccagagtttcgctgccttttaaagccgtgatcgagatgcggggatgagcctttaaacgctgataaaatggtttttgataggtcgtcgcaaagatcagccggttgccgtctaaaacctcgatatcagcgacgttggtgtggggatcgccattttgatcaaccgtgccaaacacaacggactgaaaactatcgacaatcagtttgagaaattcatcgcctgacagatggctgtctaacatcggaactggtttgcgcattgtgatacctgctttcttttatatttttgtgttaattgtaattaaaaacattacatttgtatatgatcaactgcagcaaattgtatcaaagtttcttgataaaagcgcaagacaggtgattttagaaaaaatttgccatttacaaaaaaagtacttacgaaaccgaggcaatttttgctagaatggcaaacatgctgattaagattaagagttagcgttaattgaatacatcaaattaagtctgcttgctgtttggtctttaatcaagtcaatttgattaaaggagcaaaatatatgcaaaatttttctgaacctgcttttcgcgtcaaacatccggggctgacgatggccagtttgcttttaggcgcttttgtcggcatgtttagtgaaacgtcactgaacattgcgctgcctaagctgatgatcgtctttcataccagtacggccgttttacaatggctggtgactggctacatgctggttattgggattgtcttgccgctgtccagtttgattgccaagtggtttacaactcgccagattgtgatttttgccctgctggattttattatcggtgcggcaatttcagcactggcgcctaactttgcggttctattggcgggtcgaatgattcaagggattggaaccggtctgattctgccactgatgtttacgattgtgatgcagattttcccgcctaaaaagattggcagtattatgggcatctgtgctttggtaatcatgtttgccccggcaattgggccaactttgactggtttgattctggccaagctttcctggcgctggatcttttggtcatttgaaattttcttggtcatcgccttatgcctggccgtaactgctttggaaaacattggtcagccaacgcgtcctcacattgatctgctttcaatcattgaatccgtgcttggcttttctggtctggtaattggcgcgagcctgtccagtctggatggctggggttcttggccagtcttaggctcgtttgcggttgggattttggtattgattgcctatgtgattcgtcagctgaaactagaaacgccgatcttaaatctgcgcgttttcaaagttaaggcatttacaattggcgctgtattggtcatgcttgattttggtattattctttcggccatgtatctgatgccaatgtatctgcaaaatggcttactgttggccgttgccttaactgggatcgtcatgttgccaggtggtctggtaaatgctttggtttccgcgtttgctggacggatgtatgattcaattggggccaagcgtccagtcatgattggttttgtgattgccattgtagggatcgtcatgctgcttttgacgacggctcattctgcagttgcctatgtgattgcggctcacgtgattttgatgattggctgtccattggcaatgtcaccagcgcagactagtgctctaaatgcgctgcggggaccagcttccagtgatggcagtacgattttgaatacgatgcagcagattgtgggggcattggcaactgctctggctaccagtttcttggaattaggtcggcacgcggcagctggcagtcaagcgatgcgttttacgtccggggtacacacgggactttactttacgctggctttggcaattatcgcgctgatcgtatcgtttgccttgcccaaacaaagtgaggattaatcgtgttattaagcctttaaaataaatcccaaaaatttttaatagaccctcattctcaaaattatctttgggaatgggggtcaaattattttagtcggtaatatttgacgataacgacataaagtgataatctattttgtgttgataacgacatttatgaaaggcggaaataaatatggcaaacttaaatcacatggacaaacatttcaaaacgctggatgacttcttgggaacgcatttcatctatacgtatgacaatggctgggaatatgaatggtacgctaaaaatgatcatacggttgactatcgaattcatggcggaatggttgccggccgttgggttaaggatcaaccagcgcacattcatcagttaacggaaggaatttacaagattgcgtggaccgagccaacgggaactgatgtcgcattggatttcgttcctaatgaacataagcttaacggtacgattttctttccaaaatgggtacaggaacatccagaaattacggtttgcttccaaaatgaacacattgatttaatgcatgaatcgcgtgaaaagtatgaaacctatccaaaattagtggttccagagtttgcaacgattacctacatgggtgatgctggtcaggataatgaagaagtcatcaatgaagccccttatgctggcatgactgatgatattcgcaatggccgcttctttgatgaaaattaccatcgtctggctaagtagcttgttatataatgttttgcagaatcagataaggaaggatgctgcaaaatgccgcaaaaaaggatactgccctacgttattatggggatcctgctcaataaagactgtactggaaagcagattatggatgagtttcgttttgatattggggaattttggcaatcatcacatagtcaggtttatccagagctaaagcgtatggaacaagatcgttggattgaaagctactcaaaagaagataatgataaagagatacactaccatttaacggcttatggtcatgaaattattaatgactggttgatggaacccgttgataagctgccggtatccaaagacctattttctttaaagacttttttcattaatgatcgtaatgatccaagactggaaaaattgtttaagcaccagatccaactggttagcaacagccttaatcatctgcgcgagcgtcgacaagcattattcagcagtcaagaacagattgatcaacaatatggtcattatttgattttggctcgcgcaatcagtcgccaagaaaatcaattggtttggctggaagataaattgaataatcgttaaaaacaatgaaaagaacaatcgtgtgctaccagtttttttgcagctgttggcgtgcgattgtttttttattttgccgcgatctggtcgacaaacgctgaaattttccaaaataaaaatgcatttccgcttaaaccgtctaaagcatttataaggacactgatagatgatttgagaaaggaagccggaaaatgagaaaaaagctccaacagcttggtccccaaatgcgacacgtgttcatcggccggtttgagcgcgttggctataaaaaaagctaccgttactgtcggccaacgcttttgctcacccacgttgctttagccgaaactggagaactgattactgatcatttatggctcaattatacgaaaggctttttagatttaggcgaactgttaactggtgacctgctgcgattcaacggtcgagttgccagctacgtcaaaggttattttggcacgtcgcaaaaacttgactacaaggtagagcggccctcgcaagttgcgctgcaggccaaaattgagggaccacgccgcttgctgcctgacactgctaccaaattcggtcgtcaagcactgattggctacattatggaacgggagcgcgcgttttacgaggccagctgtcgtccgattgatccgtactatattgagcagtatcgagtctggctggccaatcatgttatgaaaaatgcacaaaactatgatagtgtcttgcaaaaacaacttactgtagcatctaaaaagcactgagccgcattaagcagttcagcgcttggagatcaaggttgtcagtatttgattagtttagggcgttgattaagttgtccagactggtcagaatttcagctggcagtttttcgcccgtgtgctgagcttcatagttcttaacccagtcgcgccggatttcaaaacgcgtcttaagcttggttacgtattcagcatcattaaagtcaactgggtagccgtcataagcgatgtattccatgttggtcagcttgccaaatggcttgaaggcggcctggttttgggcaatgtcttccaaagccttcaaggtcagttctttagggatgtccaagccgttaaagttggcggtattgacgatgtagcagtcaacgtggcgttcttcaaacagcgccttaaagtcttgatagtcctcgcttaatgggtaggcgcggaatgggtcggcaaatggttcgataaccaaagcgttgcggtcagcgcccaccacgttttcggccgtggaacgcttggtagccagcgtcagaccaaacgtagccgcggtaacgggatcggtcagtttaacgactggcggcagactgtcatctttcataatccaaaagacggcattgattggggcaatttcgcgatccacccggttggtagaagcatagcgcgtcttaatggtccgtccattgccgttgcgcagatcctgggttaccagtactttttggccggcttcgttaagcgtgacgccaacgttcatcaccgtagtaaagtactgcatttcgcggctgcccggcagatagtcgttggtcttgtcaaagtaggctggttcaagagccgtggagctgccgtcttcacgattgattacaaacgcatcgtcatgcagcacggtaatatcaaacttgccgccatgcttggcgtgcgtcagcgtagacttgcccgaaccagaaagcccgtagaaagcaaaagtctgatcatcacggtcgctgaagtggaaagtcttttcgccgccgtgacaagcagtaaaaccatgccggtgcgcggttgcccaggccagcgtcaaagtggacttcttaagctcgccaaagtagcgcagacccaagactgccgctgcattgtgctgagcatcgatgacaaccagcccatgtggatagtcgggactgctccagtatgggttgcagtacagatagatgtcgccttcatcataggcccgtgaatcggcatagcgcttcagccagttttcggtagctgtttggaagttgagcatgtaggaaagcagattgacctcaaatccttctgctagtgccagatgcgcctttaccataaagtcttcatccagccccacgatcacgtccgtcgtgtaaaagtcgcgttcgtggccttcatagatagcttcgcgcaggacgccatcgattttttcggcatcaacgtctggagaaccgatcaaacgccgtgctgccgcggtccggcccacgatctgaccatgattgtcgaccagcatcttggcatcggctggcagtcccagttcttcggtatgcttgattggcaggtcggtaacgatggtgttggggttgtcggccgccaaacgataagcagttgcggtatcggcaatatgcgtcatgttgttggcgtagaatgccgattcaatcgtagtccgcgtccgtgagaagatcggattggtcttaacgatgtctttttcagaaaattttgtttgagtactcattgaacagccacctttctgataaactatcgtgattaaagtgcttacattcctattataatgcaaatatcagccaataatagatttaaattttgatatttgtcgaaaagtttgataaatgtcaaaaaactctggaattgactattttatgaattttttaaagttattgattaagtttaaaagaatttatatcgcataaaatttacattttgccccgttactcttcaaaacttctcctaaaaggattcgcaacttttctttaagctttgtgtatcagctttgatggtcgggcgttaagcggtttgtcgatcaaggcgaaattattaatttaatatagggaagtgattgtttgcaccacaaaaaaggacgctggctggcactgatcgcggtgctgctggtcttatgcggggttggtggctggtttggctatcgtcattattcgctgggtgtcatttctgataagcagatcattaaaaatatcaatagtcatctgcttaagaataatccgacatccaagcagaccaagagctatgccaaaatcgtcaaaagtactgcgcggacgctggataatgcccacgtcaaggttaatccatacggtacctcgccattgacggccttgatgatctttaagacggataaggctgctaaggtaacttacacggttgtcggcaagacggataacacgtcgattaccaacacggttaaaggataccagaccacgcaccaggtaccaatcgtggggctttatgccaactacagcaaccaggttcaggttacgcttacctacaaggatggcacgatggaacaaaagacgtttaccatcaagacgggcaagctgccaaagaatttgcgcaacaccaagatcacggtttctaagagcaacaagtccaagatggaaatcggcaataacgagctgacttatatcaacaagacttctgaagaaccgtttgccgttgacgcggatggcaatattcgctggtttacagccgtcacacgttcgttcagctcagcaatgatcatttgttgattcaaaaccggacgaatggcaataagggttcttacaacgtcttatctgaaacggactaccttggtcgaatctaccggcgttaccatttcagcgacaagcttggcaagagttcgcttgaacaatacattaccgcggttcaccatgacgcgcttgagttgccaaatcataatctgctggtaacgatctctggtggtgacaagtacgcagaagacgtgattgccgaaattgattacaagactggtaagacggtcaaggtaatcgactttaagaaactgctgccttcaagcatgtaccgaaactataacagtacgacgactaagggtggcaagatcgactggctgcacatgaattcgctgtactacgatcaaaagacgggcaatcttttagtttcggctcgtaaccaagatatcacgatgtccatcaactacaagacgggcaagattaactggatctactctggtaagaagaagagctcctggcctaagaagtaccgcagcaaactgttgacgccaaccaagggtactaagattactggtggtcagcatgacttgacgctgctcagtgataagaacggcaagctcaaggtcctgctttatgacaacaatattgacgttacgaatggcgattccaagacgtctggcaagtactcgcaggcggttcaatacacaatcgacaccaagaagatgacgatcaaacagacctggtcatacggtaagagtctaggaaaggccaacttcacgcgggtaatcggttcagcacagcgtttgagcaatggcaataccttgattgactttggctacaagaacgatggcagccaaagcaacattatcgaagttgatagtaacaataatcaggtattcaatttgacgatcagttcgtccaagacagatcggacatatgtctaccgagcattacgcgtcaaatttacgccatctaattttgtatttgatgcaactaaatagttttacgctcagttaaaagaagcgtcggcggtttttgtcggcgctttttcttatagttatcagtgattttggggacaataagcagactgattagttaaaagggtggatggctgattttgggaatagcaaatcgagcctgcactcggaaaatttttaaaatggattgttatcatgattattcgcaaaagtcgctgattggcttggatcgcgtcatgactagataatcgtaaattttgcggttaacaaactaacgatcaatatggattgactttactgctaaaattcgcatttttatgaacgatgattgagttaggcagtctaatattcatagtttgaaaaataattgaaaaacttttgataagccgttgacatatgaccgtaatctttgtatattagataacgttgtcgcggcgatgagttgctgattgcttgaaatcacaggcttttcgctaaaatgtcaagaaacgttttgaaaaaagttcttgactttaaaatggcaatttgttaaactaataaagttacttgct

SEQ ID NO: 1839 - DNA, 1369 bp, Unknown
  gut microbiota DNA sequence
ctgggaggacgagccttccccaggaaaccttagtcattcggtggacaggattctcacctgtctttcgctactcataccggcattctcacttccaagcgctccaccagtccttacggtctgacttcatcgcccttggaacgctctcctaccacgcatcctaatggatgcatccatagcttcggtaatatgcttagccccggtacattttcggcgcagagtcactcgactagtgagctattacgcactctttaaatgatggctgcttctgagccaacatcctagttgtctgtgcaattccacatccttttccacttagcatatatttagggaccttagctgatgatctgggctgttcccctttccacgatggatcttatcactcaccgtgtgactcccgagtaaaaatcaatggcattcggagtttatctgaagtcagtaacccatgacgggcccctagtccaaacagtgctctacctccatgattctaaacctcgaggctccccctaaagagatttcggagagaaccagctatctccaagttcgtttggaatttcaccgctacccacacctcatcccaaccattttcaactgatacgggttcggtcctccagtgcgttttaccgcaccttcaacctggacatgggtaggtcacctggtttcgggtacataactgcgtacttcgtacgcccatttcagactcgctttcgctgcggctccggtttttccaccttaaccttgcacgcaatcatgactcgccggttcattctgcaagaggcacgccgtcacacgtaaatgtgctccgacagcttgtaggcacatggtttcaggaactgtttcactcccctcccggggtgcttttcacctttccctcacggtactggttcactatcggtcactagggagtatttagccttgcgagatggtcctcgcggattccgacggggtttcacgtgtcccgccgtactcaggatcctgaactgagagtgtgacgtttcgtttactgggctatcaccatctttggcgtcgcttcccaacgacttcaactacgtcgcactttggtaactcaaatgttcagtcctacaaccccaacaagcaagctcgttggtttgggctcttcccgtttcgctcgccgctactcagggaatcgaattttctttctcttcctgcagctacttagatgtttcagttcactgcgtctaccgcctgacagctatgtattcactgctcaggcaatcatcgactaagatgattgggtttccccattcggaaatctccggatcaaagcgtacttaccgctccccgaagcatatcggtgttagtcccgtccttcatcggctcctagtaccaaggcattcaccatgcgcccttt

SEQ ID NO: 1840 - DNA, 2554 bp, Unknown
  gut microbiota DNA sequence
atgttatatggatggcagaccattaataataatacgtactattttgatttagttactggtgcaatgtacactggtacgcactatattgatgggactaagcatacttttggctcagatggtgtagaggatacatggggatggccattcccagctgatggtcgcggtcatttcacgggagcacaattatttggtgtaaatgcaggtggtgagttccgactgaatggtttccatgatggtcttgactttggttcaattgatcatccagactatgaagtccatgcggttcacaaggggacagttacgggaatcggttatgcttcaggtctggactggtacgtattgattgatactggcgaatatttgaccgtttaccaagaagctttcagtagccgttctaatatttgggtaagcgttggtcaacaggttaacgttggtgacgtaattggtggacgaacgacggctcacttgcatttgggaattactcgtcaaaagaactttaatgttgccttggcaaactcatttaacaacaatggaacatggattaatccattaactttgttaggtaactaaacagaaaaggggagcttttaaggaagccccctttttttaagaaaatttgaatttttgtggatttttaatttggaggaaagatttgaataacgaacgtcaaaaagtacaagcataccaaagtgcacagcagaaaactttaaaaaaatggacgcttttttctggaattacgttaacggcacttagttttggattaattttacattctggtgctgcacaagctgatgctacaacaactagtagcagtagcgtgtcacaagctactgctaacgatgctaataccgagtctgtagtactgacttcaacttccgcatcaactaatagtgcgagtggtatctcatcctcgcaagttacaagcagcagtagtgaaaatgacgcatcagcagcaataggtacaaatgcttcttcatcagtttctgatacaccacaaaccagtactacatctaatatagcttcatcaacacaagacagtaccaccgcacaacagaccacatcatcacaagatttaagtaaaagcagttcagaaagtacagtaactgctactactgatgaaaatcaaaatgacaatgtagtaactgataatagtgagtcttcagcagtggcagcatcttctacagcagtggttgttgccaatactgatcaagaaattgccttacaagctttggctgcatacagtacttcagctgatgcaattgatgtttcttcatatcaaggtgccatgagtgtgggaacttactcctggcttaagagcctaggcgttaaatatgttatcgttaagctgactcaaggtactacatatacaaatccatatgcacaaacgcagattaacaatgccagagaagcaggcttgacagttgcaacgtatgactatgcagttttcactgattcagcatcagccattgccgaggctgatcattatgccaatgttgccagttcttatggcttagatggtagcacgttgatgattgctgatatggaagacaatgtaactaaacgttccaacattgctgcacttttaaatgaattttggaatgaattgagccgtcgaggttacaccaatcatggtgtttatgccagttatagctatgatcaaacgtacaatgttagttcaacagttggtcatagtaagacttggattgctgcttactactataattattggaaaaataccatgttgaactcggactatggtgcttggcagtatactgatagttttaatggctatgatggctccattgatatgggaatgtttagcacctacatgagtttaaatggtgaaaagcaagaaaatggctattggtacctatacaaaaatggggttcgtcaaaccggttttcagagcctttcagatggccgaactgtttattacaatagtcaaggtcaaatgcaatatggtgaacaaaaaattaatggttattggtattactttaatactagtacaggcgccatgactactggctttactaaactatcagacggccgtacagtatactataattcgcaaggccagatgcaatatggtaatcaaactatcaattataataaatattactttgatacaattactggtgcgatggcacttggcgaaaccactattaatggacgtaactattattacaacatcaataccggggttcaagaaaaaggattagtttataaccaaaacactaagaaattacaatattatgattcagcaaccggcgcgctgaaaacgggtgtaaatagtgttacgaatgataataataccattcagttaaactctgatgggtcagttaatactcatggatatactactggtatttataagattggtagtagttcatactattatgatgcgactaaagatatgttcttaattggatggcaaacaatatctggcaagaaatattattttgatacagataccgctcaaatggctatcggtgagaagcagattaataactactggtatgattttgatgatagtggtgttatgcaaattggattt

SEQ ID NO: 1841 - DNA, 313 bp, Unknown
  gut microbiota DNA sequence
tcaatccagttatagaccgtcttgtaggcaatcccaactacatgggcaacttgttcaggggaccacttctggacttgaatcttttcctcgattaagtgtttaaggtttttagtgagcgaagacttccgcccccgttgactaaccttgcgttcaaagccagtttgcgctagcttagcccggtactcactatttagccggtgaagttcgttaaagatggtggccttactaaagcctaagtagttagcgatgtatcgcaaggaacgtccttcattatgaagcgtttcaatgacaacacggttctggaatgataaaa

SEQ ID NO: 1842 - DNA, 138963 bp, Unknown
  gut microbiota DNA sequence
gccgttgaaaatatattgacagaactgcgactagaatctggacttatgatgagctggccttaaaacgatcagtcttaatcagccccgcctaaagttggctgcgatccaataattaacaagaatagccagcagcagtggatgtaagcttatgaaactggtgcgcgccttacagccttacaatagcggatcttgactacgattattcaagcttgaagttgcggacgaccttgtccagatcctcttgctcgattccaagataatggcgggtattgcgttcagaggagtgattgaacagctgcgagatgatttcgatattgacgccatctttatacagctgacggccaaatgtcttacgaaacgagtgcgtccccagcttagccaccaatttttcgttgccggttttacgcgcgatccgctgcagcatttggtaaaagccatgcacagagaagtgaccgtcttggcggccgggaaacagccaatcattgtcgtctttgaagtccagctcgtttaagtagttgatgatttcagccagacagttgttccagtaaagcgtcttggccttaccggttttttgctcgatgatccgcgtttgggtcttgtttttaacgtggccaacccgcagcgtcacgacatcagaggcgcgcagtccgttgtttagcgcaatcgagatcaaaagcagattgcggttgaccaattcgggacgtgaatattggcgaatggcttcttgcagttcgtgatactcggcggtcgttaaaaatttgacgttttccacccagatcttacggtcgcctttcttttcaccattggtcttatttttgggaacgtagatgcgttttttcgccatagaaattcctccttaacagcgaacgagtcaataattttattgtagcgataaaatacgctaaaataaagagactcgcttattaaagaaaggatgcgatcaaatgctgattggctcacacgtcagtcttaaagcgcccaaaatgctgcttggttcagctcaagaagctgccagctatggggccaatacgtttatggtttatactggcgcgccgcagaataccaaacgcaagccgctcgatgaaatgagaattccggaaggtcgggcctatattgaagagcatggctttagtcatctggtagttcatgcgccttatatcgttaatctgggcaatacgctcaaaccgcagaactttgcttttggcgttgagtttctccgccaagaagttgaacgggccgcggccattggtgccacgcagattacgctgcatcccggagctcatgtcggtgctgggaccaaagcagccttacatcagattgcgcaaggattaaacgagattatcacgcccgatcaaaagccgcagattgcgattgaaaccatggctggtaagggaactgaggtcggtacttcatttgagcagattgccgagatcatggatcaggttgtctataacgaaaagctctcggtaacgtttgatacatgtcataccaatgatgccggctatgacgtcaaaaacgactttgatggcgtcttggaagaatttgatcatgtcttgggccttgaaaagctgcaggtcattcacttaaacgattccaagaatccacagggcagccataaagaccgccacgaaaatctagggatgggaacgattggctttgaggcgcttagttatattgcccatcatccgcaattggaacaggtgcccaagattatggagacgccctgggttccactggccgataatcctaaaaagaaagtcgctccttatggcgaagagatcaagatgatcacaaacaatcagtttgatccaacttttgtggaacgactaagccattctgaaaattagttgaaattttttcaaaaaagcagttgacgctctttttcggattaagtataatatcattcgtagtgataagattgaagcagtcaattagacgcttttaatcgcaacagtacggaattctaagctcggagggagggaatcaacaatgtcaaagactatcgttcgcaagaatgaatcgttagacgacgctcttcgacgctttaagcgtacggtttcacggaacggaacgctgcaagaataccgcaagcgtgaattttacgaaaagccaagcgtaaaacgtaagttgaaatctgaagcagctcggaagcgcaagaacaagcgccgtcactagaatgctgcagctcctgggcgaatgtctcattcaccaggggcttttttgtataatttagaaaaacgggaggaacttgaaatgagtctattggataagctgactaaagacatggttgccgcaatgaaggctaaggacaaggaaactctgagcacggtccggatgcttaaggcttcggttcaaaacgaaaagatcaagctggggcatgaattaagcgaagaagaagaaaattcgctgttggcgcgtgaatacaagcaacgcaaggaagctttggaagaattcgttgctgccaagcgtcaggatcttattgacaagaccaaggctgaaatgagcgttgttgaaaagtacatgccaaagcagctttctgatgacgaaatcaagcagatcgttgctgaggccgttcaagctacgggtgctgacagcatgaaggacttcggcaaggtaatgaagtcggttatgccaaaggttaagggcaaggctgatggcaaagtggtcaaccaaaccgttaaggatgccctgcaaaaataaggcattaatgtaccggattgctgatcaatcaagctattgatcaagatgataggcactgtccgatttgggcagtgcttttcttttgccatgttgcggtttatgcgcattgcagccggctatgttataatttttgatggtattgattaaatcaaaagcaaaggggaaatcttcgtttgacagaaatgacttttcgcattgaaagccctgaagttgaattgggacttttgggcgcgcaagacaaattcgtggtgcttttagaagaaggcatgaacgtaaccatcaatccgtttggtaccgatctgaaaatcagcggtgaagatgaggacgttcatctgacctatgacgttttagagcagctggtagatctgctgcatcatggcatcagcttaagcagcacggatatcgtcagtgcgatgaagatggctcgtcgcggtacgctgcagtactttggcgatctgtacagtgaaacgattattaaggatcgcaaaggccggtcgattcgcgtcaaaaactttggtcagcgtcagtatgtgcatgccatcaaggataatgacattacgtttgggattggaccagccggaacggggaagacgtatctggcagttgccatggccgtagctgctttaaagcgtggcgaggttgagcgaatcatcctgacgcggccagccgtagaagccggtgagagtttaggttttttgcctggtgacttgaaggaaaaggttgatccatatctgcggccaatctatgacgcgttaaatgagatttttggcgctgaccacgtggaacgcctgatcgatcgcggcacgattgaaatcgcaccattagcatacatgcggggccggacgctggataatgcctttgtaatcttagacgaggcacaaaacaccaccaatgcgcagatgaagatgtttctgacgcggcttggctttggttcgaaaatggtcgtcaacggtgacgtctcacagattgacttgccaaggggaactcgcagcggtttgatctcggcaccccgaattctgcagaacgtaccctcaatcgaattcgttcaattcagcgcagcagatgtggttcggcatccagttgtcgcccgcatcattacggcctatgaaaatgatgagcaacagactttggagaaaaaataatggatattgaaatctacgaccaaaccggtgaccatgccgtcagccaagatcaattgcagctggcgcacgatattttggaatatgcggccaagtgccttgagttaaaggacaatacggaggtttccctgacgtttgttcacaatccgcaaatcagagaactgaatgctcaatatcgcggcgttgatcgggcgactgacgttttaagctttgccttggaagacgacagtgacgactcgccgatcttattggatccagaactggctgcccagatcccagaaaatctcggcgatctgttcatctcgattgataaggttggcgagcaggctaagtttttgggtcattctaatgatcgtgagctgggctttttgatcgtgcatggctttttgcatttgaatgggtatgatcatgaagaaaaagccgatgaagaaaaaatgtttaagctgcaagaggagattttaaatggctatgggctcccaagataaacatcaggtcgaaaaaaatcgtcatttcatccaggcgctgggacatgcctgggatggagtcaaagatgtggttaaaaaagaacgcaacatgcggttccatatcatcgcggccgttttggtgattatcgtggcctttttgatgcaggtcagcgtttttgagtggctgtggctgctgtcggcaatctttgtcgtgtttgcggctgagtttgccaatacgatcgttgaggagctggttgatctggtcgtgcaccaccactatgatcttgatgctaaatacgctaaagatattgccgctggggtcgtcttgctggcggctttttacgcggttttggtcgggctgctgattttttggccgcgcttcaagaatttgttaggcatttaggaaagggaaaaatatggacaatccaaattttaaatctggtttcgttgctctgattggtcggcccaacgtcggcaagtcaacgcttttaaactatgtcgtcggacaaaaggttgccatcatgagcaacgttgcccaaacgacgcgtaataagattcaagggatctacactactgatgaggctcagatcgtcttcatcgacacgccgggggtccacaaaccgcagaccaagttgggcgactttatggagcgctcaacgctttcggctttggatgaggtcgacgcggtcttgtacgtggtcgctgctgatgaaaagcgcggtcctggcgacaatttcatcatggaacggcttaagcaggtacaaaagccaatctatctggtcgtcaataagatcgataaggtgcatccaaatgagctgccggcaatcgtcaagcagtttgaggatggcacggttaaatttgccgatgttgttccggtttcagcattgaatggcaacaacgtcaatgctttgatcaacaagttggtcgaccagctgccaaatggtccgcaatactatcccagcgatcagatcagcgaccaccctgaacgtttcgtgattgccgagatgattcgtgaaaaagtctttatgctgacgcgccaggaagtgccgcattccgttgccgtggatgtgatgtcggttaagcgtcaagatggtgagacggtacacatcaatgccaatatcatcgttgagcggccgggacaaaagggcatcatcatcggtaaaaagggccagatgctcaaacagatcgggaccatggccagaaaagacatcgagcatctgctgggcgatcgggtctatctgcagctgtgggtcaaggtggttcccggctggcgcgataaatcggcaatgctcaaagactacggctaccgcagcaacgactattaaaaggagctgagagcatggcgcgggaaaatacttcctttgccggcatcgtaatgtatcggcgcccgtataaagaacgtgatctgctggtcaagtttttgactgacaagcgcggaccgatgatgttttttgtgcggggcggcaatcgttcgcatgccaaaatcaccagcgatattctgccttttactcatggacagtataccggctggctggctgatgatggctcgctcagttatctgagtgccgcgcgtgatacgcgtcaatacgttcatctgggcgaagatcccctgcgcagtgcctatgctacctatattcttgaattggtggatgcaacatttgaagagggccgatcgattggcggttggtttaatcaagtggcggccgcgctcgaactgatcgataaagggcaggaccctcagatcgcagccaacgtcttagaagtgcagtttctgcctttattgggagccgcgcagacttgggattgctgcaccatctgtgggttgaacgatcgcccgctggatttttctgagaccaatggggggatgctgtgcagtcggcactggaacttggatgagcgtcggtttcacttggatcgccggacggttggctatctgcagctgtttgcctctttgaatctggcccaggtcaatcagattcaggttgatcaaagcgttaagaatcggctgcgctatacgctggatcggatttatgacgatgagctcgggctgcatttaaagagcaagcggttcattgatcaaatggcgacctgggaaaatcaattgaaaaatcttcgctctgaaaattgacaagcgtaaagtagttgtctatgataaaagagcaactaaatttaaatctaatcgacgatgacaaagaatcgctgcttactgtcgaaccaaagcgatcatgggatggtggaagccatgataacgatcaagcagcgtggcactttaacagtcgcttaattaagctgttctgcatgtctaaggtgcagaaaagcagggtggaaccgcgaattaacttcgtccctgcaatgaccagtccagctggccattgtaggggctttttacgttgaaaggagtcagattatgtcaaagaaactcaccgttcaagagattatttttactcttgaaaaatattgggccgaccaaggctgtatgctgatgcaggcctacgacaacgaaaaaggtgccgggacgatgagcccatacactttcctgcgggcaattggacctgaaccatggaacgttgcctacgttgaaccttctcggcggcctgccgatgggcgctacggcgaaaaccccaatcgtctttaccagcaccaccagttccaggttttgatgaagccatcaccagacaatattcaagagctctatttgggcagtttgaagcagctgggcattgagccgctggaacacgatattcgttttgttgaagacaactgggaaaacccatcaatgggctgtgccggtgttggttgggaaatctggctcgatgggatggaagttacgcagtttacctatttccaagtcgttggtgagctgcagatggatccggtagctgccgaggttacctatggcctggaacgattggctgaatacattcaaaacgttgacagtgtctatgatctggaatgggcagccggcgtcaagtatggcgacattttcaaggaaccagaatatgagcactccaagtacagttttgaagaaagcaaccaagacatgctgcttcaagaattcaatgactacgaagccgaagccaagcgtctgatcaaactgggactggttcacccggcatatgactatgttttgaagtgcagccacacgttcaacctgctggatgcgcgcggggcggtttcagtaacggagcgggccggctacctgcaccgaattcggatcatggccaagtcgattgccaaggcttttgtcgaagaacggcgcaaacggggcttcccattgattcatgatgaaaaggaacgccaggcaacggtcgaaaaatacaccaagctggctgaaaaagcagcggcacgggcggccaagcaagctgccaaggccaagaaggaggacaagtaaatggcacattcatatctgttggaaattgggctggaagaaatgcctgcgcatgtcgtaacgccaagcatcaaacagctgcacgaacgcgttgctcaatacttaaaggaacagcgcactgactttgcaaagattcaagaatttgccacgccgcgtcgcttggctcttctgattaccgggttagccgacaaacagcctgatgtcaacgaatccgttaagggcccggccaaaaagattgctcaggatgcagatggcaactggaccaaagcagcgattggctttacgcgcggtcaaggcgtcagtgttgatgacatcgagtttaaagagatcaagggcgttgaatacgtctacgttgaaaagcacgttgacggcaagccggttgctgaggttctgcccggcttaaaggacgtcatcgaagccatgaacttcccaacgatgatgaagtggggtcgtcactcattgcagttcgttcggccgattcgctggctggtatcgcttttggatgatgaaatcgtgccattttcgatcttggacgtaacggctggccgcatgacgcgtggtcaccgtttcctgggtcatgacgtggagatcaagcatgccgaagactacgaagctgaactgaacaacgactttgtgatcgccaatcaaaagcagcgcaagaacctgatcaagtctcagattgacgacatcttggcggaaaacgactggatcatcgactgggatgaggacctgctggaagaagtcaacaacctggttgaatggccaacctcatttgccggttcgtttgatgaaaaatatctggtcctgcctgaagaagtcctgattacctccatgaaggacaaccagcgcttcttctgtgttcgcgatcatgagggcaagcttttgccacactttatcgcggtccgcaatggtaacagcgaatacctggaaaacgtgatcaagggtaacgaacgggtgctggtaccacgtctggaagatgccaagttcttctatgaagaggaccaaaagattacgattgaccaatacgtggctcgtttaaagaaggtcagcttccatgacaagatcagctccatgtatgacaagatgggacggacggcggtcttggccaagctgcttggtcaaaagctgaaccttagtgatgaagaaatggcagaccttgatcgagctgctcacatctacaagtttgacctgacgacgcagatggtgggtgaatttgctgagctgcaagggatcatgggtgagatctatgccaagctgcttggtgaaaaagctgacgtcgctgcagccattaaggaacactatatgccaatctctgctgaaggcgagctgccagccggcaagatcggcgcggttttggcgattgccgacaagctggacagcatcatcagcttctttgccgttgatatgattccaagcggctccaatgacccatatgcactgcggcgacaggcttacgggatcgtacggattatcgctgcgcgcggctggcatctgccggtaatggggatggccgatgaatttgcagaagcattggcagctcaaggactgacgccggaatttgacgtttcgcacaatgctgatcaggtacacgccttcttcttggatcggctcaagcagttcttcaacacgcaggatctgcgctatgacgtgattgatgccgttgtggataccaaatcggctgacattgccaacgttctggcagcagccgagacgcttgacgcgcacaaggacgatgatggctttaaagaagacgttgaagccttgacgcgggtactgcggattgccaagaaggctgactttaaggatggcgtaccagcagttgatccggccaagttccaaaacccatcggaaaccgagttgtttgatctggtggcttccttagacaagaagtgggatacgcagacgctggcacaaaactttgccgatctgcgggcaatggcaccagccatcaccaactactttgaagagaacatgatcatggacaaagacgaaagcatccgcagcaaccggctggcccttttgcagcagctggctgatgatgtctacgcacttggtaatcttgacaagctgatcgttaaatagttgcggtttatcaagcaaatgaattgtattgttccagacttgtggtatcatgttaaataggtatattaggtagtgtctagaagcagatgctgcctgaagtcgttgaaggtcgcattccatctggaggcgaccttttgctactattcgcgggaaatggggtgaacgaatggcgcgactttcacaggaactgatcgatcaggtgcggcagtccgttgatattgctgacgtcatcagtcaagacgttcagctgcagcggcaagggaagaacctggttgggcactgtccgtttcacgaagataatacaccatcattttcagtcagtgagcaaaagcagttcttttattgctttagctgtcatcgctcgggttcagtattcgactttttgatggagctgcatcacctatcatttccgcaagccgttgagcaggttgccaagctgggcagcgtagccttgccaactgattttcaagccggtgccgaacctaaaacggaacaggcaccggattcgcagcaggggcgcttgattaagctgcatgaaacgaccatgcgactctatcatcatattttgatgaacacgccagctggagagcctgcccgccgctatctgcaaaagcgcggcctgactcaagagcagatcgatcagtttaatctcggctatgctcctaaagaagaggtcttaaaggccgttttggaaaaagaaggacatgactatcagctgctgcgccgatcaggactgtttaccgaggatcgctccggcagtctgcatgatcgtttccatgatcgagtcatgtttccgctcaaagatgggcagggacgaccggttgccttttcagggcggctattgcaaaaaaatactgacgcgccgaagtatctcaacagtccagaaacgccgatttttaacaagcgtcgtttgatctttaattttgatctagccagaaaagcagccagagaaaatgggaaactgctgctttttgaaggttacatggatgttatttcagcatatggcgccggtgttcataatggcattgcctcaatggggaccagtctgactgatgagcagctggcgatgatcgtcaagacgaccaatcagctgaacatttgctacgatggcgatgcaccgggacaaaacgccattgagcgggcgctgaagctgatcgaggccagtgcggttgccaatcagcttaagattcgcgtcgtgcagctgccaaccggacaagatcctgatgaatacattcagcaaaatggcggtgctaagtttcgcgattatctgaaaaataccgaagaaacaccgactgcatttcgcttgcgctatctgcggcaaggactgaatctgagcaatcaggccgagcttttgagctatttgaatgcagcaatcggcgtaattgccaaggtcggtgatccggttgccagagatctgtacgtacaggaattggccagggagtttcaggtcaatccgcaaaatcttcagcagcagctaacgactcagcttcaaacacagccggctgctcagccaggtacggcaccgtcagcatcacaatggcctgataatccgccggctgtccctaagcgtcggtcgtttaatggatcgtttaacaagcgaccggcttacggccaaaagcggcgcgtccaagcacaaccagcaccacaggcagtcacgctgacggcagccgagcagcagtcattggcacttgatcaaacagagcgggcagagcgcttattattgacggccgtgctccatgactatggcaccagggctcagctgaaggcaatgcctgattttgcctttgttcatgatcagtatcaggaactctatcagcaggccttgaattattttaccgagcatgatgagtatgatttagccagttttttagactacgtggacgatccggctttaaaagcgactttaacacagctggatggcttgaatgcagcagcagtttcaccggctgcaattgacgactgtctacgcatcatcatgcaaaagacacctttaacacaaaagatcgctcaagccaaattggcgctgcaggaagccaaggcacggagcgatcacgaactaatcacccagctgacgattgagctcattcagctttatagtcagcagcaacgattaaaaacggaggagactagttaataatggcaaacagcaaaaagaaagacatggtaatttccaacaaagccgactttgatcagactgaatacgacaaagccgtgggcaagctgatcagaagctataagaaagccaaggaaattcaatacgatgacttgactgaccagatcgcgactccgtttggcttgaatgcccaaggaatggataatctgcttcaaaacgttgaagatgccgggatcagcgtcgttgacgaaaagggtgatccagatccgcgcgctttgaaggccacggaaaaactgtccaacaaggccttaaaggataccgctgccccaaccaacgtcaagatcaatgaccccgtacggatgtatcttaaggaaatcgggcgggttaacctgctgacggcggacgaagaaattgctctggctcaacggatcgaaaaaggcgatgagcaggctaagcaggaactggcggaagccaacctgcgtctggtggtttccattgccaagcgttatgttggccgcggtatgcagtttttggacctgattcaagaaggtaacatgggtctgatgaaggccgttgaaaagtttgactaccggaagggattcaagttctcaacctacgcgacctggtggattcggcaggctattacgcgggcgattgccgatcaagcgcggacgattcgaattccagtgcacatggtcgaaaccatcaacaagctgatccggattcagcgtcaattgctgcaggatctgggtcgggaaccgctgcctgaagaaattggtgctgaaatggacatgccaaccaagaaggtccgcgaaattctcaagattgcccaagaaccagtctctttggaaacgccgattggtgaagaggatgactcgcatctgggcgactttatcgaagaccaggatgctaccagtccagctgaccatgctgcttatgaaatgatgaaaaagcaattggaaaacgtcttggatacgctgactgatcgtgaggaaaacgtcttgcggctgcgctttggtcttgatgacggccggacgcgtacgctggaagaagtcggcaaggtctttggcgttacgcgggaacggattcgtcaaatcgaagctaaggctctgcgtaagctgcgccatccatcacgttccaagcaattaaaggacttcttggaataattggcttatcttgataattgataataaaaggtctgctcctgaattgaggagcagaccttttgtcgtattaataataattcttacttcaggctgtcaggcaggttaagcgtagtctcagccggggtggtcttggccagcaccttaccacggcgaatgttgtagagaacctcaacgtgcttgtttaaagcgttgtagaagtcttcagcgttcaacaggatgcagttggcttccagaccttctttaatgccgtaacgatcagcaatatgcagcgtcttagcggcattgtaggttacgaacttgaatgagtcctgcagctggctgtagcccatcagatgagccgcatagactcccattgaaacagagtccagcatgttgccattaccaagcgggttccatggatcctgaatgtcgtcttcaccaaacgaaacgttgatgttggcagcatccagctctttaatccgggtcagaccgcgccgctttgggtaggtgtcaaaacggccgcccaggtgcatgttaaccagtggattggagacaaaattgatgtttgacatcttcagcagccggaacagcttgtaggtgtaagcatcattgtatgatcccatcgctgtcgtgtggctggcggtgaccatgtcggcaagaccggtcttataagccattgttgctaagacttccaggttgcgagaagccggatcatcaatctcatcacagtggacgtcaaccagcttgtcgtatttttcagccagcttgaccaggaacttaactgatttccagccatattcagttgtaaactcaaagtgcggaataccaccaacgacatcggcgccttccttaacggcctgcttcatcagctttttaccatgcgggtaggagagaatgccttcttgtggaaaggcaaccaattgcagatcaaccacatcctgcatctcgtgctttaattccaaaagggcctgtagtgcgatcagatgcgggtcagttacgtcaacatggctgcgcacgtgttgaattccgtgaccgaccatattgagcagtgtctttttagcccgctgcttgacgtcttgaatggtgagatcctttttgcgttctgaccagatgcgaatcccgtcgaacaaggtaccggtttcgttccattctggctggccggccgtcagcgtggcatccaggtgaacgtgagagtcgataaatggcggcagcagcaccttgccttggccatcgatgacttcttcgcctggtttagtgctcagaccaggcttgatggctgcaaacttgccatcttcaatccgaacgtcaacggcatctttttggttatctacatgaacgttttgaatcagcatagattaagcgacctttcgattaaaaattagcattaagacatagtagatggcaccgctgatcagcatgaccaaaaacgttgccccaatcgtgttcttgagtgcagcaacgttatgcagcattaagaacagtgccgtaccgatgatccaggtaactacggctgaccagttgattccgtgcgagtaccagtagctgccgtttttcttggccagctgcgtgacgtcgtatttctggtggcagcgcagatagaagtcggtacagatgatggcgatgattggtcccagtaccatacctacataatccaagaaagcggtaaacgtgtcaaggaaactgccaacaatcattggaataaaggtaacgatggtggcgacgatggcaacgatccaaagcgagtacttcagcttgatgttggtgaagatgttggaaagtgccgagccggctgccagcaggttaacggcattggcggtcatcgaagtcaggatgataaccagcagcgcaacgacccctagccccagccgactggcaatcgtacttggatcggagttgttggcattataggcaccagaggtaatggcgatactgatggttgagatcaagccgataaaggcaaaccagattaccccgaccatggcaccgaaaaatggcgtcagcgtcgcattgtgcttctttggcgtgaaacgagtgaagtcagcccctgccgtaacccaggccagattgaaggccgctacatagtcgatggcggctccggtagccattttggcgctggctgggacctgccatttaacgatatgcgagaatgggacggtctttaagacgactaccgattcccagatgacaaagatcaaaaccaggatgattcccaaacgctcaatcatctgaacggaacgcgagccgctggcgatactgatgatatgtaaaatactcattaccacgatcccagccacgatgcctttccaaccgcctggcttaccccagactggccagccaagcaggtcgtttaaaagcagactgacggattgggccgcgataaacgtattgacggctgtccagccaataaactgcgtcaggttgaccaaagatggcagatagctgccgcgcaccccgaatgatgcccggctgacggccatggtcgagacaccggtctgatagccgatgtagccaatcagactcaagaagacgtaagaaagtgccgatgacagaaccagcacgttcatggcgactgaaaaaccgcaagctgccaaaaccccgccgacaaaccacgtgccgttattggcattggcaccaacccaggttgcaaacatatcccaggttgaggttttgcgttgatgcatcgcgatgctggtaatctgatcattgtcgttttgcatggtgttacccccaaagaaaaatcgtcactggccaagtgagaccagtgacgatgcaaataatgtcctccctaaaaaagggcgaagattttattttaacgaacatccttggaggcctcacgggaccagattaaaggttgaataataattgataaactaagtgtaaacaatattaatgttcgttgtcaatgcttattttccaatttgtagatcattaacgtgcggtaaatctgcgacaaacttttcataagccgtttcttcaccagttgcgctggtctgagcatccgcaaagcttgcttgatgcagctcggtttcggcaaccgtaacatgatgcgtgaaggtggcgttgccgaccagttcaatccagtagtgatcagcttggtggtgaacgatggtcttgaccatgccgccagggttgtagatggtcattggcacgtcgaaatgcgccagttcaggatgcgtcagcgcgaaggccaatgaggttgctgacatcccggtcccgcaggcattggtaaagccgacgccgcgttcaaacgtccgtacgaacagctcgttttcattcagaatctgggcaaagtttacgttgacgccatcagggaaatatgggttttgaccattcagtcgttcacctaagacgcctaaaacgttatcggacaattcagcggctgaaacaaaactgatcagatgtggattaggaaccgcgatgctggtaaaacgcagtccaggaataaactcgggaaccagcgtatcaagcagccgttcatggcccagattgtcaaacggcagtgcttctttgttaaagcggacgggtgagatctcaacggcaaaagcaggtacgcccggcgcaaaatcaggctggcgccgaacaagcaggttggcatcgcgcgtatcaacctggaactcgtcttgatcaaatttttcggccagatagcgggccacggtacgcagcccattgccgcacatggatgcttcgctgccatcggcgttgatgacacgcatttgcgccagggctccggctttagttggctgattgacaaccagaatgccatccgcgccgcctaaaaggccagtctggggattggtgattctaggagcaagtgtctgcagctcagcatcggtgagtggttgttccagcgttgtctgatccaggataaagaattggttttgcgatccatgaacctttagtagttccgtcataaaaatacctctttgtctgattaatttgcgaagaattgatgatagatgacctggacggctttatcggcatctgcccgcttggtccccagcatgattgagatctgagaggccccttggttgatcatctgcagcgagatgtgagcatcggctaatggctgcagaatgccggcagcagcgccaacgcgatcacgcattccttcaccgacgatcatggtaatggagtagtcgtcaatccattccagacgatcgggattgatcttattttgaatctcatcgcacaaaacgtcaatcaattgatcattcaaaaactttttgtcaaagataatcgaaatatcatcgatcccagatggcatgtgctcataaggaacgttgtgcttttccaaaatatccagaatacgcagggtgaagccggcttctttgtttaagagatacttgtgcagataaagtgccgaaaaatgcttgcctgaagcgacaccagtgatgatgttttccggcttgaagcccttttcgggaacgatcatggtaccaggcttttctggggcatgcgtgtttttgacgttgatgggaatctgcccttgaatagcaggaatcaaggcctcatcgtggaagaccgaaaagccggcataggaaagctcgcgcatctcacggtaggtcatcgtacggattggctcaggatcgtcgaccacgtttggattggccgagaagattgcatccacgtcggtaaagttttcgtacagccgtgcgtgaaagccccgggccaggatcgcgccggtaatgtcagagccgccccgtgagaacgttgcgatatgaccagaaggcgtaatgccaaaaaatcctggaaagaccagccgatcatagacctcatacttgaaaccggccagattgcggtaggtttccggattgacgattgcgtcgttgggtgcccctgtaaccatgatgccggcttcagttggatcaacgaaccgtgccttgatgcccagatggttcataatcattgcgatcagccgggcattaagccgctcaccgtgggccttgaaagcggccagcagatattcatcgtttgggtagtcttttttaggcagatcaaccagcagttccttgatgatcttgattttttcatctggcagatcaaaaaagtgaccgatcgtttcgtagcgttcgaaaatctcttgaaccgtcttggcggtatcttctccgttgatcgtttcattggcatagcggatcaaaaggtcggttaccttgatatcgccgtcgtgtcgtttaccaggagccgaaaccacaacgatttgacgagctgggtcagccgtgatgatgttcaatgcctgtttaacggcagcccccgtagccaatgaggtaccaccgaactttacaactttcatattacagactcctttgtgcgttgaaaataataaagaacgcgaattaatttaataggattctaacatttattgacatccttgcaagtctgcttttttaaaattcgatagcataaacgttttacaaatcatagtagaaaaaataaatgagaaaaattatcagaatttacttgacgattattaaacttaattatagactaactattaaatcgaagaggcgcagtcaacatgagtaccgtatgttagtcgcagaccagacaatgatcgtacgggaaaggggcgattgccgaagctttcagaccgggtcgcggcttgattgctggggcgtggctgaacaagtcacggactgtcgcggagaaaaacttcgcggagcgctatcgaccaatcagattaaatttgacaacagccgcagtgggtggctttttgaaaatgggatccgttgtttgtgtgcgcacgaacaatggattttttcttagcgttttccccgtcagaacaacggaggttttagattatgaattctcagattgcaccggatcagatcaacgcagcaggtcatttgacgattggcggtgttgactcgctcgaactagccaaggaatatggcacgccgctggtagtctacgacgtggcccagattcgccgccagattcgtgcttttaaaaaggtgtttgagcagcgccaggttgactacgcggtcagctatgccagcaaggcgtttgccgcgattgccatgtatcaggttgtagctcatgaaggcggtcatgttgatgtggtttcggccggtgagctctatacggcaatcaaagccaacttcccaatggaaaacgtatcttttcatggcaacaacaaatcgcgggccgaattagagatggccgttgatcaccatgtgggcatgattgtgatcgacaacttccatgaaattgagctgcttaatgaagtactggccagtcgtgatcagtcaatcgacgttatgatgcggatcacaccggggatttccgcacatacgaataagtatattcaaactggtcaggttgacagcaaatttggctttgatctgcagtccggtcaggctgatgaagccctgcaaaagattctggccagtccacgaatgcatatgaaagggttgcatgcccatatcggttcgcagatttttgaattaaatggctttcagatggcggctgctaaattggttgagattgcagctcactggcgcgacgagtttggctatgagccagaaatcgtcaatgttggtggcggcttcgggattcgctacgtcagcgccgaccatccattgaagccagaagattttgtggcagcgatcatcgaaactattaaggaagaaacgcaaaagctgaatctgaagatgccggctgtctggatcgaaccaggccgctcaatcgctggtcccgccggctataacctttatacagtgggctcgcgtaaagacgttcccggcttgctgccatatgtcatgatcgatggcgggatgggcgacaacattcggccagcgctttatgaggcggaatacgaaacggtgctggctgccgatccgcaggcggaaaacgctgaaacggtgcggctggccggtaagtactgtgaatcaggcgatattctcagtcagcatcagccactgccaaaaaccaagccaggcgatgttttggcaatgctggatacgggagcctatggatatgcgatggcttctaattataaccgcaatccgcggccggcagtggtctttgctgaaaatggtcaggctcacctggtaattgaacgcgaatcgcttgacgatctggttcatcttgaccgttcctacccacaagcctaaatcacttttaaaataagatattaataatatagtagaaaaaagattggagttaatctaaatggcacaattagacgcacaaagcattatcaactacatcggcaatgcacccaagaagacgcccgtaaaggtatttgtcaagggtgatctggctgccatagacgttccggaatcaattcaaagctttttagaagcccgtaccggcgttttgtttggcgactgggccgacgttaagccattcttgactgccaatgctgcgcagattgaagactatcgcgtggaaaacgatgcccgcaattcagccgtgccgctgctggatctgaagggaatcaacgcgcggatcgaacctggtgctttgattcgggatcaggttttgattggcgacaatgccgttatcatgatgggggcaatcatcaacattggtgcagaaatcggtgccgactccatgattgacatgggcgcggtgctgggcggccgggcaatcgtcggcaagcattgtcacgtcggcgcgggcgcggttttagccggcgtgatcgaaccagcctcagctgaaccggtccgaatcgatgacaacgttttgattggtgccaatgccgtagtaattgaaggcgtgcatgttggcgaaggggctgtgattgctgccggtgccgtcgtaacccaagacattgctcctcacacggtcgtcgccggtgtgcctgctaagtttatcaagaacgttgatgacaagaccgaatcaaagacgggcctggaagaagacttgcggaagctgtgatgatcgatgacagaattaaatgaagcacaattaatcaagattcgccgcgatctgcatcagattccagaactggcgctgcaggaaaaacagacgcatgcctatttgttggatacgattaaagggtttaaccagactcatctggagattcgccaaccggaaaaattgccaactgcattgatggtgttggtacacggtagtcagccaactagaacgatcggctatcgaaccgatatcgacgcgctgccggtagcagaacagaccggcctgccgtttgcttccaagcatcccggcgtcatgcatgcctgtggccacgacatccacatgacggttgcgctgggggttttaagctggttcagtgagcatcagccaaaagacaatctgctgtttttcttccaaccagccgaagaaagcgaaaacggcggcaagctggcctatgagcagggactgtttgatggcaagtggcgaccagatgagttctacggtctgcacgataatccggacctgccggctggcgcgattggctgtcgcatgggcacgctgtttgccggcacgactgaagtcaacattgatattaccggtaagggcggtcacgcggcctttccgcaggatgccaatgatacggtcgtggcgatggcgtctttgatcatgcaggttcagacgatcatttcacgcagcattgatccgattcaaagcggtgtgattacgctgggtaaggttgaagccggcacgatccgcaacgtgattgccggtcatgcccatctggaaggcacgattcgcggtttgacgcaggaaatgattttgaagatcgatcagcgtttaaaagacgtctgcgaaggaattgccaaaagctttaacgttaaagttgacctgcagttgaatcaaggtggctactggcccgttgaaaacaatcccgaactgaccaaacgctttattgaatatatgaagcaggctgctggcgttgaatttatcgaaactgcgccggcaatgaccggtgaagactttggctatctgctggccaagttccccggcaccatgttttggctgggagttgaagatgactcacagttgcattcggcgaccttaaaaccggatgaacgcgctattaaacggggcgtggatgctattaccggatttttgaactatcgtatgcaaaactagggggatttaactatgaatttacaagatgctgatttgttaaccgccatcgtaacaccatttaatgaacaaaatgaattggactttgccagtttggccaagctgaccaaccatttgatcgaacagggcagcaacggttttgtcattggcggtacgactggtgagacgccaacgctcagccatgacgaaaagctggcactgtatcgtgagtttgctaagatcattgatggccgtgttccggtgattgccggcactggcagcaacaatactgccgaaacgattgcctttaccaatgaggtggctgagatcgaaggcattgactatgcgctggtcgtggtaccgccatacaacaagcctaatcagcgtggcatgattgcccactttacggcggtagcagatcagtccaagttgccaatcgtgatctataacattcctggtcgaaccggcgttaagatggctgccgaaacgatcgtggagctttcacatcatgaaaacatcaaggccgttaagcaatgtgcctcgctggaagagatgcagtacgtgatcgatcacaaggacgaggatttccaagtctttaccggcgaagacgctcaagcattgacggcgcgcgtcttaggagctaatggcgtgatctcggttgcttcgcataattactgtgcccagatgcgggaaatgtatgatcaattgtataatggtaattggcaggcggccgcacgtctgcagcgctggctgacgccaagaatggccgcgctgttcatgtacccatcaccatcaccagtcaaggcggtcttaaacgcgcaaggctttggcgtgggtggctgccgtctgccgattgctactctgaacgacaacgaaaagcagcagctggcacaggcgctgtcattgcctgccgatgcgctggctcatgagttgccattgaatcttggaaagggtgatgttgatgactagtgtactgatcgccgggtttgctggtgcaatgggacaaaaggccgttgatctggtcaatggcatggcggattttcaaatcgttgccgctttttcgccacaagccgaccgtaacgatccggaacgctataacttaaatgacgatgtccagatctttaatgatttagcagcgattcccgatcaagcagctgatgtctggatcgactttactgttcccagtgcggtttatgaaaacgtcaaattcgcgctgaatcacgggatgcgccccgtggttggcacgactggtctgactgatgaacaggaagccgaactcaaggcccttgccaaagccaatcatttaggtggcctgatcgcgcctaactttggcatgtcggcggtcttgctgatgaagttcgcccaggaagccgccaagtatttcccagacgtcgaggttattgaaatgcaccatgccgataagaaagatgcaccatcaggaacggcattgagtacggctaagatgatggcacaaaatcgtcagccgcacgaaagcaatccagatgaggtcgaaacgctggccaacgtccgcggtggcgactatcaaggcattcgcattcactcggttcgtctgccgggctacattgcccacgagcaagtgctgtttggcggccctggcgaggcattgaccattcgtcaggattcatttgatcggggctcgtttatgagcggcgttaaggtagccttgcaaaaggttgcgtcgctggatgaactggttgtcggtttggaaaatattctttgatgtaaaggggaaatttgtttatgccaactctagcaaaagatcttaatgaaacggtcaacccacgcgtggccgcaatctcaccatctggaattcgctcttttgatgcgcacgtctctaagattccaggcatcgttaaactgacgattggcgaacctgatcttaacgttcctgaacatgttaagcaggcagccgtgcaaagtattgttgaaaatgattcgcactatacctccaaccgcggcaagattgaattgcgaaaagccatcagcggctatctggaacggacgcgcggcgtgcactatgacccagaaaccgaaatcgttgctacggttggtgcgaccgaggccctggcagcgacgatcttttctctgatcaatgaaggcgacaaggtgatcattccaacgccggccttctcgctatatttcccgctggtttctctggcaggtgggacgccggtgcaggttgacgtttctgaggacgattttgtcttgacgcctgagctgctggaaaacgttttgaaaaaagaaggtccagcggttaaagccgttttgctgaactacccagtcaacccaaccggccgtgaatatccacgcgaagtgctggaaggcctggctaaggttattgccgatcatcatctgtacgtatttgctgatgaaatctacagtgatctggtttatggtgtggaacacacgtcaatggctacgcttttaccggaccggaccatcttcatctctggcctgtccaagtcgcatgccatgactggttatcgaatgggatattttgccggtcctaaagaagcgatcgacaacatcaccaagctgcattcattcttggtaacctcaattaccgactcaacgcaggcagcagctattgaagcctacaccaatggggatgaggatccggttaaggcacgggccatctaccaaaaacggcgtgactatgttttgaagtctttaaacgacatgggcatcgaaacggttccaccacaaggcgcgttctacatcttcgccaagattccagccagctatggtacggatgacatgcagtttgccttggatctggccaaggaagcccaggtcggcgttacgccaggtaatgcctttggtgctggtggtgccggctgggtacggctgtcatacgcggcttctgatgaggacctgcacacggcgatggaacgcatgaagccatttattgaaaaggttaacgcaaagaactaaaggagcgattatactatgagcaagcaatacaatgtcgcaattctgggtgccacgggggcggtcggcacgcggatgattgaacaattagcccagtctacgattcccgttaagcatgttaagcttttggcatccaaaaaatcggccggtaagacgctgcagtttaagggccagccggtaaccgttgaggaaacgactcctgaatcctttgacggtgttgacattgtattgtcgtctgctggcggatcggtttccaagaagtttctgccagaagccgttaagcgcggggcagtctgtgttgacaataccagcgcctttcggatggagccggatgtgccgttggtcgtaccagaagtcaacgaagccgctctgaaggatcatcatggcatcgtggccaatcccaactgttcgacgattcaaatggtaatggctttggaaccagttcgccgcaattttggcttaaagcagattgtggtttccacttatcaggcagcttcgggtgctggtcaatccgctttaaacgaaatgtatcaagaagcccaagactttttggatagcaaggacatgcaggcggatgctcatattctgccaaccaagggcgacaagaagcattatccactggcctttaacctgttgccgcaaattgacgttttggaggaatccggctactcgcatgaagaatggaagatgattcatgaaaccaagaagatcatgcttggcgacatgaattcacaagacattaaggttacggctacctgtgtccgcgtaccggtgccaatcgcgcatggcgaaagcgtctactttacggttgaggatgaatcggctacggctcaagatattatgcgcgtagtggctgacttccctggcaacgttttggaagacgatattgctcatcagatctacccacagccaatcaacgcagtcggcaagcgggagacgtttgttggccggattcgtcctgattatgaaaacaagggtgccttcaacatgtgggtcgttgctgacaatctgttgaagggcgctgcctggaatacggttgaaaatgccgagcgtctggtagcactgggtctggtctaagcgatgtcttgaaactagaatcaacttaaactgaaaatccgtctggctgattgcgggacggattttttgttatactggaaatataatttggaaccaggaaggaagatttatttatggatgccaaccatctttcattacgattggcgcgtgttgccagctatgtacctaaaggagcccgcatggccgatattggctctgatcatgcctatctgccggcacacctggcattaaacggacagattgagtatgccgttgctggggaggttgtcaaaggaccttttgaaaacgccgcgcatgagatcaagcagctgcagcttgacaacgtgattcagccgcggcttgccgatggactggcggcaattcaagctgatgatcgcattgatacgattacgattgctgggatgggcggaaccttgattgccaagattctggctgccgacacgcaaaaacttgccggagtcaagcgcttgatcctgcagcccaacgttggtggtgagcgcgtcagagaatggctcttggctaatcaatggcagatcatagctgaagaagtgcttgaagaagatgaccatatttatgagatcatcgtggctgagccttcgatcgttccatttacctataacgaccgtgagcttaagtttggtcctttcttattggaacaggatcagcctgcttttcgaaaagaatggctggccgagcttgagcgagagcaagttgccattgaacagatgaaaaaagcggcccagccaccagttgccaagatcaaggagtttgaacgcgagatgcagatgattaaagaggtgatcaaatgacgactggaaacgacattattcaacggtttgaaatgtttgccaatccggctttggctgaatcatgggatcatgtcggcctgcagctgggtaatcccgaacgaccggtcaaacgggtcatgacagcgttggactgccgcccagaagtcgttcaagaagcaattgaaaaaaacgttgactttatcttcaatcaccatccagccatgtttcatgccgttaagaccctggatgtgcgcgacccgcagattgccatgtatcaaacgcttttggagcatggtattacggtttatgcggcacataccaaccttgacaatgccaatggcgggatgaacgattggctggcggcccaattagagctgaccaacgttgagccgttgcagattacggggattgatccgatctcgggacgcgactgtggaatgggacggctgggcgacttattgcagccaatgagtccagcggcgtttggtcaatggtgtctggaaaagtttcagcttaatggggcccgtttgatcgttaatccagccgatcaaaagcagctgatcaagcgagtggcgattttgggcggctccggacaggatttttggcagctggcgaaaaagcgcggggctgatgcgtatgtaactggagatgtgagctatcactttgctcatgacatgattgccagccatttaacggtggttgatgccggtcatcatatcgaagccgtctgtcaggatcagctggccagtctgcttaaaaaatggcgccaggaaaacgactgggattttgagatcataacctctgagatcaatacggagccgtttaagtttatcgtcaaataggctgactttgcctgctctgtttattgaaaaagtgataaagttgacgtattggtagtaatgactaattcataaagaaaaggtgatcgatttgactgaagaaaaatattctgaactgctgccgcgttttttgaaatacgttcaagttgaaacgcgctcagatccacaatcagccacggtgccttccagtcctaaagaaacggcctttttaaaacagctggcgcaagagctgcaagacctgggactgagcaacgtgcgcattcatccgcaaaactcatatctgttggcaacgatccccagcaatcttgatcatgacgcgccggttgttggcttgattgcccatattgatacggcggactttaatgccgaccatgtccggccgcaggtgattgacgattatgatggtcaatctgacattgccttgtcggacagcggctaccagctttcaccggccgagttcccatcattgaaaaaatatgcgcatcagacgctgattacgacggatggccgcacgcttttaggcgctgatgacaaatcaggcgtggctgagatcgtaacgatggcgtcatatctgctgaagcatcctgaaatcaagcatggcacgattcagatcggtctggggccggacgaggagattggtactggtgccgaccactttgacgttaaggactttggggctgattttgcctatacggttgatggtggtccactgggagagttagagtatgaaacctttaacgctgctcaagccgagattacgattactggtaaggacgtccacactggggttgccaagggaacgatgatcaatgccattcaagtcggcatcgatctgcacaaccgtctgccagaacacgatcgtgctgaggagacggccggtcgcgaaggcttttaccatctctacaagttcaatggcggcgttgaccatgccgaaatgacctatctgattcgggatcatgatcgccaaaaattcgaagagcgcaagcagaatctcaaacagatcgttgcacagctaaacgaacagctgggtgaagagcggattcaaatgaagctttacgatcaatactataatttaaaggacgcgctcaaggatcacatggaagtcgttgcaattgccaagcaggcgatggagaatctggatattgagccagtgatctatccagtgcggggcggtacggacggctccacgatctcttatctggggctgccaacgccaaacctgtttgcgggtggcgagaacatgcactcgcgctttgagtacgtttctttgcagactatggaaaaagccttggatgttttgctggagatcgttaaactgacggcccagtcgtcgattaaatagctttcgttgtttaaggcataaaatccctgtcgcagctgagtggcagggatttttaattggaattggttgaaagcgctgtgatgattgattcattggtgatatgctttaagaaatagcctgaattggaaaggatgatgagtcatgcaaaccgttacgatcaatcagcgcgtattaccggcagtcggcctgggcacctggcacatgggagatgatcctgctaagcgtacgatggagattcaagcgctgcaggcaggcattaaagccggtgcgcaggtcatcgatacggccgagatgtatggcaatggtagggccgagcgtctggttgccgaagccatcaagccgtttgatcggcaagacctgtttatcattgacaaggtcctgccacagcacgcgagccacgcgcagctggagcagagtctggatcgcagtctaagaaacgttggcacggattattttgatttatatcttttgcattggcgcggacaggtcccattggctgaaaccgtggccgaactggagcgggtcaagcaggctggcaagattcgagcctggggcgtctctaattttgacgtggctgatctaaaagagctgtatgccctgccaaacggcgataactgcgcggcgaacgaagatctttataatcttgatcggcgggggattgaatatgatctgctggcctggcaaaaagatcaaggactgccgttgattgcctattcgccggttgcacaaggcgatactttgagtggtcggctgactgctgatccaacgctgcaaaaactggctgctcggcatcaggccacgatttatcagatcatgctggcctggaccattcgctgcggcaatacgctgacgattcctcagaccggcaaccctgagcatgcctggcagaacgtagcggctggcgagctggaatttagtgacgcggagttgttggagctggaacaagccttcccatcaccgcgccaaaaacagccgctggccacgatttagtcactgcaatcggaagcagctcaagaaaagtttagctgactttatactttgaaaatgatgtaaaaggcgtcgcgtcactaattaaaacgtgttactatggttttaaggatggagcggttgaatgaaatcgctccttttattattgggggagtagttaatgaaacaaaaaatactaaagctgctgctgatgccgctgctggcactgggaatcggcatccagacgccactaatgccgactggatcgcatccggtgcagtcaacagtcgttaaggcagccaaaaaacatcagtcgcagcgcgtaaaaaaacaggccgctgcgtcttccagccagtctgatgagcagctggctcagcttaactatcaaggaacgcagaccatcagcgtcaataatggtcagccggattttaccagtgaggatctggataccagtcatggcgcctggcagcaatacggcaatctggatcgcttaaatcgcgcaacgcaagccaacgcgctgctgaatcgttctttgatgcccaaagccaagcgcgagccgttaaacgtcacgcccactggctggcacaacaaaaagatcaaaggcggctatctgtataaccgctcgcatctgatcggctatcagctgacgggtcaaaacaacaactggaaaaatctgattactggaacgcgctcgctcaatgatcctgagatggttcgctatgaagatgaggttgccgactatctgcggacgcatcctaacgactatgtccgctatcaggtgacgccgatttttcggggcgatgagctgctggcgcggggcgtgcacatgcaggctcagtcagtcaacagtcaggccatcaagttcaacgtctatatctttaacgtgcaggatggcgtaacgctcaactatgctgatgggaccagtacggttgacaatagtgcccagaacgtcagctcaacgccggccgtttctaaaactgcaaacagtcaagcacccagccaaggcaataatgaccagaccaccgtctatgtcacgcctaatggcaccaaatatcatctgaaccgcaactgccgcgccctggcccgttccaaaaccgttgattcaatgacgcagggacaggcaattgctgatggctatacgctttgcggctttgagcgctaagcagaaaacaaaaagagcactgaagactttcagtgctctttttataattgctgagtaaaattatttagcagccttttctgggttagcctgctttgaaatcagggaaatgcagttggttgccaataatgctacaacaacggcaacaataccagtagttacgtaattaaccgtgcagctttccagttgaccggcaatgtagcccaaaacgtcacccagaataaagctccagataatgatcataatttctttgccaattgtacgcattttagttcaccccttagttggatacaaaactattctaacataaaaaatctgacttgagtattgataatctaaggcattattaagcaactgactcaggtgccaagatgcctggtaagaaaagaaaaagcgttcccaggtcggttcactgactcatggttccaggactgactgagcttgcggaattcagatcagatttggcggaacgcttttaagccgaataaatccataaaatggcgctttgaatgtgaaaatgatgttataattccaataattttctaattaagggaggaagaaactatgtcagcatcgctcggtgactcgcagctgctgttagagactatcgatgatcaacagctgttcgttcgccaaaacctacccgtggcgccggctgccgtattggttatcgttcatggcctgggggggcatcaaggtcgttatgactatatgaccaattatttcgttcgtcaccatgttgccgtctatcgctatgatcatcgtggtcacggtcagacacctggaccacatggcgtttatggcgatttcaatcattttcctgatgatcttaaaaccgtcgttgactgggccaagaaaaacacgcctcatctgccgatctttgtggttggacacagtctgggcggcggtacggcgatggcatttggcgccaaatatccccagacggtcaatggcattatttcggtaggagccttgacgcgctatcaccatcagatttttggtccggttcgtcattttggcgatgatgaaacgatcagtggcagctttggtgatcgaagcaacagcagtgcctggatgcggcaagactatcaagacgatccattgaacctgactgagattaaaggctcgctgctgaatgcggcgatggatctggtgacttttaatcgaacgcatgcggctgattttgttgatccggtcttgattctgcatggtgccgaagatggcgttgtcagcgtcacggattcaatggacagctatcgtgagatttcgtcgcgcgacaaagagcttcacatctatccatttttaagacatcaggtattaaatgagccatcgcggcggctggcagtttatcaagaaattttggactggatgaaaaaacatggctaaatcaatgaaaagtcagctgattgggtacacaccagtcaactggctttttattaatgctgcagcgcgcttttcgacattggcttctgctataatttttaaggaaaggatggatgccaaatggaaattgtgccgctcaacgtgatcagcacatacagtctcttgcagagtccgctgcgcccgactgaattggttcaaggagccaaaagcaggggctatcgggcggttgccttggctgactggaacgtgatgtatggggcaattgatttttataatgctgccaaagcggcgggcattaagcctttgctggggttgcggctgcatttgaaaaccatggcaatgaccacgcagggcttggaagttttgtttttggcccgtacgcaggctggctacgttaacctgatgcagctgtcgactttaaagcagacacaagcacagggacgttttttgacgcagcaggagatcgagccgtttttaacggacctggatctgattttgcctgctcagccgctgacgcttgatcaaacgatgattgaccaatggctgccggcgctgattgagaagacggcagggcattgctggctgggggttgatctggagcttgatgccattcagcgcgaacagattagacaaacggcgcgacaatatgccgtttcactggtagcagcccctaaaatcgagtatctggaaaatgatgatgcctttgcgaccgatgttttaagacatattgatgagggtgccaaaatgaccaacccgtttttccaggctcagaatacgatcagtcacgccttgccaaccagagaacagctgcagcaggcctttttggattctgaatttgaaggtgcggctgctcaaacagcgatcatcgcgcaggaatgcaatgttgagatcaagtttcaaatgcctatcctgcctaagtttcctacgccaaaccagcaaagcgcggccgattatctaaagcagctttgtttggcaggtctgaaaaagcgtccattggcagctggctattcgccaaccgattatgagaagcgcctgcagcgtgaactgaccacgattcatgaaatgggctttgatgattattttctgattgtctgggacgttatgcgctttgcccaccaaaaaaagctggcgactgatccagggcgtgggtcggcagctggctcgctagtggcctatgtgctggagattactgaagtcgatcccctaaaataccagctgcttttcgaacggttcttaaatccagaacgagctcagatgccggatatcgacttggacctgccagataatcggcgtgatgaggttttgcaatacgttcatcaaaaatatggtcatgccagagttgctcagatcattacctttgggacgttcggtgctaagcaggccgtcagagacgtgggccgcgttttcggtatgccggtctatgccatcgacgaactagccagagcgattcccaacctgcctaagattacactgcagcaggcattgaacgaatcacgggctcttaataatctgctcagtgattctgcgcagaacgcacttttgatgaagacggcactccgtattgagggactgcccagacactactcgacgcatgcggctggagtcgtcttgtcgcaagcaccattgaatcagctggttccgctgcaaaacggcagtgatggccttttaatgacgcagtttcctaaagacacggttgaggcactgggacttttgaagatggatttcttgggcctgcgcaatctgtcaatcatggattcagccctgcagctgattgaaaaaagccagcctgactttgacctgcatcagatcaatctcaacgatccgctgactttaaagctgtttcaaaaaggagcgacgggagggatctttcagtttgagtcaagcgggattcgtcaggtcttgattcggctgcatccagaaaactttgagatgattgtagcggtcaatgccttatatcggcccggtccaatggataacattgcccattttattgcacggaaggaagggcgtgaaaaggtcactttgcctgatccttcattggcatcgattctggcaccgacttatggcattctggtgtatcaagaacaggtaatgcagctggccgctaaaatggcgggtttcactttaggacaggccgatctgctgcgccgtgccatgagtaagaaaaaagctgatgtgatggaacggatgcggggacgctttattaacggagcagttgccaatggttattccaggccggttgctgaacaggtttttgaatatattgatcggtttgccaattacggtttcaaccgttcacatgccgtggcctactcaatgatggcttttgaaatggcctatcttaaatgtcactttgcgccggctttttttgctgcgcttttgaatgctcatgcgggatcagaaaagatgcgggcctattttgaggatgccaagttatttggcgttgtcattgccggccccagcatcaattttagtcaggctgattttagtctgtaccaagaacgcgtcttgtttggtctgtccatgatcaagggcgtgcgtcgtgatctgatcagcgagattctcctaaaaagaaaggacggtcagtttgccagcctggctgattttatcggccgcattgacgtcagatttagaaagcctgagctgattgcaccgctgatctatgccggtgcgtttgatcgtttgggcagcaatcgtgctgaaatgattgatgctttggctgatttaattgaaggtgccgagttcaaccaggcgcttttaggcagcgacacctttcaaacgatgattccggctcgtcctgagtatccgttggcccagcgactggaaaaagagcatgagtatctgggcgtgtatctgtcaggccacccggtcagtcaatatcgatcattggctgatcagttgcacgcggttacggtcgcccagctaaaagaagggatgaatgcgacccttattctctacgtcagccgcgttaaaacgatcaataccaaaaaaacgcgtcagccgatggcattcgtcagcgcctcagatgaaacgggtagcattgaggtaacggtttttcccaaacagtttcagcgttaccaggaactgatcgctgcacgtaatgttttgattatcagcggccgggtagaaaatcgtaacggcagtctgcagctgttggccagtcacattcagctggcctctgctgctggtgagcgcgggtcggcgccagccaagacccgttggtttctacagctgcgaaagggtgtactgacgccgcgcttgaccgctcagctgcaggaatttatcagcagtcaccatggcaacgtgccggtgatggtctactatcccgaaacgcggcagacgcgtctgcttccgcgcagtcagtggctcagtggggatgaggcgactaaaaaagggctgattgatcttttgggagtcagcaacgtggtctatcaatccacgtcgtaaaacggtttgtcgccagcgtcaaaaataattgaagtgttagcgctttcttgatgtaattagtaaagacaacgaatttaaaaagtgctatgataagtgttgtgcaaatgaggtgcgcaatggcgcagtttctgcattaatgcaaaggagagatgtcacttatgaagaaaaccaagattgtaagtacccttggtcctgcaagtactgatgttgacacgattgtaaagctgatcaatgctggtgccaacattttccgtttcaacttctcacacggtgatcacccagaacacctgggccggatgaacaatgttaagaaggctcaagaaatcaccggtaagcacgttggtctgatgttggacactaagggtgctgaaattcgtactactgttgaaaaagacggtaagatcgaattcaatgctggtgacaaggttcggatctcaatggacgactctattgaaggtacgcacgaaaagattgctgttacctacccaggtctgtacgacgacgttcacgttggcggccacgttctgtttgatgacggtctgatcgacatgatcatcgacgaaaaggacgaagctaaccatgaactggtctgcacggttcaaaaccatggtctgctgggttcacgcaagggtgtcaacgcacctggcgtttccatcaacctgccaggtatcacggaaaaggactccagcgacattcgctttggtctggaacaaggtatcaactacattgccgcttccttcgttcgtaagccagaagatatcgaagacattcgtgcactgctgaaggaaaagaacatggaagacgttcaaatcttccctaagatcgaatctcaagaaggtatcgacaacttcgaagcaatcatggcagttgctgatggtctgatggttccacgtggtgacatgggtgttgaaatcccagctgaaaacgtgccattggtacaaaagaagatgattcgccgctgcaacgaaatgggcaagccagttatcacggctacccaaatgctggactccatggaagaaaacccacgtccaacgcgtgccgaagtttctgacgttgccaacgctgtctttgatggtactgatgcaacgatgctgtctggtgaaagtgccaacggtgactggccagtagaagccgtttctacgatggctcgcatcgatgttaaggctgaaaacaacctggacctgttcggtacggaaacgttcaactttgacaagagcgacgttacggaaacgattggttctgcagttgctcaagccgctaaggaccttgacatcaaggttatcgtagccgctacttcttcaggctacacggcccgcatgatttccaagtaccgtccaaacgccgacattctggctttgacgtttgatgaacggactgaacgcggtctgatggttaactggggtgttcaaccatacgttgttgacaagccagctgacactgatgaaatgtttgctctggctgctaagaaggcagttgaacttggttttgccaagtcgggcgacaagatcatcgtggttgccggtgttcctatgggcacgccaggtgcaaccaacctgatgcgggttgaaacgatcaagtagtcttgattatttcatccacaaaaaccgtctgtcattagacaggcggtttttttactcctttgcttttattttgttctaatattatgtaaaataagctagatacccaactgagaaaattaaggatgataaaatgataaattcagtacttggcaaagtcgtcgatgccgtaatgattgacgaaaacgaccatgattatttcgtacagcctgcgcgtaacggtcaaacctatcgcctgccaaaggatgaaagtccccaggccctgcatattggcggttccgttcgtggctttgtctatgaaaatgaaaatcaccagctgcagatgacctgccagcatattccaacgattcaagtcgaccattatgattttgggacggttgtcggtgttcgccgcgacttaggcgtttttgtcgatattggtctgcccaataaagatatcgtcgtgtcactggatgatctgccaagtctcaagcatctatggccgcaaaaaggcgaccgcttgatgatggcgcttaaggttgacgaaaaaaatcgaatctggggccagctggcagatgaaggcgttttcgaagccattgccaaccgtccggatcctcggatgaaaaacaaggacgttaaggcaactgtctaccgcttgaagatggcggggacgtttgctattaccgatgactattgcctgggctttattcacccaagcgagcgggatcaagaaccgcggctgggtcagcaggtctcggcacgagtaatcggtctatctagtcatggcagtcttaacctttcactaaagccgcgtgcctaccaggcaattggcgaagatgcccagatgcttttggaaatgctgcgccggacgccagaccacacgctgccatttaccgacaagagcgatcctgaggcaattcgtcaagagtttggcatcagcaagggccagttcaagcgtgcggtcggccatctgttgaaagctcggctggtcagcatggtcaatggcaagctgatattaatcaaggatccagatgatgaataatgaataaagcaccgctgcagcaagctgctgctgaatatatcgaacagctgcgtattgaacgtcgactggcccaaaacaccattgccagctatcagcgggatcttcaggatgccatccgctatctgcgagatgagcatgcagattggcaggaagttgatcaaaccgcgattttggcttttttggatcaactaaaaaaacaaggcgtggctcaagaaactattaatcgtcatatcgttagtctgcgtcagctttataagtttttacgtcagacgggtcaggtcgacagtaatccgttggcacagctgacgactgcggcagctccggctaagccaacgccggttttatctgctgctcaggctgccagtcttttaagcatccccaatgtcaaaaatcggactggactgcgtgatcgggcaatctttgagctattgtacgcaaccggaatgcgcgtcaatgagctgctgagtttaaaaatggctgacattgatcttaatgctcagctggtcatgccgcatgatcgcgctggacgcaggcgagtcgtgccaatcagtgatacctgcggcaattggctgaagcgttatgtaagcgaggcacggctggaattgatacgtgatgataccgatgtcttctttttgaataatcgtggccgagcattgacgcggcaggcaatctggcaaaaactgcgggcggctggcagtcaggcggggattgacttagacgtgacgccagatgtcttgcgggctacgtttgcccatgagatgctggccaatggtgccgacctaagagccgtacgagtgatgcttggtcatcagtcgctaaatacgacggaacgctatgcaccagctgccgatattcatttggctgcccaataccgtcagtatcatccgcgatcagctgacaaggaggaatagatgatgctggtaccgtatcgtaaagattatcgtaaaatcattctgggtattctgtcatttattccaggactgcatgactatgaccgcgtggctgaagaagtcgactggtcgttaggcgttggtaatccgatttatctatggcaaaatgatgagaatggcgattttagcggcgcggcgattgttgaattagggccagagtatgtcttgattcggcggatttctttcctgccaagtgagcgttctggcaaaaacgtttatgcttttttgacggccctacatcagaaatatgccaatcgtcgcttgatgggaaccatggcaacgcagcctttgattacgaactgggagaagatgcatgaaaaacaatgaaaatcagctgctgcagcatccttatcagcccaatatcaaactggctgactttgaaggcccgctggatctgctgctgcacttgattcggcagtcggagatggatgtttatgatattccgattgctgagatcacaggccaatacatgcagtatctgcggcagatgcagcgccatcagctggaagttgcaggggaatatttcgtcatggcggcaactttgatggccatcaagagtcagatgcttttgcccaaatcaccggtgtcagaagatgaggaaccgattgaagaagatccgcgtgaggaactggttgagcagctgctggagtatcagcgctataagcaggcagcagaaaagcttaaggataaagaggcctttcgtcaaaaagagtttacgcgcacggcaatggcggtcccgtcagaattcatccatccgcatacggcgccaggaactacgattgaacagcttaaggaagcctttgagcaggttctaaaaaaacatcagtcgcttgaaccagaaacggctaccgttgcaccggaaaaaaccaccgttgagcaacgaattcgctttgtcatgcagcgtgtcagccagggggcagttgcttttgaagagctgtttgccgacttaaagacgcgtgataatctggtaacgacttttctggcagtcttggaactggccaagcatcgtcgcatcgtcttgcatcaggcagcgcgttttgctccattgattctgacgccaggaaaactaagtgaggaagattaagcttgaatccattagctgaaattgaagggctgctgtttatcagtggcgatgaaggaatctcactgggcgatctggccaaggtaacgggatatctaaaacccgcgattttggaaatgatcgctcagctcaaagaaaaatatcaacaagacgaaaactgtgccttgacgcttttggacagcgactcggtttatcgtttggcaaccaaggcccagcttgcagacgtcatgcagcattattttgaggaaccgctgacgacgccattgacgcagacgctgttagaggttctggccattgttgcctataagcagccattgacgcggcttgagattgacgagatccgtggcgtgcagagctctggttcgctgcagaaactgacggctcgcggcttggttgagacgcatggtcggctggcagttccgggacgaccgtttttatacgttacgacgccggcctttttggactactttgggctgacgactttagacgagctgccagaacttgataagaatctacagccagaagatctggatggtgatatctttttaagagctctgcagtcacgacaaatgagaaaggaatcgttagaaaatgaagatggaaagactccaaaaagcaatggctgaagctggggtagccagtcggcgggcttcggaaaaactgatcgtcgaaggtcacgtcaaggtcaacggcaagctggtcaccgaactgggcactaaggtcagctccagtgatcaggtaacggttgatggggtaccgttggagcgcgagcagccggaatattatctgcttaacaagccccgcggcgtaatcacgtcggcccatgatgagcacggccgcaagacggtggtcgatatcttaaaagaaggtggcgtaactgcacgcatctatccggttggccgcttggactatgatacgaccggtgttttgcttttaaccaatgatggtgccttggcaaacaagctgatgcatcccagcttcgagattgagaaaacgtacgttgccaaggtcaagggcttgatttccaaccacgatctggaacagctgcgtcatggcgttgtgattgacggtaaaaagaccaaggaagccaagcccaagcttttgagcgttgacaagcagcatcgcgtctcaatcgtgcgcctgacgattcatgaaggtcgttatcatcaagtcaaaaagatgttcaaggcagttggtcatccagttgaaaaacttacgcgagaaagcgatggcattctaaatcttaaggggctgcctggcggtcagtggcgtgagctgaaaatggatgagatcaatgccttaaaaaaactgtaaacttttgattgaagacgcggaatgattatgctatagtttagtcgatcatgaaattaatttaatcataggtttatcttcaaggcagggtgcgattcccgaccggcggtaaaagcccgcaacccgatgacggccttcgttatcggtggaacctggcgcaattccaggtgccgacagtacagtctggtatatagaagattttcgctcaaacgaaagcaatgtttgccgcagatgaaccgttttcatctgcggcttttttgttgggcgatcagccccggagatgaccttcaattattaggaggttttaatcatgacagtttctagcattcgtattcagcgcctggccgggattgcctgcttgagcgcattggcatttgttttgatgatgctggagtttccaattattccagttgccgcatacctaaagctggacttttctgacgtgccggtattattgggaacgttgatctatggaccggtcagcggcatcattattgcagccgttaagtgcctgatccatgccttggtctatggcttttcaattggcgagcttttgggcgtgggcagcgactttatttcatctttggcgctgctgctgccatttgcatgggcggccaagagaacgtcgcttaagccggcacagcgctatttattgggaaccggcgcgggaatgctgactttgacggtgatcatgtcgcttttgaacttgtgggtcttgacgccgctttacatgaaaatctggggctggaagccaacgatgccgattgcttccttggtggcaatcggggtcgttccgttcaatattatcaagggcctgttagttggcggggtctcctcgctgttggcaatgcggcttgccaattggctggctaagcatcaaatgtaagattgatcaataaaacgactgttaatgatgatccgcgaactgattgcaattggcttgcgtggatcgatcagcggcagtcgttttttattttggtgaaatttcgtataatttacatatagtatttcaagggggtgaaaaattgaagagctattttattgagatgttgaccgatcagcccaggagaacggcggttttgcgcaataccgtcaaaaacaagcgcaccgttgcaactttgttttgggctcgcgaatatggcgtcttaaagtggctggggtccaatccaagactcacggtcaacgaatttgagcaatggctcgttcaaatgcgacaggctggcctgatcaaaatgaatgatcagacggcatggcttactcccagcggcattgctgaaaaagaaaaatttttaaaaacgcattatcagccgtggtttggaaactggtcttggctggcgcggcctgatcagctggcgccacgcgtcttgctggcaacacaggcggtcagtcagtatgcccaccgacaaaagcattacgttcccttaaatctggccccggctgagctatattttgtccgtcagtggttttatggaaatcgaaatcggatcgttgacgactggtcagcagaattgcagcaggcagccgctgcgctggctaaaatggatgaaagactggctaagctgctggtgttttctttgcctggctatcaaacgaccggctggacgattgatcaggcagcacaggctttaaaaatctcagtcgatgaagtcatgatcatggagcgggatgtatggctgggaatcggctatctggcagtcagtcagccagcaggtttgttaagaagtctgctgtacgatcatctgcatgatacgccgctcaatcatagtgccacgattactctaagaatgtttgaacaggggctttcgcttgaacagatcagtcaaagaaggcgtttgaagctggggaccattcgtgaacatattctggaagcagcaatctttatgccagaggcgctgccgcttgaccgcctgctgactccagcacaaattgaccggctggccgcgcagtatcatggcaaaccagctacctgggaatttctgccgccgatcctcgagccgcaatcaccagccgacaaattgcaaaatgaacagagcttctttgagtaccggctctttcagattattaagggaggtgagcacaatggatgagcagcggctgtatcaaacgctgaagcagcagtttggctttgatgaatttcggccaggccaaaaggaaacgattcaagccgtcttgaatcaaaatgacgtcttggcggttctgccaacgggggccggcaagacgctgctgtatcagctgccagcctatctgatgccgggcagcgtcttgatcgtttcgccactgatttctttaatgcaggatcaagtcgaccgcctgcgtcagcatggtgagcgccaagtcgtaatgctgaacgctactttaacgggtcgctcgcgtcagcaggtcttaaaccgactggcggcctatcgctttatcttcgcctcgccggaaatcctggctcagccttcaatcaagcatgcattaagaaagtgtcggatcaatctgttggtaattgatgaagcacattgtatctcgcagtggggtcctgattttcgccccgagtatctgctgctaaaagaagtcaaaaacgatttgaggcggccgccgatcctgttattgacggccactgccacgccgcgggttcaaaatgatattctccaaaaaatggggcttgatgaaaaaaacgtcaggcgggtgattcgttcggtcaatcgtcccaatatctttttggcagtcgatcaggttgaaaatgatcagcaaaagcggcagcggctggctaaatggctgcatgagctgggtggcggcgggattatatatttttccagccgtaagctggccaatgagctggcagactggctgggtgaaatgactggacttgagatcgcggcatatcacgctgggatttcggcaattgatcgctttcgcattcagcagcagttcatgcagggacaattgcaggtcgtttgtgctaccagtgcttttggcatgggcattgataaagacgatattcgctatgtgattcactatcatttgcctggcagtctggaaagctacgtacaagagatcgggcgggcgggtcgcaatcaaaaaccagccctcgcgctgttgatgtattcaccaggtgatgaacagattcaaagacagctcagtcagattgaactgccaagtcaaacagtcgtggaaaaagtccagcaaaaaaagctgccgggaaatgcgctggggccgcaagccgaattgattgagttctatcttagccatggctggaactatgcacgattaaccgcgatgctcaaaaaaagaggccgcctggtcaatcagcagctggcagccatgctgagctacgttagtgaaaaaaagtgtcgtcgtgccaatatcatgcgttattttggcgaattgccagttgattgtcccaactgttgcgactgtcatcaaaacgactggcagctgagtgatcttaagctgccggacgcggtggatccggtcgtcagcgatcagctggattggcaaaagcggctgcagtttctgtttgctaaggaatcgaaaactggctagacaggcatggcttttttgcgctacaatcgattcaatcactgaaatataaaggagcgttcgttaatgagtgaacgacgtgaagaccatcgccaagaggccggcaaactttgggacaagacctttgaagacaatcaagatcttgatgattccggtcacctgtcgcgaacggcccatcgcaaacaaagctcgcataattcacgcatcacgacgatactgatcgtcttgatcgtgattttagcagcaaccccaattatttattgggttcatcatgagcagtcattcaatcatccgcagcagacggaaaaggttgctcagtctgtatcgagcaaggcaaaaaaagcatccagccacgcgaagtctaaaaccaagtccaaggcaagcgctgctgagactgccaaaaccaagacggctaaagccaaaagtagcagtcaagcggattcaaccagcattaccagtgcccagagcagctcatcttcaagtgcggctgccagtacctcatcaaccagtgagagtggggcaaagtatacgacggttggctcaggacagggcatctatcgcgtggcaaccaataatgggctgacagttgcggagctggccagccttaacaatatatcacccaatacgccgctgtatccaggtcagcgactgcgggtcaaataaggggagaatttgaaaacttatggaaaaaggattgcaagtggccattgatggtccagcctcatcaggaaaaagcacggtcgcaaaaattattgccaagcggtttggctacgtctactgcgataccggtgccatgtatcgttcggtaacgtgggcagcattggaaaatggaattgacgtcagcgataccaagcaggtaatcgatctggcccgccgaatcaagatcacgtttgagcccggtcagcctgatcagcgtgttttcgttgatggtcatgaggtcactaaagatattcgaacagaaaagatcgcggccaacgtttcagcggttgccgccattccagaagtccgcgctcaaatggttgaacagcagcggcagattgctcaggctggcgggatcgtgatggatggtcgcgatattggcacgacggttttgccagacgctcaggtcaaggtgtttttggttgccagtgctcatgagcgggcccggcgccgctatgaagaaaatctgcaaaaaggtctggcaacgcaatcactggacgagctggaagcagccatcaaactgcgtgatcaaaaagattctacgcgcaaggtctcaccgctgacccaggctaaagatgcgattttaattgatacgacgagcttaacgattgatcaggtagttgatgaaatcagcgcactgattaaaaaaaaccaggacaattaattctaaacactggtaaacttggttcaactctagtaaaatagtggctagagttgattgttgcaaggaggattttttttaatggctgaaaacgaaaacaaagacgcgatgttagaagcgctcgacagcatcaaagaagttaaggttggcgatgttgttaagggcaaggtactgcaaattgatgatcgtcaagcgatcgttggtattgaagactcaggtgttgaaggggttgtcccggctaaccaactgtcttccaagcccgttgaagacatcaacacggttgtgaaggtcggcgacgaactggacctggttgtcatctccaagattggcagcgacaaggaaaacggcagctacctgctttcacaccggcgcttggaagccatgaaggtatgggacgatctggaaaagaaattcgaagctggtgaaacgatcacggctaaggttacccaagctgttaagggtggtctggttgtagatgctggcgttcgtggtttcgtacctgcctcaatgattactgaccactatgttgaagacttgaaccaattcaagggtcaagaacttgaattcaagattgttgaaattgaaccaagcgacaaccgcctgatcctttctcacaaggaaatcgttcaagctcaacacgaagaagctgctaagaaggtcttctctgaactgcaacctggcgacgttgtcgaaggtaaggtagctcggatgaccaactttggtgctttcatcgaccttggcggcgtagacggtctggttcacgtttccgaaatttcctacgaccacgttgacaagccatctgacgtactggaagttggccaagacgttaaggttaaggttctgagcgttgacccagaacgcgaacggatttctctgtccatcaagcaaacgctgcctggaccatgggatgacatccaagacaaggctccagttggtgctgtcttgactggtactgttaagcgcctgaccagctttggtgcttttgttgaagtattccctggcgttgaaggtttggtacacatttcccaaatctcccacaagcacatcgctacgccagctgatgttctgaagccaggtgaagaagtcaaggttaaggttctgaacgttgaccctgaacaccaacgtctgggcttgtccatcaaggcattggaagaaaagccagctggttctgacaacaacgaaggccaccgtggcggcaaccgtcgtcctcgtcgtcgtaacaacgactacaaggccaacatgccagaagaagaaaacggctttacgctgggcgatctgatcggtgatgaactgaagaacgctcgcaagtaatttaacattgcgttaagagcaaagctgggatttttcccagctttgttttttcatcaagactttttaggcgcaagtcggaaagttttatttaagaacagattaaatctaattagaaagaaggtgccgctttatggcaaatccaatcgttgccatcgttggacgccccaatgttggcaagtccacgctgtttaaccgggttgccggcgaacgaatctcaatcgttgaagatacgccaggcgttacgcgcgaccgcatctatgcccacggcgaatggctgggcaagcattttagcttgattgatactggtgggattgaaatgtctgatcagccactgtcaacccagattcgtgaacaggctgaagtagccattgatgaagccgacgtaatcgtaatggtcgtcgacgtgcgcagtggggttactgatgccgatgagcaggtcgcgcagattctgtatcgttccgataagccggtcgttttggcggtcaataaggttgataatccagaacgacgctcggatgtctatgacttctactcgctgggtctgggtgaaccatatcccgtttccagcgtccatggcgtcggggtcggggatcttttggacgccgtcatcaaaaacttccccgaaaatgccgctaatgaagaagatgacacgattcatttcagcttgattggccggcccaacgttggcaagtcctcaatcgttaatgccatgctgggtgaagaccgggtaatcgtatccaatattgccgggacgacgcgtgatgcgattgacactcatttcaaggctgatggtcgtgagtttacgatggttgacacggctgggatcaagaaaaaaggcaagctttatgaaaataccgaacgctatgctctgatgcgctcgatgcgggcgattgatggcagtgacgtggtattggtcgttttaaacgccgaagagggcattcgcgagctggacaagcatattgccggctacgcgcatgaggctggcaaggggatcattatcgtagtcaacaaatgggatacgattccagatcgcgaccagcgcacgatgactgactttaccaatctgattcgccaggagttccagtatctcagctacgcgccgattatctttgtttcggctaaaacccgccagcggctgatcaagctgccaaagatgattgaagaggtctatgatcactgtcgtcgccggattcaatcatccgtgctcaacgacgtcattatggatgcgattgcggctaatccaacgccaagcacgaatggtcgtcgtctacgcgtctattatgcaactcaggtggcaattgagccgccaacgttcgttatttttgtcaacgatcccgacctgatgcacttctcttatgcccgttatttagaaaatcagattcggcaggcgtttgatttttcaggtacaccgattcatctgatcaaacggaagcggaagtaggctgtgccataggatcgacagcggtttttgtccccaaaaccaaaccggactaatcttagatgatgctggcttttatcagcttttggcaattggaaacggctaaatcagctaaattttaatgataacgttcgcaaatcggcgtttaattgaaatttcatttaaaaagtccgttaaaccgcttgtcagcgcggtttcactatgctaatctagtttttgaaatgatgcgtgagcacgttattgtttcgttaattttggaccactcaaaattaactgatcctatgacgaggaaatttccatcgtcaatggtgggaggtgaaacacatggcaaacaaagcacaactggttagcgacgttgctacggcaactggtctgacgaagaaggatgctacggctgctgtagacgctgtcttcagttccatccaagcatctctggccaagggtgaaaaggttcaattaatcggttttggtaactttgaagtacggcaacgcgccgcacgtaaaggtcgcaacccacaaactggacaagaaattgaaatccctgcaagcaaggttccagcattcaagccgggcaaagctttgaaggacgccgttaagtaattaacgacgataaaaaaatgaagcgacgatcgtttttaacggtcgtcgcttttcttatcatggatttaaaatgaccaccatttggatttgataaagcactcaaagttggtatctctgactgataggactttatcacgagtgctgacgctgttttatgttaaactaaaaaagcatgattaaactaagggggaaaatagcgtgaccttttccgaaaaatgtctgcaggcaattgaagatggcaatatggaagaagcccaaaaagaatttgcctgggcgttgcgcaaagatgatgatgagattctgttcaatctggcggaacagttatacgcgctgggcctgatgccgcaagcccgccgcgcctacctaaagctgctggagcgttatccggatgaagatgagctgcgaaccgcgttggctgagattgcaatcgacaatggtcataacgatgaggcattggcttatctgacgcagattgcgcctgattcgccagcctatgtccaagcactgctggtggcggcagacctttaccaaaccgaggggcagtttgaggtaacggaagccaagctcaaacaagcctatcaagcagccccagaagagccggccgttttgtttgccatgggtgagttctactatctggtgggtcaatttgacaaagcagtgccgttttattttgcactgattcaaaccggtgccgtagagtttgccaaggttgatattgcggcgcgcttaggaatggcctacgcacaaagcggtcattatgagcaggcactgggctatctcaaacaggttgcaccagcatatcagaccagcgacgttcgttttcaaaccggactgacgcagctggaattgggtgaattcaaggatgccattgaaacgctgactgatctgatcaaagacgatgaccagtacgcctcggcttatcctgccttggcgcgggcctatgagcagacgcaacagtatgaggccggtctgaaagccgttcaagaaggtctgggcgttgatcagtacaatgagaatctttttgcattggcggcaagaatggccagtcacgttggcgattttaaactgatgcaaaaatatctgcagcaggctcatgagctggatccggacaatttgacgattactttggaatacagcaatctgctgatcaagctgggcgagcaccaggtcaatgtcaagctgctggccccattggtcaaggcagatgaagtcgatccccagctggattggaatctggcagtctcctatcaggcattggaaaaatacgacctggccgaacggttctatcaggcagcgatgccaagctataatgaaaacgttgattttttaaagaatctgatcagcttttaccaagaaaccgggcagcgtgacttgatgatcgatgaaatggagcattacgtacggcttaatccagctgatactgaaacgcaggagcgcctggatcaagaaatgttctaaataaaaaaggttccgtatcatgcggaacctttttattttagctgcagcaagagacgctgataatagagcagggactgtggatttaatctgagtcgagtctgcagctcttggggcgtggcgtcgcgatgctgagcaatctcataaagaatatagctttggtgcagatacttgggagctagcttaaagcccaagtagtcctcatcagctttgaggtatttaaacaaaccggcattgctgatccagggatgctcgcggttcagccgctgctttaaaaaaatatcctggcagttctgcagctgctggatcggtgcgatataggcagcaaaggtcttcataaaatctcgttcgacggcgttttttggttgcaggctgcgccatacgtcgccaaatcctggctgcagaaactcagcaaccgtatagccgcggctgcttaaaaacaaaacggcgcgcgtgtagagctgcagctgatcgtcggcgagaatgtcgtccagcttgagcagccatttagtggaaagatgctgattgggcttggttgccttgccatgaatcgtcagcgtgggatagttgtcgatcagctgatgagtaaacaaaaagcggaaatagcggctgagctgagaaagcaccttgttaaaagtcgccagggtaatgtcctgctcgtcacgcagccagttcaggtaggctcggacatcggtttccgttacgttgttagcactgggatcatgagcatagatcggacgctgatcctcgagatagttaaataattgacgcagcgtggcatcataggcatcaatggtcatctgcgcgcggccaatggctttaagctctcgatgaaaggcagtctggtaaggatattgatccataaaaagatcctttctgatttattttaggtagtaatgatttaccttaacaataacgcgaaacctaaccgaaagcaagtataaccgattgcagctgccgttataaaccaatccgggctgttgggattggtttcaagtcgactgggtcgaatcaatgttcttagataataattactagggagagattgataaagttggctaaattgcagatctcgttttcgagtcctggaaagtttgctaaaatggttaggactggttatgacaaccaaatccacgaaacaaggaaatgatatccgtgaaaatcgaaaaactgccggccgtctttgaaccagcacggccgattctgcagcgaattgaacaggctggctatgaggcctattttgtcggcggctgcgtgcgcgatacgattttgggcgatccgattcatgacatcgacattgccaccagcgcctatccggccgaaatcaagcagatctttaatcgtacggttgatactggcattgagcatgggacggtcatgattttagatcatggcgttggctacgaaacgaccacttttcgaactgaatctggctaccaggactttcgccgcccagattcagtaacgtttgtccgctcactggcagaagacttaaagcggcgcgactttacgatcaatgccctggcgctgaaggaaaacggcgaggtcatcgatttatttgatgggctgggcgacttaaagcggcacttgattaaagcggtgggtgaaccggctgaacgttttcatgaagacgcgctgcggatgatgcgggccgttcgttttgccagcaagctgaactttaagattgacgaaccaaccaaacagggcatcaaagacaacgcgccgctgttggaaaagattgccgtagaacggattcgggttgaatttgaaaaactgctgttaggacagaaccccgtggccggattgaccgatctgattgagactgatctttaccgctattgtccgagactggcagatcaaaagacggcccttgatcagctgctggacctaaagtcatggcagctgaaaacagaagctgaggcctgggcggtgctgatgctggtcatgcagttggatcatgcccagcgcaatgcctttttaaaagcttggaagacttccaatgatttgatcggcgccgtgcagaaaatcgttttggcagccgatgcgattttaaatgatcagctgacgccagcaattctgtttgctactggagaaaagcttttgatcagtgccaatcgagtcgcggcattatttggtcagtcgcaagaagaacttgacctgcgtgatcgctaccaggcactgccaatcaaaagcgccaaggaactggcagtcaatggcggccaattgattaagctggcgcacgtcaaaccggggccgaagatgggctggattctgcatcagcttcagcagcaggtcttggatcggaagctgcccaacgatcaaaacgcgttattagtggcagcggcacaattagcaaaagaggatggcaatgaaaacattaagagctgaaaatctaaccagtacgtatggtgaaaagacactgtttaaagacgtttcgttcattatcaacgaacaggaccgcattggcttgatcggcaccaacggcagcggcaagacctcgcttttaaacgttatcagtggcgcggtcagtcctgaggccggcgagatcatcaaacccagcgactattcgattggctttttgaagcagcagccagacctggatgaagaaaaaacgatcatggatgccgtgtttgctggcgggcagccagtctttcaaacgattcggcaatatgaaaaagcgctgctggattatagcgcgcatcctgaagattccagactaagcgatcggtttaccaagatgcaggctgccatggatcaagaggacgcctgggaagccgacagccgcgtcaagacgattttgacgcagctgaagattaatgacgccaaccaaaaaatcaaggagctttccggtggtcagcgcaaacgggttggcctggcccaggttttgattcaagaacccgatctgctgatgttagacgagccaaccaaccatttggacatcgactcgatcatgtggctgcaggactatctggccagctatcgcggggccgtgctggtcgttacgcatgaccgctactttttggatcaggttgccaatcatatctgggagctgtcgtttggcaagctttatcattatgacggcaactatcaggacttcgtagcccaaaaagcgactcgagttgaactggcacaggaaggcgagcgcaagcggcaggccctttacaaaaaagagctggcctggatgcggcatggagccaaggcgcgctcaaccaagcaaaagggccggatcaatcgttttaatgaactcaaggacaacctgggcaagcttaaagttgatgaggacatctcgattgaactgggctcgcagcgactgggcaaagacgtcattgaaatgcagcatgccaatcttaagtatggcgatcatgagattttagacgacttcaactggctggtgcaggccggcgatcgaatcggcattaccggtgaaaacggtgccggcaagacttcgcttttaaatgtgattgctggccgcaccaagcttgattctggcgttttgaagattggcgagaccgttaagctgggatattacacgcaacagacggaaggcattgatgacgacaagcgtatgattagctatctgactgaagtagctgacaacgtggtcgataaaaatggcaatcgggtcaacgttacgcagctgctggagcgtttcttgtttccgcgatttatgcatggaacgctgattcggaagctttctggtggtgaaaagcggcggctgtatctgttaaagatcttgatgcagcagccaaacgtcctgcttttggatgagccgaccaacgatttggacattggcacgttgacggtattggaagactatttggacgatttcgctggaacggtcattacggtttcgcacgaccgctactttttggacaaggtggctgataatctgctgatcttccatggtcaaggcaagattgagcgctaccgcggctactacactgaatatctcaaaaaggcccaagctgatgcacaggcggctcaggcagctaaatccgcagccaaggcagccgccaagaaaacggctgcccctgctaaaacggccaacactgccaaggtaaagaccaagctgacctatgccgaaaaactggaatgggatcatattgacgaagaaatcgatcagctggatacacgccaaaagcagattgaagaagaaatggcagctaatggcgataactacgccaagctggcggaactgcaaaaagaactggatggggttcaaaaagctttggcagaaaaaaccgcacgctgggaatatctcagcgagtttgtggatgaataggcggttctaatcaagagccagtcagccgacgatatgttagaatggaacttatttgaacagcgaaaggaagattagacatggcagtcaatgataatgaacagcagtatctggatctggcccgctacgtattagagcatgggcacgaaaagagcgatcggacagggacgggaacgcgctcggttttcggctatcagatgcattttgatctcaacgccggttttccgattctaaccaccaaatttgttccgtttggtctgatcaaaagcgagctgctgtggtttttgcgcggcgataccaacattcgcttcctgctgcagcacaagaatcatatctgggatgaatgggcctttaaaaaatgggtggaaagtccagaataccaaggccctgatatgacggattttggtcaccgctggcttaaggatcccgaatttaaaaaggtctatctcgaagaaaaaaaggccttttgcgatcgcatcttgaatgatgatgagtttgcgcaaaaatatggcgatctggggctggtctatggctcacaatggcggcactggaaaaccagcgatggccactacattgatcagattgccaaagtcatcgaacagatcaagaccacgccagattcacgccggatgatcgtttcggcctggaatccagaagacgtggacagcatggcactgccgccttgccacacgatgtttcaattctacgtcaatgatggcaagctgagctgtcagctgtatcagcgcagtgccgatattttcttaggcgtgccgttcaatatcgccagctatgcgcttttgacgcacatgattgccaaggagtgcggcctgggcgtgggcgagttcgtgcatactttaggagatgcgcacatctacagcaatcacattgagcagattaaagaacagctttcacggacgccgcatccagcaccaaaactgattctaccggccgacccaaaaccagttgatcagtatgaaatggaagacattaagctggaaaactatgagcacgaggccgggatcaaggccccagttgccgtttaagaggtgtttttatgaatcagctggactttatctgggcgcaggatccagacggttatatcggcaaaaacggcaccatgccatggcatctgcctgccgatttgaagcattttaaagctgtgacgctcaatcatccggtaattatgggtgccaatacgttcaagtcgatcggccggccgctgccgaagcgcgaaaatatcgtcttgacgcatcaaaaactggacgatgccaagattacgatggtacacagtgtcgaagagctaaaggagctgctggcggatcgcttggctggccagcgctgttttgtcattggcggagcacagatctatcaaacgctgctgccattagctggcgacctttatcggacggtggttgaacggcgctttggcggcgataccaaaatgccggccattgactatcggggatggcgtttggcagatgtggagaaaataaaaagcgatcagccggatgttcccgactgtcgctttgagcattggattaaagattagacgtaaaacaagattgaaaagtagatgaatgccgtaccgaccatgacgaaaagatgccagatcagatgcgtgtaacgggttggcatgctgtagagcagggcgcccagcgtataggtgatgcctcccgccagcagcaggccaaagccaactggtcccaaggcgtgccaaagcggccagaatgccagtacgcacatccagcccatgatcacgtagaaaatcgtcgaccatttgctctttttttgaaaccagatgcttttatagatgatgccggcaatcgccatggcccagataatgccaaacagcgtccagccctgccagcctttaatggccaccagacagtacggcgtgtagctggcggcaatgaccaggtagatcatatcgtggtccagaatctgaaagacccgtctagcacgagtaaagatcagcgagtgaaacagtgttgaggctaaaaagaacaggactaaagccgcgccatagattgaaaaagtaacgatgcgcatggggctgccggtatgtaccgcccgcacgatcaagatcaccaatccggcaatggccagggccgcgccaacaccgtgagtaatggcattggcgatttcgattaaaagagtttggcgacgtgaggttgagtttttcatatgcaagctgaatactcctttcataaaagtgctcggcaatgaaatcagccgttatttctgctatactaaagttaattatcaaggcagtttacatgcccggcagactaagtttataatgtatttagtctttaaaataatgtatctagtttacgatactagatacattatatcaaacttgatcaggaagtgggtaatttccatgtcaaagattaaaattgtggctgactcttcagctggccttaccgatgaagaaattaaaaaatatgatattacgatcgtaccactgtcagtaatgattgacgggacggtttatgttgaacgcgaaacgatcaccaacgatcagttcccaatgatgatgaaaaatgccaagtcgctgccgaaaacctcgcagccgccaattggcaagttcgttgatgcctttgatcaggcgggggcagatggcagcgaggttctgtgtgtgacgatgatggcatcgatcagtggcacggttcatgctgctgaacaggctgccaacttaaccaagaccaaggtaacggtatacgactgccagtcaactgaccgcggcatggcctttcaaatcattgaagccgccaaggtgattgcagacggcggaacggttgatgacgcaattgccaagatgaaggacgttttgcaaaagagcaagctgtatctggcaatcgataatctcgacaacctggtagcgggtggtcgaatcagcaagtttgccggtgcgctgtctcggtttatgaacatcaaggttatgctgcaggtttatgatggcgagatccacgtagcttccaagggtcgcggcatgaaagcgatccataaggaatgggataagatcttagatgagatggccaatggtcctaaggttttgggtgttggcatctcgcatgttgaaggcatgagtgaagttgagcggcttaaagaaagggttcaggctatctgtccagagctgccgatcgtcgttcgcgaaacagtgccgattattgcaacgcatacgggcttgggtgcctgttgcctgctttattatactgaatagtcagcaagtctgatgccagatcgcatcggacttttttattgctgaatatgtataaaaaatgaataaaaattattaaaccattaaagtaaaatgatttaatttatttaaataaaagggaatatcggcagtgataaacgttaaaatagccgaaatccagtagttttaaccttaaaaaaagcatttctttgattaatatgtaagcgattgattttgaaacaataaacagaaatttagaaaatatgcttgacaaacgtatagctatccattaaattaaataacaatctatatgtcctttaaatttagtcccgtgaggctagcaaggcagcatcgtttaaatttggtcgacgttttggtcgcgcttttaaacaatatgttggagcactggttcacgagtcgtggagcagtgcttttttattggacaaattttgtaaggagtttggcgaaatgaaagaattttatgatgcgatggccatgaaacgcgccttaacgcgaatcacctacgaaattgtcgaaagcaacaaaggaacccaggatttggtcctgatcggtattaagacgcgcggagtctatctggcgcgtcgcattgctgatcagctgcagaaactggaaaacgttgcggtaccagttggtgagctggacgttaccaactatcgcgacgatcgacgaccagacaccgctaaggaaaatctaaggctgggcgttgacatcaatgataagcgcgtggtgttggtcgatgacgtgttctttaccggccggacgattcgggcagccatggatgcaattatggatcaagggcggcccaagcgcgtccaggttgcggttttggttgatcgtggtcatcgtgagctgccgattcggcctgattttgtcggcaaaaacattccaacgtccatgcaggaacgagtaaaggtcaacgtcagcgagactgatggacaagacagcgtcgttttgatcaagcagggtgaattggcacaggcctgattgagtgagattgtttagaaaagggagattgtaatgaaacgttatttgattatggaggatggctcgatctatgagggcgagggctttggtgccgctgtgcagaccactggcgaagtcgtctttactacggggatgactggttatcaagaggccattaccgaccagtcgtatgccaatcagatcctggtgtttaccaacccgctgatcggcaattacggtgtcacgctggatgattttgaatcactgcagccgcagatcaaaggcgtcatctgtcgacaggtggcgcggattcctagcaactggcgcatgcaggatacactgcccggttttttggaaaagatgaacattccgggcctgcagggaatcgatacgcgtgagctggttcgcaagctgcgtcattttggcacgctgcgcggacgaattgccgattcaatcaccgatgctgacagcgtggttaaagaattaaagcgtcaaaatccaaccaaaggcatcatcagtcaggtctcaaccaagacgctctatcctaatcctggtaccaagcgcaatatcgtagtagttgattttggcgccaagcacagtattctgcgggaactggccaaacgagactgcaatacgatcgtggtgccatattcaacaacggctcaagaaatcttgaatctgcatccagatggtgttttgctttccaatggtcccggcaatcccgaagaaatgacggccgcagctgaaatggtggctgagattgagaaacacctgccagtatttggcatctgcatgggtcatcagatttttgccttggctaacggggccagcacctacaagatgaaatttggtcatcgtggatttaatcatccggtcagagacattgcatccggtcagatcgtctttacctcacaaaatcatggctacgcggttgatcccgcttcagttgataaagaaaaactgatgatcacgcatgtcgagatcaatgatgggacggttgaaggtttgcgtcatcgtcaatatccggccttttcggttcagttccacccggatgccgcgccgggtccgcatgatgccgatggtttatttgatgactttatcagcatggtagatcaacgaaaggaagcacgcaccaatgcctaaacggacagatattcataaaattttggtaatcggctcggggccaattattattggtcaggccgcggaattcgattattcaggaactcaagcctgcatggccctgcgcgaggaaggctatgaaacggtgctggtcaattccaatcccgccacgatcatgacggacacggaaattgccgatcacgtctatattgagccattaacggtcgaatcggtatcacgaattattcgccaggaatatccagatgcaattctgccgacgctgggtggacagattggcttaaacctggccgtagcacttggcaagaccggtatcttagatgaacttaacatccagatgctgggtactaagctggcttcaattgatgaggccgaggatcgtgaaaaattcaaagagctgatgcagcgcttaaacgaaccggtacctgcttccaagacagtgggcacggttgtagaagcgcttgagtttgctcatgagatcggctatccggtgatcgtgcggccggcctttacaatgggtggtactggcggcggcatgtgtcataatgacgacgagctgaaggctattgctgctaatggtctggatctttcgccagcaactcagtgtctgatcgaaaaatcaattgccggctataaggagattgagtttgaggtgatgcgtgacgcagcggacaacgccatggtagtctgctgtatggaaaactttgatccagttggtattcatactggtgactcaatcgtttttgctccatgccagacgctttctgatcgtgaatatcagatgctgcgtgactgcgcgctcaaactgattcgggcgctcaagatcgaaggcggctgcaacgttcaattagcccttgatcctaacagctatcaatataacgtgatcgaagtcaatccgcgggtttcgcgttcttcagcattggcttccaaggcaacgggttatccaatcgccaagatggcagccaagatcgcggtggggctgaccttagatgagatcaagaacccggttactgggacgacgtttgccgaatttgaaccggcactggactatgtagtctgcaagattccgcgttggccatttgacaagttcacgcatgctgatcgccggctgggcagtcagatgaaggcaaccggtgaagtcatggcaatcggccgcaactgtgaggaagccgttcaaaaagccgttcgctccctggaaatcgatcaaaaggacctgttttcacaagaggcacagtcagtatctgatactgagctagaagataagctggtgcacgttcaagacgatcgaatcttttatctggctgaggcgctgcggcgtggctacagcctagaagacctgcatgagctgactaagattaccgtttactttttggatatcttaaaacatatcgtggaactggaagatcagatcaaggccagccctaaagacgccgccgtgttaaaactggctaaacagtacggcttttctgatccaacgattgccgacctctggcagactgatgccgacagcgtccgtcagctgcgtcggcaaaatggcatcgtaccagtctataagatggttgatacctgcgcggctgaatttgagtcgcagacgccatatttctacagtacgtatgatcatgaaaatgaaagcatcaaaagcgagcggccgtccgtcttggttatcggctcaggtccgattcgaattggtcagggggtagagtttgactatgccaccgtccacagcgtcaaggcaattcaacgactgggctatgaggcgatcgtcatgaattccaatcccgaaacggtttcaactgacttttcggtttctgacaagctttattttgaaccattgacactggaagacgtgctgaatgtgatcgatctggagaagccaatgggcgtgatcgttcaatttggcggtcagacagcgattaatctggcagcgggcttggctgagcatggcgtcaagattctggggaccacggttaaggatctggatgcggccgaggatcgggaagtctttgatcaagtcatcaaggatctgcagctcaagcagccgattgggttaacggccacgactggagtaggcgtcttaaaagctgctaaggagatcggctatccggtcttggtacggccaagctacgtcttaggcggtaaggcaatggagatcgtctacaatgaaaaagaactgcacgaatatctcagccaaaacgcgcccgccgctgaagatcatccaattttagtcgatgcctatctggaagggcgtgaatgtgaggtcgatgccatctgtgacggtaaagaggttcttttgccggggatcatggagcatatcgaacgcgccggcgtgcactctggcgactcaatggccgtctatccgccacaaagctttgatgacgatattaagcagcagatcgtggccgctaccaagaagctttgcgtagctttgaagtgtgtgggcatcatgaatattcaatttattattcataaccatgaggcctatgtcttggaagtcaatccacgggccagccggacggtaccgtttttgagcaagattacgggaatcgaaatggctcaggtagcaacccgcgtgattttgggcgagtcattggccagtcaaggatatcaggatggtctctaccccgagtcaaagaccattcatgttaaggcaccagtctttagtttcaacaagctggatgacgttgacagctacttgggacctgagatgaaatctaccggtgaggtcatgggcagcgactacacgtttgaaaaggcactctataaagcatttgaaggtgccaagatgcatctgccggactatggcaatgttttactgacgattgaggaccgtgataaagagacgattttgccactggccaagcgctttgccaagatcggctatcggattttggctacggatggcacggcagacttcttgaagcaaaacggtctgcacgttacgacagttggcaagctgcatgaagaggacaccaagcgggccaacattttggacgtcttaaagaacaatgacgtggatctggttatcaataccatggaacatgactatgaaaaggcttcggatggctttgtgattcggcagacggcaattgagcacaatatcccgcttttgacggcgcttgatacggtcaatgccctgttgaaggctttggagagtcgttcatttgctacgcaggcactttaggctcaatcattaaatttatcaagcaaaatcgactgcccgtggtggtggtcggtttttattttgaaaaatttccgagctgatattaaaaacgatccagcgtaacgggacgctatcgatagcctaagattaaagtcagatggttcggatcgtgctgtttttaacgactgaacgggttgacttaaagtacgctttaaggattaagctatacctaagtcgatgtgtccggctgataaaatcgtaaggaggaattttggatgaaaacagcaatttttgctgaacccggtaaaatggtgattaaagagactgccaagccaaccttgcaggccgatgatgacgtaattattcgcgtgattcggacctgtgtctgcggttcagatctatgggcctactcagcaggtgatcaaaaagccaacgactcagttaacagcggtcacgaagcgctggggatcgttgaagaggtcggcagtgcgattacaacggtcaagccaggtgattttgttattgctccattcacgcatggctgtggacattgtgctgcctgtctggctggttatgatggcacctgtgatgagcgcgttctttatgataactggagcgaaggttttcaatcagaatatatttgctttaagcatggcaactgggctttgattaagattcctggtcagccagaagactatagcgaaggcatgatgaagtcgtttatgacgttggccgacgtgatggcaaccggctatcatgccgcacgaacggctgaggttaagcatggcgatcgtgttgttgtcgttggtgacggcgcggttggtcaatgtgccgtaattgctgctaaaatgatgggagcctcgcaggtcgttatcatgagtcgtcatgaggatcggcaaaaactggcccaggaatttggcgcgacggcgtatgttgctgaacgtggcgatgaaggagtaaaaaaggtcaaggagctgcttggcggtggtgctgacgcggcattagactgtgtcggtacagaagcttcaatcaatcagtgtctggcagtagttcacaatggcgctcacgtcagtcgaatcggcgtgccgcacagcaatgtcgatccattcacgctgtttgcccacaatattgcaatggctggtggttcggcaagtgtgacgacctatgataaaaacgtgcttttaaaggcggtcttggatgggcagatcaatccaggcaaagtgtttaccaaaacctacacgctggatcagatcaacgaagcctatcgtgatatggctgaccgtaagacgatcaaatcctacattgtaattgagtaacccaaatagtcgcaaaaaaatcgtcctgtctgaagcaaggcagggcgattttttgactaaaaataatgcatgaatgcttaatttacatatagtaagatgagggcatttaagaaatttttgcgactgacggattgttgatcagaccgtaagaaagtttgatatactggttactgatggtcaggctgattgacccattcatgcagagcctgattggccagctggtgggcgccttgattttgtttttcggggacccactggactacaacggttttaaaatcgtccatactggtcaacagctcgttcagctcgtcttcataatgacgcgcatgctctttgcccacagcgtcgctcagcaggcggctgtcggtataaaacagcacggtctcttgattggaaaaatgtttttttaaataggcaaagccttcaatcgccgcggcaaattcgccttgatgattggaagcccgcggcaaaaaagctttaagctgctgctgctggccgtctttgacaactagcattcccagtccggtgggaccaggattgcctttggtggcagcatcggtatatagtttgatcatttgattacctcattgacattaggaagtgatattttggaagaagaaaaacgctacttttaccagccggatctaacctcggcaatcattcaatggtgctggatgcttttgattggcattgccggtgtcgtggtctggctggagattacccattttaactggattacggcattgcttttagcgctttttattattttagcagttttggcgattggccggcgcacggttttggtaacgccgaccaaaatggtatttgatcgtatgctgcagaatcgttttttggtcattccgcttaaagatattcgccagcctcgctttaccaagcataccatgacgatcacggttaatggcgaggtcatgaccttttcattttccgcgcgctcaatcgactctttaaagattacgctgggtaatgcagtaaaaaatgaacatgaataaaacagaaaagaatcaattgaaaaaacaatcgctgctgccatggtctttgattttaatcgttggtctgatcattgtcgatcaaatcgtcaagcactgggtaaccagcaatatcccgttaaatggcagccgaacgttcattccgggactgctggacctggataatctgcataataccggggcagcttggagcatgttggaagggcggcagtggttttttgcggtcataacggtaattgcaattatcgtggtagcttatctgatgtggaaaaatcaccgctctgcctggatgatgacaggactttcgctgattatggctggtgcagtcggtaattttatcgaccggctcagtcaaggatacgtggttgatatgtttgccctaagaaacgtcaatttcccagtatttaacgttgccgatgcctgtttaacgattggcgtgtttatcatgctgatcgtagttttgaaagaggatgatcacaaatgaactcagaacgccaaatcaagattgatgccgatctgaccggccgcattgacaaggttttgggccattttctaagtgatgtttcccgctcgcagctgcagaaatggattgaggatggccacgttaccgttaatgggcagtccgttaaaaccaagtacaagcttcaagtgggcgatatggtgcgcatcatacctgaagaaccgcaaaccattgatctggaaccagaaaacattcccctggatatcgtttatgaggatgatgatgtgatcgtcgtcaataaaccggccggaatggtagtgcatcccgcgcctgggcatcccagtcatacgctggtcaacgcactgttgtatcattcgccgctgtcgacgatcaatggtgagtttcggccaggaatcgtccaccgcatcgataaggatacctcgggcctgttgatggtggccaaaaatgatctggcacaccgcagtctggccgcgcagctgaagtccaagaccaaccagcgtgagtacgtcgccttggtgcatggcgtgatcaaagaggagcagggaacgattgatgcgccactgggtcgttccaaaaaagatcgcaagaaacaggcagtcgtcttggatggccgtcatgccgtaacgcattttaaggtactgaagcgttatcagcactatacgctggtcaaatgtcggctggagactgggcgaacacatcagattcgcgttcatatggcctatatcgggcatcccttggctggcgatccactgtatgggccacgcaaaaccctggctggaccgggacagtatctgcatgctggtctgttgggcttccagcacccccgcagcggtcaagagatgacgtttaccgcgccgctgccggactactttaccaagatgcttgaacatttggacaaaaccgaccgccgtgatgaatagttttgaggcggcttaaaaagtgagatgagattggatgacagcaagatatttgatatttgaggatggctccatctttgagggtgagggatttggctcgcctgccgtaacttttggcgagatggtttttaataccagtatgacgggatatcaagaaatcattaccaaccaaatctaccataatcaaattgtcgtttttactaaccccaatattggcaattatggaattcagcgcaatatctatgaatcgatcgtaccttcaatcaaaggcgtcgtctgccgtaatctggcgcccttaaaggaacggcgtcatggaacgactctggatcagtatttaaaacagatgaatattcctggggttaccaacgttgacacgcgggctatcgtgcggcatctgcgaaaggttggccagccgatgaagggcagtatcgtcccagtccctgatgatcatgcgtttgatcagctgcatgctaccgttttgaccaatcagcaggttgctcaggttgccacgccaaagccatttcccaatccagatattggccgcagcgtggtcgtgattgactttggccttaaaaacggaattttaagggagctttcgcggcgcaagtgcaatgttaccgtgctgccatatacggccagcgttgatgatattttgcgattggatccggatggcgtagtgctttccagcggcccaggaaaccctgaatcattgaaacgatcagtcttggaaatgattcggcaagttgaggctaaggtccccatgtttgccattggactggggcacgagctgtttgccttagcgaatgggtgtaaggttgagcgtttggcaaccgagcatcatggcatgaatcatccaatccgagagatcatcaccgatcacattgtttttgcctttcaaggtgagggttatgtaattcggcgcaactcagtcgatcgttcgcagctttttattacctatgtcgatatgcttgatggcacggttcaagggttgcggcatcgtcactatccggctttttcggtgcagttcttccctgatggcgcgcctggtccggatgaaaccaacaatctttttgatgagtttatggacattatgaagcagcgcgaggagggatggcgatgaaaaaggttcttctgattggagccggcgccgacagcattgaacatggcgatgagcttgatgctgcggcttttcaagttgccagcgtcttaaaagagcagggttgggagacgatcctcattgatgacaatccattttcttttaccttggattgtccggatgccatcgatcatgcctgcatcaagtcactgacggttgaaaatgtcgttgccacgatcaagcagtatcatcctgatgcaatcttgccaacgttgggcggccggcgtgcgtttgagctgattcaggcagtcagcgagaccggcattctgcaggccgatgatattgagcttttgggagtacctgaagctacgattcgtcagatcaacaacccaatgctgcttggcaagacgctgcataatctcaacgtgcctaccaaggccatctctaaagtcgataattacgttgatgcactggagatggtccaacgggtcggctatccgattatcgtgcgctctgtattacccaaaggagcgggctggcgttcgctggtacatgatcaagatgagcttaagcaggccgtggcaactggtctcagacagtcacgctcgggtcagattacagttcagcagagtctggctggatttaaggaaatcgaaattgttgttttaagagacggctttgggacgatgatgcagctggcctgcgtcgaagatatcgatccgattggcattcatgctggcgattcaattgcagtacttccggcccagacgctgcttgaccgcgagattcaagacatgcgcgatacggcatttgccataacgcgcaaactgcggatcgtcggcgtcaatcacgttcaatttgcgcttgatcaagctaatggaaaattctacgtgatcaaaaacaatccttactttgatcgcttgacggcttttgcggcaacagcaaccggctatgctctgcaggtcgtctgtggcgaattatatgccggcaagacgctgcgtgacatccatcttgatcacggctactataagcacgcggctgtgacggaaccggttatggatcacgttgccgtccggatgccggtctggccgtttgctgaattgcccgacgcagatcggcagcttggcacgcgcaagaagtcaacggggacgatgattggcgttgggcgcagtctgactgaagccatgtttaaggcaatcagtgactttccaagaatagagcaggattcacgcctgacaaaacaggatcagctttccgatgatgagctggtgcagcttttgatccatccgcatgccggtcgtctgtttacgctgttggcggctttgcggcgcggctacactgatgatgagctgaccgagctgaccaagatcgatgcctattactttgcctgtctgcgtcagatgcaggtgattgaagatgcgctcaagggccatcctggcgatgcagagctgttggtcaaggccaaatactgcggcatgagcgatgaaagcattgctaagatctggcagtggccaacgaccaaggtggtggcaatgcgagacgagcatgtcattcaccgaacctttaaggagctggagccttctgcgggcgaatttgatcagcacaccaacgttttttactctacgtatgaaatggaggatgaggccaatccaagcccttcgccaaccgcagtcgttgtaggtacgggaccattgcggctgggcaacggaacttcttgtgactattttgttgccaacacgctgcgtgaattgcgcgaccatggctaccagaccgtcatcatcaatgacaatcccagctcggtaaccttggcgccgatgctggctcgcaagcgctatctggagccgctgcagtcagaaaacattcgtgcggttttggacgtcgagcatccggaagtcgtattgattccggctagtcgtcatgaattgatcgaccagctgggaccaattgccaaaaacatccagattgccgagattcctgaagatcagcgcccaacttcattaacggtcggtgagccgctggacagttttaacgcactgtttgacggtcagctcatctatccgctgggcattacggcagatctgcagtcaaccgatgatctgagctatcagccgactgcgcagcgttttccggcccgcttgacgccgcatgattttgctttgctggaaaagcaaggtggtcaggctattagtgagcagaaggcgccaggactttatcaagttgtttttgtacatcgtttcgatggtacctttaagcagcttttggttcagcatatgccattgccggaaattgcctttttgtcgaaggttctaaagttgaatctgccgggaattacggtacgcatggcattgggccggctggatggcgatgccttaaatgaagcgctggttcctaaaggcgaaaccaaaatggcagtctatcgggcagtctttccgttcaagtcgctgcatcttgttcatgaaaagccaaccatcaaccgggttttgggcggtcagatgcagtttttgagtgatgatgattttgaatagcaactaaaagaaccgggcaggtcaagatgtctggttcttttaattttgcaagcgtttttaaatttgtaaaaaatacaaaaatatttgatatttattaatgaaagcgcttaaatttaggcggaaaatatgttatgatttaatcatgttaagtcgtgaagcgttttataaacagaaagaagcttgcaaaatgaatgaaaataaagtcgtaaaattttcctacgaacagcttgatcgtctttgcatggatggatgcctttcaaaagtttggttttaacgcgaaacaggctgccatcattaccgatgttttattaactgccgatatgtatggtattcaaagtcatggcatgcagcgaatggtccgctactataagggaattcaaaaagggacgatgaaagttgatgccaagccagaaatcgtttttgaaactccagtctcggcggtagttgacggccatgatggcatgggacagcttaatgggtatttcgcgatggaactggcaatcgccaaagccaagaaagcaggcgttggaatcgtttcggttcgtaattcaaatcattacggtattgccgggtactatgccaaaatggccgctaaagaaggcatgcttggtttttcctgtactaacagcgaggccatcatggtcccaacgtttggcagacaggcaatgatcggttccaatccacaagcctggtgcgtgccagcacggccttatgactttttgtttgatgcgtcaacgacggtcgttacccgaggcaagctggagatgtacaataagctggatcagccattgccagatggttgggccttggatgcacaaggcgagccaaccaacgatgcggcgatggtcttggacaatatcgttcacaaaaacggcggcggcatcatgcctttgggcggcaatacggaaacgctggggtcgcataagggctatggcaatgggatggtcgccgagatcttctcatcgattctttcaatgggtacgacctctgaatcaaccatgcaaaatggcaagtccggaatctgccacggctttatggccatcaatctcaacgcatttggtgatggtgaggcaatcagtcagcacctttctgaatatctgcaaaagctgcgcgattctgctaaggcaaatggtcacgacaagatctatacgcatggcgaaaaagagatcctggccatggctgatcgtaaggaaaacgggattccggtcattgataagacaatgactgaggtcaaggatttatgcgactacctggatctggattttgccgactactttggcgaatatcaaccgccaaaagctgagggaatgtttgtcggcaattattaaaataaaaggactttggtggcaatgcatcaaagtccttttatttagttcggtagcttttttggcgttaccgacagcgttttttgaccacggaaggttacaaaaccaggcttggcaccgcttggcttatgcaggttctttaccggcagatagtcaaccggtacgtgggcagagtcgcgccctttagagaaccaggctgccagctgagccgcctgcaggatcgtttctttgctagggttggaatcgcgaatcacgacatgcgagccaggcatatccttgacgtgcagccagatttcgtttttattggccgttttaaaactcagccggtcgttttgcagattgtttttgccgaccaaaatgaccgtaccatcattggcatggaagacttcaggcttggaaacaggaatcttgcgctgctttttgccttttttgtgtttagtcttgatgtatccctgttgctggagctcaagtcgaatctcttgaacgtcgctgggattggccaggtcgatctggctgagaatcgtttcaaagtaatcaatttctttttgcgtaatcgccatttgctcgttgacgtatttaactgaggccttgagcttgttatagcgcgtgaagtatttctgagcgttgcgagaaggcgacagatcaggctgcagcgtgatcttaagcggtcgattctcatcatagaaattaggcagctcaactgactgagcaccacggggaacctgatgcagccaggtagtgagcagttcgccgcggattcgatagcggtcggcgtcagcagcatcagccagctctttttgaaacttcttcatcttgcgctggtcttttttgagttcattatgcaccacttttaatacctgaccggctaattccttggtacgatcagactgtgccttgttgacatagtaggcatcgagcagctcagaaagcgtggcaaacgactgtagtcttagcttctgggtatcaattggggcgaacgcggcaaaaccggtcttgtttttttcattggtaatcaagaccggtgtcggtgactcaaaatggcgcaaaaaggcttggtaggcgcttggcagactgtcgctggccacaagctcggccgccagttcgctagcagtttccggtgccagtccttgatagctggcctgcagttttttggcaagctgaatcggatcatcttttaactcgcgaaccaggtcagaataaatctggttgggcaggtaaggattgaaccgcggctgtttaggcggcatgatgaaggctgctcccggtaaaagcaggcggacgcggttgacgtcgctgccgacatgtttgatggcatcaatgatcttgccggtcttggcattaaccagtgtaacgttgctgtggcgcgccatgatttcgaccatcatcaccagttccaatgggtcgcccagctcatctaaagtcgagaaggtcagcttaacgatccggtcgttttcaatctgggcgacttctttcaccagcgctccttccagatatttgcgcatggtcatggcaaaattgctggggacagcgggattttgataaggaatctgcgtgatctgaatgcgtggataggatggattggccgagatcagcagggagtagttatggcgattggcgcgaattaccatcaccatttcggcaggatagggctggttgaccttggagacgcggccgccctgcagcgtttgattcagctcgtgaaccatagcatgagtaaagaaaccgtcaaatggcatttttgcgttcctcctttgttttgcataactaatctattataacgttgattgccatctaaaaccaaatcagaccaacgatttatgaaattaagacaactggaattgctggataattggttttgtgagttgaatgtgctatcctattaaaatgcagaccttgttttgaggccggcagtttttaacatgctattatttttctaaaatattattttaaatctgcaatcatactggaggaaaactaaatgaaaatcgcggttgtaaccgacagtaccgcttatttaaccccacaagaagctgcggagaatcaaattacggtagtgccgattccactggtgatcgacggccagagctatcaagaaggcgtcgacattacgactgaagaattttacgacaaactggctcattcaaagtcatttccaagcacctcgcagccatcgatcggtcttttgatggaaacctatcaaaagctggctgatgaaggctacgatgccgtcatcagcattcacctgaccaaggcaatctcaggcctgctcaacacgattacgcagattgcccaagacatgcaggatacgatcaagatcatcccatttgactcgcacttgacggtcaagatgatgggctatctggccttggaagccgctcaattagctcaggcaggcgatgatctggaagatatcttaaaaaagctgcgcgaatatcaggatacgttcaataatgtctttgtcgttgacgatctgcagaacctggtgcggggcggccggctttctaatgcatcggcttttatcggctcaattctaaagatcaagccgcttttgacaatgcacacgcaaaactatgccattgaagcatttgaaaaggtgcgctcaatgaaaaaggccaaggcgcgctgtgaacagatctttgacgaggacgtggccaagctcgactatccggtacgggcaatggtgctgcatgccaactgtcctgaagaagggcaaaaatggctggacaagctgcaagccgatcaccccgacattcgctttgaattgagctattttggcccagtaatcggcgtccacctggggcagggcgcgctggcactggcttggatgcaggatacggctaaaaagccactggactaagcctatgcagcagcgaacaaaagactgtttctgggcactgggactaacggctttaatggtgatcgttggtctgctgcgtctgtcaacgccactgccgagcggacaggttgccattgagctggctggagtcattgggctgagtgcaatggttggcttgaatctgcgctggggtgccggcattacgacgatgggaacggtgattctgctcttgcttggcaaggccgattggatgacggttctggatatggccgttgacatggtgatggtcagtgccttgattggctggcagctgccacgcgacgttaaggtaacgcatcggcaggcgattggagtcggcgtggcagccggcatctcacaatggattacggccgaggtgctttgcggcattgcaggggatgcatttgctcatggaacgggcatcatgccttttatgcggctggccctgcctgcgacgctgctgacggccctgttgtacatgttgctgattccgccgctttcgctggtgattcggcattttaactggcagccgccgcaagatagcaatcagtcgaaaaaaacgcgttccatggtaattgacctgagcgatcatcatggaatgccgaaagaacaagatgatcatcatgataaggactaacctggtttgaattgacaaacgctgctggttaggatattcttagattgttaaaaaataatgaggttaactgatggctattcaaatgatgatgcaaaaaacgtgctgtccatgctgcatgcattgccgcatgttttttgctctgccatcagattgcatgaccaaatgatgcagccgtgaccggttgctgatcgagtcaagggattactggcggtgagctggtagtcccttttattttgttatttgttaaaggagaaaagtttatgaaaaagccgataattggcatttcaggcagcgaactgaccaaaaatgtcggtcctttcgttggctatcgccgcagctacgtcaacaaggactatagcgaggcggtcatcaaaaatggcggtgttccgatgattattccgttcaatgaggatgccgacgtaaccgagtctcagctggaactggttgatgccttgattctttcgggcggtcaagatattgattcggaaagttatggcgaagagccgcagcccgaacaaggcacggtctggcaggcgcgcgatcagtttgacatgcggctgttaaagctggccgaaaagcgtggcatcccggtgctgggcatctgccggggcgctcagctgatcaacgtctttcacggcggttcgctctatcaggatcttaagtactatccggtgccgacgctcaagcattggcagggcgatacgccatggtggcaggcgacgcatcaagtcaagctggttaaggatacgcatttggcggcgatttttgaccaagtgcctcgcctgcgggttaattcctaccatcatcagctgattaaaaaagttggtaagggactaaaggttaatgcattagcgcaggatggcgtctatgagggaattgaaaacgaaacgggaacggtgcttggtgtccagtggcatcctgaaatgctgcgcaatcaccaagcagaaatgaaccggctgtttgactatctgatcaaatgcgctaacgggaaaggcagggatgaacatgcagaataagactgacaaactgggcttttggtcaattgtcttattggcaatcaattcaattatcggttccggaatctttttgacgccaggttcggtcgtggccatggtgggaactaaggcgccgctggtttatttgatcgcggcgatctttgcggcaatgctggccttgacgtttgccgcggcagccaagtatgttaccaaaagcggtgcggcctattcctatgctaaggcagcctatggcgagaacatgggcttttacatgggcgtcgtgcggttcttttcggccagcgttgcctggggcgtgatgggagttggcgtaatcaagagcacgctttccatttttggtgctgactcaaccagctttaaaaacattacctggggctttgttgtcttaatggcgattattttactgatcaatttctttgggcagcgcttcttaacctgggtcagcaacctggcaaccatcggcaaactgttggcgctgggcttgatcatcgttgcggggatcattgtctttttaaaaaccggcgtcagtcattttcacgatttggacacgcttaaagccgccaatggacagcctttgattcccaagctcacgacttctggcttggtgatggcagttattgcagccttttatgcttttaccggttttgagagcgtggcaagcggctctgaagacatgaaggatccgcaaaagaatctgccccgggccattccattagcaattatggtcattgcaccggtttatatcggtacgattttggtggcgatggcaatcaatccggctgcaattgtcaaaactaaacaggtcgtagccattaccgcgatttttcaggctcgctggctgcgcgtcttgattgaactgggcgcgctgatttcaatgttcggaattaatgtcgccgcttcgtttcacacgccgcgtgttttagaggccatggccaaagagcatcaggcaccgcaatggctggctaagcgaaccaggcatgactttccgatttatccgtttataattacgctggctttggcaatctttatcccaatggcttttcagtacaacatgacggcaattatcgtactgagtgccatggtgcggttctttgagtttatcgtgattccattgggcgtgattcgtttttatcggggagccaatgttgaaccggtgcttgcagcagagcggaactggctgacggatgtattgctgccggtgttgtcggttgcctttacgatctttttgctgttcaagtttgactgggtcggcgagtttggtatcagtactgctcaaggcatcgtgcccaattggtttgcaattatcggcatggcagttgggttcgtaattttgccagcaggactctttatgatgcttcgccatgaaaaaagttaattatctgatgcgacccagcggactggctgggtcttttttatatccgcttcagtcggcaaatgcaggtgcttggcagcggtaagacgtagcgatcagtaatcaatccttgcttcaagaaaattatccaaaaaattctgcataaaacgtctggtagcaaatcggttacctacttttcgtaaaaaattactgcatagtgggtaaaaatcagtgtatatcgagttaaggtcgcctaactttacctacaattagcagaaaaaagctcaacagtaggtaattcacaaagtcggtccaacccaatcgaccgctaaatatgcatttttacctatgattcattaaaaaactgcctcaagtaggtaaaattttaaaaattcagtatgcacttacctactattgagaaaaaagcgacgcatagtaggtaattttagtttctgctgccattgaaatttaatttcttgcacaaagtcagttttgcgaccgcccaagccgccattgattatcttgctgccgggataacgcgatggtgagctggctgatgcagcctcatttttagatggcggtaaagcggtcacggctaataaaactttgcaaaaagagccggtattaggaattatgaaaaaaacgtcatctgtttataaaatgatatttatttttttataaacaattatttgtaagcgcttaataaaaggcgtaatggctgagaaaaagcaaaaatttaaagtttaatcctccgtttatttgatctatctttagattaagaaagagaccgtttatgtactttttcttaaaaatagtcggattgcaattgaacaagcttaaggatagcagagagtgtttttgcaatccaaaagtgaatgggggaagtcaatatgcatgatgaaaaaatacattacaaaatgtacaaagatggcaagcaatgggcttttgcagcgatcgtgacgtttacttttacgattgtgcccatgacgatgatgacgaatcatgccgccgcggccagtactgctgagccggccgttaatctgcaaaatagtgcggccacgtcaagcatcagtgccgttactttgtcagctagtgcagcagtcagccattccgctgccgcaactactaatccgcaatccaatgcgacaacggtaaaaagccagactaatgctgcgagccaggctgtatcagcttcggcatcaacgaccgtaagacagcccgcatccgcaactcgtacggctgcaacggtgactggacaaactgcatccaaatcagctgaatcagcatccgcggccactccgatttcgaccgtggcgacacaagattgaacagcatcgaatcaaaaatcagccgcattgagtcagacgaccgcaagcacggcgacagtggctgtcagtgacagtcagtcctctgccaagacggctacgctagacctaaaggcatttgcaccagccacagccagtgtggatgaaatcggcagcagtctggtcgctaatggtcttaacgataaagcagcaactttttcggttaaggatcctgaatatccaagctcaatgtacgttgatcctgatatcaaccactataccttcttttgggctaccagccgtgataattggactggcgagaccggggaatacaacattgtcttgtcaacggatcgttccggcagcgggatcttgtacgtaacgattcttgattcgaccaataaaatcccgctcaatgaatatacgattaatgaagatgaatataacgttgtaacaagtaagaatggcgtatatctgggtcgcatttacaatgatcattattcaggagtcattcgtaatccttttgattctagtatatactacaactggagtccgcgttttaacgtcaaccaagggggagcagtctctgacaatacctactacacgattctgagttttatgattcctaagctggttacgcaaaccacgtcctatgttgacgacagcggcaagcagattgctaaaagctacgttcagcaaggattaagcggccagatctataccacgactggcggcaaggttgtcaatggctactatgaaaccgtaccaggcaacagtagcggctacatgtctgaatttggcaagattggcgataaatacaccaaaaactggcacaatggcgataaggtcgtcttcactcagaccggcgctgatggaacgatgcaagcagactactactactactacgatgatcagccgcgcagttcctacacgttgacgccaagtggagcaggatcgtcagttaccatcgaatctgtcagtggcggtaatttgacaatccgcaacatctatatcccgcagacgcgcaacgtgcagtatgtctacaaaaaactgggtaatctggtgattgattcaactgacgcggcgtttgatgctgccaaaaagaccaagacgcagtatgccaacgatcctaatgacgcaaccagggcgactgatgtcacgttaccaaagattacgggcttcgtaccgttcatcaatggcgtcgcggttacggattatacctttaacccaaccaaatacataacttctttggatcaagacattatcgttgtctatcgggccaagcagaaagcgcgggttgactttgttgatcaagacagcggcaatcaggtgatcttcagcagcggcacgctgacggattatggtggtcagccgatcaacttctcaacggctgatcggcttaagcagctggtctatgatgccaagacgaatccagatggcaaatacgatctggtcaaggacagctttccagctggcgccacctatgaccataatgccaacgttgatcagtcctaccaggtcgtcttgaagcatcatcatgaaaccgttgatggcaagacggattcagccaatggtcaaaaaacggtcaagcgcacgatcgaatactactaccaaggcgatggcaaagccgcgccatccgttgagcaaaaggttacgtttacgcggaccggtgatcgtgaccgtgtaactggtgccacgatttgggaagattggagcaaggtcgctgcccaaaacgttgagcaaaaggactcgccaaagatcaatggctatacagctgataaactgacggtggctggcgcgacgatcaaggcgacggataaagactcgaccgtgacggtaacctacgtgccaaataaacaggcagtcaaggttatctattatgacgatacgaccaaccaagatctggccattaaggaattctccggtaattccggggctgacagtggccgaaatacaaaggccgcgattgctgaatacgttaagcagcatctcaaattggtcagtgacagcacgaatggtcaaaacatcatctttgacaaggacgatcaaaatgatcagacctatatcgttcatttcgttcatgaaaccgaagccgtcaagcgaaccaagaccgttactgaaacgattgaacaccacaaggccattaagcagctggatggcacgactaaatatgtcgacgttaaagatcagctgccagtctactacgatacgctgaccttcaatgaatctggggtgcatgacctgtacaccgatcagacgacatggaacggtgactggacaccaacgcagacttttaagaccgttgtttcgccgacgcttgccggctacacgcctgacgtggctcaagtcgatgccgttgcaattacggttactgatgccaactatggccagtcgctaaacgttcaccatgacattatctatgtcggcaagagtcagatcctggttgtcaactatattgacgacacaacgcatcaagtccttgaacactggacgggaaccggtcaatcaggtcagacgctggactacacgaccgcagcgacgatcaataagtatctagggcagcattacgtcttggtatcggatgccacccacggaaaccagccagtcctggatgaagacgacatcagcaacaaccaggttctggaggttcatctgaaacatcagacgacaagtaccagtcggacgatgaaagtcaccgaagaaatcaagtatgtctacaagggtgatgccaattatcaggacggcacgctggttgatcagagtctgctgaagcaagccaacccgctgaccaaagagcttgtctttgaacaggatggcgtaactgataacgttactaaaacaacgacctggaatcaagactggaagcagactaaatcatttaaagcagttaccacgccaaatctgaagggctattccgtttctgtcgatgaggttccggctcaaagtgtgacgattgatgcctcaacgtttgatcaaaaaggcaagacctactcgtttacggtcaactacacgccactcaagcagaccgcgctgatcagatatatcgacggctcagataacgataaagtgctggagaccgacacgcgaaccgggctttccaatcaaaaactggactacaccagcattcgcaatcagatcttggccaagtatgccaactacgaggttgcttctgatgaaacggaaaacgggatcgtctttaatgataatgccggccaagaccagatctttaaaatcgtcttaaagcacaagacgacagcaataacacactcagttgaagttaagcagatcattcactttaagttcagcgataactatcagcagccttgggatcagaccagcacgctgacgtttacgcaaaatggggtcaaggatctggtaaccgaccagattgactgggacagcagctattcagagacccagtattttaaagaagtaaaagccaaaccaatcgccggctacacgccagatatccagacgctggcttcgcgtaagattaccgttaccaatgacaactttgtaaatggtcagtttgaaggaacgatcacctattcgccaaatcggcagtacatttcagtctcgtatattgacgataccacgggcaagcagctggcaaacgaggtcttaaacggctattcaaataccagcgccaactacagtacgactgaaacgatcaatagctatcttggccaaggttatgagctggtttctgatgatactggcggaaaagatctggaattcaattcttcagataaccccaacgatcagatctatgtcgttcatctcaagcatggctatgaagatacgcaacggactaagacggtcgttgaagaaatcaagtatcaatacgaaaactacagtcaggcacatgatctatatcacaaagagctgacgtttacgcagaatggtcagttagacaaggtcaccaagacaacgaactggaatggcaaatggacagctgctcagacgctggctaaggttgactcgccaacgattcctggctatcactatgactatgccggcgaaccggagcatacaatcaccattactaatgacaactatgacaaggacctgaatatctatcggacggttacctactatgccgactcacaaaacgtcatgattgtctatgttgacaccaagaccaacaatgtgatcgtcagcgagtctttggaaggcaagaccggcgagcatcaaacctatagtgcccaggatttcattgcaaagaagctgacgaactaccaaaactacacgcttgttaatgatgaaacgcaaaatggcatcatgttccgagctgatggccagttgaaggtctaccatgtctaccttggtcacaagactgaaactgtttctcgaaccgcaaacgtcaagcagattattcactaccagttgactggtggacgcaaactggccgacgataagattgtcaccaagcaggccagccaaactgggacgcatgacctggttgacgatacaacggtttggggtgaatggacgcagactgattttgaagcggttcaggcactaccgattgctggctataccgaccctaatcctggccagatcgctagcgaatcatcagcggttaccaacgacaactggcagcaggataatacgctggagcatacgattatctacacgcctaaatcgcagaaggcaacgattacctttattgatgatgacgctaaaaaaccaagtgatcggcaaatggcaaccgtgactctgaacggccactccaacgaagacagcggctacaataccagttcggcaatcgccagctacgaacagattggctacgttaaggtcagtgatgacactaatggtcaaaccgtgatctttgatgctaatgatgctgccgaccaaagctttgaggttcacttcaagcacgacaagaaatcgacttcgcgcgatgtcacctaccagcgggttatcacttatatctatggcaatggcgacaaggcgggccaaaacgtctttgctcccgatacgcagacccttaagtttacgcaatatgggatgcaggatctcgtcaataggcagattgcctgggacaaggttgacgcgcaaagctttaaagaagtgccttcggaaaaggtcgcgggctatgtctatgacaaggcagtcgtgccagcttctgagatcagcccggctgatagtgattttgcccaaaaaacggtggtcattaatgagaccgtaacctacacggcccagccgcaaaaagccaagatctactttatcgatggcacgacgccaactggccaccagctgctttttaaggaactgggcggcttgtcggacatgaacagcggctacacgacgaccgacatgatcaaaggtcttgaacagctgcattatcaattgcttaccgatgaaacgaacggccaagagatcgtctttgatcataatgatgaagatcaggtctactatgtctactttggccatgaaactgaaaaggactcgcgcactaagaccgttaccgaaaccattgattacgtaaaaaatggcgccgtgcttagcgatcagcgggtaaccaaagaactgaacttcaaacaggatggggtcaaggatctggttaacaatatcgttgactggaacggcacgtggacgccaactcagaaatttgctgccgtaccttcaccaactttcaaagggtacaaggccgtcccaggtcaggttgatgagattgccattacggtcaataatgacaactacaaccaggatctaaacgtctacaagcaggttgtctacactgccaacccgcagtcagcctacattgaatacttcgaccaggatactgggaccatcattggcgaaaagaacctgactggtactagcaatcaattaagcgactattcgacggttaacgatattaaagcttttgaagacaaggggtacgaactggtcaaagatgagacgggcggccagccaatccggtttgatgatgatgataacgtttcgcaaagctttgtcgtctacctcaagcatcgtcatgcagcagttaaccggtcagttaaggttcagcgggtcgtgcactacgtctttcgggatggaccaaagcaggggcaaatggcggcatctgactatcatgacccagctaccgatttgacctttgaacaaactggcgatgaggatctggtcacacatacgatcgtttatgacgcctcatacaaggatcaagcccaatttggcgagctgatcctgacgcacggcgcggtctatgacgccattgccgaattgattccaggctatcatctgaacgtcaacacgcttagtcctaagacggtcgttattgatgctgatacgtttgacaaggccagtgacggggtcttcacggttgccgatacggtctactacatcatcgacaaccaactggccaacatcaattacgttgatgatgatctcaatgaaaaagtcgtcacgattgatcatacaaccggtcaatctggggccaagagcagctatgattcagctaagactttgggacggctgctctatgataaacagaccaacccaactggccaatacgatctggtcagtgacggcacaaaagatggcattgtctttgacttggatgaccaggttgatcagacgtttgtcgttcatttgaagcatcatattctaaaacaggcggccaaccgtgaaaagacaatcaagcagacggtgctctataaatacgcggatggcacgcaggcggctgatccatactatggaagggacatgacgtttaagcagactggcgacctggacatggttaccggcgcgattgactggaatggtgcctggacgaccgacgagcggcaaggcaagtttgacgatgttacctcgccgacaatcaaaggctacacgccagacgtaacggttctgtcgcacagtccgctgaccatgagtaatgacaagtatggttcgccaattgatctgctggacatcgtaacctatagtccgaatgatcagacggcaatcatcaagtatgtcgacatcgataatggcggctcattggttgcctatgatgaagcaaagggcaagactaatgagcagattaattacgacactaaagatcagctcggcaaactggtctacgatgaacagaccaacccaaccggcaagtacgttttggtcagtgatggctttgcccaggcactagccgccgcgcaagcccaaggacaacagctgcggtttgacaatgatgatcaaaattaccagctgtttacgatctatctgcgtcaccattacagcagcgttgatccggacactgatccggccagtggtattcgcaaggtttctcagatcatccactacgtctaccaagacagccagcagtcggccgctaacgataacgtgcaggtactgacctttaaacgggttggctaccaagatgacgtgacgggcaaggtgtactggccactttgggaaaccgtggcatcacaaaagacggttgccgttgcttcaccgacaatcaagggctatacgccagtcaatggtcagactaagattggcgcaaatgagatcgcggccgctcaaaaagatgatgtcgtgatctatgtcaactacgtcgctgatccgcaacaggcaataatcaattacgttgatcaagatactggtcagacgattcaaagcgataaggttgatggcgtaaccgatgccaagatcgactacagtacggctgatcagatcaagcagctgatcaataaaggctacgttttagtcagtgacgagtttactcaggctcaagacgcaggaaaggcagtctttgatcgggatggcaatgctttgcagacgttcaccgttacgctcaagcatggcacgcaggtaatcgatcctaaccatccggatcctgacaatccaattttgccggaaactccaattaatcctgccgatccaaccggtccagtttggccagccaaggatcagtatgaccacacgacgcgggctatcgtacattatcaagatgcatccggcaactcattagcaccagacagcattcagacggcacggtggacgcggacgatcacggttgacaaggtgacgggaaagatcattgccgctacggattggacaagtgatccagctgaatacgcggcagtcagctcgccagtaattgacggctacacgcctgatcagatgatggtttcatttgagatgacgccggccgatcaagtcaagacggtgctctacgctaaaaacgccgtgccggttgaaccagaacagccgacggagccaagtcagccggctgcaccaagcgaaaccgttcagccaagcatcgtacgtgattcgcagtcaatgcagacgtcagctgaatcgccaactgccaagacgacgatgaagcagctgccgcagactggcaatgacaatgataatgacgcgtcatggagcattatggggctgttgacgtcattgctgggcatgctaggtctagcaggactctttaagaagaagcatgatcgcggctaatattgaatcataaaggaaaaggctcgcttaaggcgggtcttttttggtactctgatttgagatgcttggcgaagttggctaactaggttttagcttcaaatagcgtctagtttggagcgagcaggatagtgtgattttgcgggaggttcgatgggaagaaacgacaatgccagcttttaatgtcttttttcatgcggtggattgtagttttgaggactttcaatgctgtcgagctgttctgacagtcttgatcgcacagattgattttgattaattgaaacgttgaccaagctgcagcatatcgactacagaagggagccagctgcggttattatgcaaagaaatcctgcataaaacatatgacgagaaaatcattacctattttttacaaaaaactgctgtaagtaggtaaagttaagctaaatatacaattacctactattggctcaaaatcagcgaatagtaggtagttgcagattcgcagccagttaaaaactgattttcttcacaaagccagcaggcagacagtctaaaaaacgctgccggacttatgattcaccaataatcggatatcgcggtgactcaatgaccaaagcagtcaatatcgccgagcagcgaatgtctaagctcagaaaaatcattaaaaacgcagcgcaatgatgagcaaaggcagtctaaaacgcggcagcaagtgcagcaaaacgagaatgtccgctgcttttgaacattgatcaagaccccgcttacaggatagtagaacgagttttgcagggatgtctaatactataatcaaggcaagcaaaaagaccatcttcaaacagctgaagatggcctttttcattgtggcttaggatggaaaacaggatagggtagattactttttgatcagttcagggtcgtttttaccgggattcaattcaacgatcttgccggtctgcgcataaacaatccattcggcaatattgacgatatggtcgccaacacgttccagttgccggctgatgatcaagtagacgtcagaagcttttagctgctgcttgtctttaacctgctgacttaaaaccagttgccgcagctgcaggtagaggcggtcaaccttgatgtcttcgctggcaacggcataggcagcgtcgctatcatcattgacgtaggcctcatcaaccttgtccagcatctgacgcacttggtaggtcagttgttgaatcagcttttcagcggcagtaaaggttggcttgttagacatgcgcagcgtttgacgagcaatgcggatcgcggcatcgccaattcgctccatgtcagaactggcctttagaattgacatggtttcccgaaaatcagaggccatgggatttttgcgaatcaagacgtcaaaaacgttcttttccagttcgacctcagtttgattgacttgctgatccttggaaattacctgtttggctaggatcgtatcatgttccagaaaggatttggttgcttggtgaatctgcgagctgaccagtgtccccatggcaacgaactgattttttacctttaagatttctgctagattttgatctcccattataaactccttttagccgaagtgcccattcaagtagtcatcagtcagctggttgtctggcttttcaaacatctgcttggttgagttgaactcaatcaaagaaccattgagcataaatgccgtgtagtcagagatccgggcagcctgctgcatgttatgcgtaacgatgacgatcgtgtattcatcttttagcttcatcagcgtctcttcaatcaaaccgctggaaatcgggtccaaggcactggttggctcgtccagtaagattacctgcggcttgacggccagcgtacgggcgatgcagagtcgctgctgctgaccaccagaaaggcccagaccgctttttttcagatcatctttgacttcatcccataaggcagcctgtttgagactttcttcgacgatctgatccagctgctgcttatccttaacgccgccgatgcgtggtccataggcgacattatcatagatggaaagcgggaagggaactggctgttggaagaccatgccaatccgtcgccgcagctcaaccatatcttcttttggatcataaatgtcttgatcattaaacagaatctgtccttcaaccgtggcattatcatcaaggtgcatgcggttaaagcattttaacagcgttgacttgccgcagccagacggaccaatcaaagccgtgatcttgtcttgctcaatctccatgttgatcccgtgcagtgcttctttagtgccgtatttgagcaccacgtttttacatttaagaattttttccatgatgccctcctagccgaagttaccggatacgtaatcattggttgccttgatcttagggttgctgaagatgtctttagtggagttgaactccaggacatgccccaggtagaagaaggcacagtaatcagaacagcgcgcggcctgctgcatgttgtgcgtaacgatgatgatcgtgtggtcctttttcagagtctgcatcgtttcttccagcttagaagtcgagattgggtccaaggcactggccggctcgtccatcaaaatgattttaggatccatggccagtgagcgggcaatgcaaagccgctgctgctgaccaccagaaagggaaagcgcgctgcgatcaagcgaatctttgacctcatcccagagggccacgctttttaacgattcttccaccatctgatcaagcttttgctggtctttgatgccataaagcttgggcgcaaaggtgatgttttcacggatcgatttggcaaatggatttggatgctggaaaaccatgccgatttcacgccgcgtctcgtagacgttgacttgaggagagtttaaattgattccgcgatacagaatctcgccatcgatgcggcccagttcgtcattcatccggttaagacagcgcagataagtagacttcccagaaccggatggaccgatcaaagccgtaatcttgttttcggcaaagtccatgctgacctgatgaagcgagggcgtttcctgcttgccgtagtatacgctgacgtttttagtctgcattgccaatggttctttgacgggcagcgtgtaggtatcttcaaaagaatattcagccatctgttttcacctctagtttatttgcgagccgacatctttttataaatatggttgcctaagaagcgagcacccaggttaaacaataagatgacgatgatcagtacggccgaagccccactggagattgcgtgggcattggaaaccagcccttcagtattcagcttccaaatgtggacggccagcgtttcggcaggacgagtcggatttaagaagctggttgcggaaaatggattccagttgctgtagtcgacggttggtgcgctttgaccagaagtgtagatcaaagcagcggcttcaccaaagactcggccagcccccagaatcaccccggttaaaataccaggcaaggcttcgggcagcatgatcttagtcatggtcttccagcgagaaagtcccagtgaaagaccggcttggcgctgcagcggtgagacgtcatttagagcgttttcgcagttccgcgttaacagcggcaggttgaaaaacgttaaggcaatggcacctgagataatcgaaaagcccaagtgcagcttgattacgaaaaacagatagccgaacagaccaactaccacgctgggcagcgagcttaaaatttcaatcgcggtcttaaagacttccgtaacgccatttttaggcgcgtattcggctaagaagatcccagcgccaattgaaagcggcgtggagatcaaaagcgtcagaaccaacagatacagcgagttgaacagttggtcgcgaatcccgccgccttcaccaacgctttgggcagctgagctcaaaaactgccagctgatgtgcggcagaccacttaagatgatatagcccagcagaccaaacagaatcaagaccaccagaccgactaagacataaatgatgcccattgccagctgattggcttttttggcattaagcattgcgtgagactcctttcttgttgaccagttttaccagcaggttgaaggccaaggacatcagcatcaagaccagcgccaaagaccagagtgcgtcgtttggcaaggtccccataacggtgttgccgatgccgaccgttaaagtactggtcagggttgaggctggcgaaatcaggttttctggcatcaaaggcgcgttaccgataaccatttgaacggccagagcctcaccaaatgctcgtgccatcccgaagataacggcggtcaagattccgggaatggccgagcgcagaattaccttgtagatcgtctgccaaagcgtggcccctaatgcaattgaagcttcacgatagtttttgggcacgtttttaagactgtcgattgacatggaagtgatcgttggcagcaccatgacgaacagcaccgtaacggctgccaagatcccactcccggtaccgccgaaaagatggcggataaagggaacgacgacgactaagccgacgaacccgtaaacgacggatggaatccccaccaaaagctcaatgaccgactgcatgaatgaggctgcctttttaggggccagctcagtcatgaagatggcgacggccaaagcgagcggcgttgcgaccagcgtagccagaatcgtgacggcaaatgaggtaaagatcattggccaggcgccgacttctggcttgccgtgagcgtcagtaacggttggatcccaggtcataccggttaggaagtccttgaggctgacgccatctttaataaacatgttcaagcctcgtgcggcgatgaagtaaataattgaaatgaccagcagtccaattaccgtaatgcagaaatagctgactaatttgccccaatggtcctgcctggtttgaaaactgcttttcatcagttgatcttgttcattcatcttgcttcctccggtttctctcctttattgattgacgcggtggttatttcttggtaacttgaccgtcagcgttcttggtaaccttcatgtcgtgaatgctgatgtagccaaggttcttaacgtccttgctttgaacttccttagagttcatgtagttcaagaatttcttggtttgacccttggcagctcccttagtgtacatgtgttcataggaccagatcttccaagagttgttttcaacgttcttgtcagttggcgcaacgttgtcaaccttcaaagccttgatcttgtcagacttggtgtatgagaaggccaggtagctgatggcaccaggcgtgttggcaactagtttttgtaccgtaccgttagagtcttgttcttgggtcttcatggccgtcttgcccttcaaaacggctgattcaaacgttgcccgcgtaccagaacccttagcacggttgataacggtgatcttttcatttggtccgccgacttgtttccagttggtgatcttgccagtgaagatcttttgcagttggctcattgacaggttgttgaccttcaagctcttgttgacaactggtgccatcccgacaacggcgaccttgtgatcctgcagcttcttggcatcgattccgctttgctgttcagcgaagatatcagagttaccaattgaaacggcaccagattgaacctggctcaaaccagtaccggagccaccaccctggacatcgatgttgacgccagaatttttgctcatgtagctgtgagccgccgtttcggcaagcggctgcagagccgttgagccgacaatgctgatcttattgctgtcagatgcagcgtggaccgtgcctagcgtaccgccaaacaggctaaaacctaaagtagcgacggcagctaaagagataagtgacttcttgttcatgttatttgcttcctttctcaatatcccatgaataaagcatgtacctgagtacggtttataatttaaggcagaaacgtaaagaaaaaagacggttttccgtaaaaaacacgtaaggttcaaatttacaaaaacgatacaaagcaaacaactaattaaataaagacggctgatcagctttatttcacactattaagcgaacaataaccggtgttaaaactataatagttcgaattatcgctaaacgttggcaggtagatagttttaattaatgccaaaaagcttaaaataacctaaaaattacaaagcaaactgcttaataaaattaaccatggcaatcaggcgcgtcagatcaatgattgaacggtgaacacgcggatgctggccatggcagtttacagaatttaaaacaaaaaatcgccgacccgaaacaatccgagtcgacgatgctgataaactatttgatgattactgaacgtttaagatcaaaaggtcattggtaattggacgcgcgggatgggacagatgccgccagcagcgttgccaccattttggccgccaaggtgcaacgaccagctcatagccgcttttttgaatcaaccggctgataaccagatattgatcgccaactgctaactgatgctcaatctgatgggcaccaacaccttgaagcagccgttcgatccgcgtcagttggtgtgcggctaggcttaacattaagtctggatcaagatttggcaatccggcggccagccagcggcagtcgcgtggctcaaaaatatacaaaagcataaagctggcattgggatgagcctggatcagccgtttgagctgattggcaaatgatggatcgatttcgcggctaaaagaacgtgtggtaacaggaattagaattcgatcgtacataaaatgaccccctaaaatggggaagtggtcatgaatgaactactgatgcggcaagatcattgaagcactttcattttagcatcaaaaaaagactttgacccgctttcacgagtaaagtctttgtaaattttagctagtcttcattgtcgcttttttgttcatctttgcggtcacgcttgagacgacgcttgcgatccgatgagctgtcgtcagaatcttcggtcgctttctttttaggcttgatctgaaccaccttgaactggctgacataagcattcttcagatccagtggcgtaaagctgaaatcttcgactctaacgggttgtcccaccttcaagtcgtattgacgttccaagaaaaagccggtcaaagtcgagacgtcggtctgatcaaactggggaatccggacgttgaagtagcgctcaaagtcgtcaagcggcatcttgccggataccaggtaggttgagttgccttttgaatccggctcctttttttcaatcatgtcagaagaaacgtgatcaatttcttcgccaaccgtaccaaacaattcttcgtaaatgtccttatcggtaatgatcccggccgtgccaccatattcatcttggacgacaacgattggcacctgctttttcatcatgatctgtaagacatccgtcaattcttcgctttggtaaacgattggaatcttacgcatgatggagcgaatggcctgcttaggattgatctgattttgccgcatgatgtcgtagctgaagatatagcctaagatgtggtccttatcgttattggcaacgactggaaaacgcgtgtacttcttttgaaagtaaagttgggctgcatcagctaccgtagcagtaatatcgatcacgctcaactgcgtccggtcgaccatgacgtcatcggcaaccttgtcgttcattcgaaaggctcgttccataaatacgacgtcttctttatccatctcaccagcccgttcggattcctgtgataaggtgacgatttcgttttgggtgtagatgtcttcgtctgggttgaccgagaagccaagcatcttggtaatcagcttagccgtccagtcaaacagccagatcagcgggtagaagataatgtggaagaacgtcattgggtgggcaattgccagcagaatcttgaccggttgatcaatcgccatgtttttaggaaccaagtcggtaaagaccgcgtgcaggaacgtaaacagcagaatcccaatgattgagctgaagttattggcaattgccggtgggaagatgtgtgacttttccagcagttcggtaatatacgtttcaccaatccaacctaagatcagtgacgtcatcgtaaccccgacttgcgccgtagacaggtattccgtcaggtgctcaatcatattttcggcacgccgtacgctggatgtctgtttgagctcttttaactcggttggacgaaccttgatcaaggaatattccaacagggtaaacagcgctgctaaaagcagaatgaatataattgtaaaaagtgttatgggactggtactaacttccatattttgcaattttcctttcaaaattagctttgcaatcattatagcaaataaaaaggtcagcattcagcaaaatcgctttttgttatgtaagaaatggtccataatagaataaaagcatttattcaaaaggaagatggtgaaaaaatgacggctagattgattgatgatgcgcactggcagatcttggtcacggcagcgcgtcagctgaagcaaagtgcgcgctatcaaaatgccagccaaaaagcgccattcgatgccgcctatgcacagctgcaggatctggagcagaaccgcgacgtgacgctcaagcagtttttaaaagtacaggaaagtctggcgcatgccgttacaaggctcgatggtcaagagacgacgacttttgttttgcggcaggcagtcagtgacgctgagctgttgatggagacggcccgctatgtcaatgccagtccactggcaaaagaagagctgaacaaagcgttggcggccgcgcgaaaaatcattcagaccgatgaattcgtgctgcagtcgcaggtggatcaaaccgttgaaaaactgcagcaggctggtggagcattaagcggcatggagaacgacttcagccagctggcactggtctttaagagtgcacaggccgttctgaccacgctgcgctacctgaacgcagatgccagtcgccggcagaccttcaaagccagttttgatcaggctaagcggctgttgagtcaagccgcggccaaccaggaattgaacgccgcggtggccgatctgtcgaagctggcgcctgattttcagtcggcagcccaagaaacgattgacctgacgaccagtgaactattgaaagcgcgcaaggcccttaatggcaagaccagtgatttgacgcagctgaaaaaagcagtcgctaaaatgaccggtgttgatcaaaccaagcgctatcaagcggcctatgactccagacaagctgcgtttgatctggcatttaaggaggctcagactgccttggctgatccgcagacgacgcagatgctggctgatcgcctggtcagtcagcttgatgtaacctatgaaacgttaaatggcgaagaaatcgaggcgttcgtgccgatgtctgagggttcaactgcttcgccgatcacagctgaatcaagggatgacgatgccgggatgcttcaaaatgatgacgatcaaaacgataccgaagctgaaactaagccggctcaaaacagtcatgatgatgcgtcccatactcaaggccaatcaggagtggtccagacggcgacattaaccaaaccagattcaaccaaaaaagcaagcccgctactgcggcgttgagcagcatgctgggctttaaacgcaatttaaagtagagaaaggaagatctttttggaaaattcgataacgccggcagaatggcaggtaatgcgggtagcttggacgctcaagcatgttacaagtacgcagatgatcgagattctgcagggcaaggtagcttggaaaccggccacggtcaaaacgctgctgcgccggctggttcaaaaaggcgccttaaaaactacgcgggttgggcgggcgtttgtctatgagccatgcgttgaagaacagccgacgatgaacgaagctgcggatgatctgttcgataatctgtgcgatatgcacgttggcaagacgctggcacatgtgattgaaagggccacgctcagccaagcagacatcaggcagctgcaggaactgctgacccaaaaagccgcagcggcaccggttgaggttccctgcgactgtgttccgggaatgcgctgtgaggatatgaactgataccgtcaagtcttgtctaaacaatgatgctatcggcaagacgcgctgaaaggaagtgtcgctggtgatcgtgcccccagagctggatcagtcattgttcgttgaccagcgccatgatcaagatcagctgctggtagttcttggcaatggctttgatctttttcatggctttaagagccgctatcaggatttttggcagcacgtgggaacgacgccgctggatgagatcgttcattttaatcgccgcgcccgtagtcagcaggtccgttggtcggatgtcgaggcccagattcgcgtggcggctgaaaatgcctatcagctaagtgcgacgcgtaagatgccaggagcgggcgtgatggttcagcagcgcagcacgcgggcgattcgccgctttgagcatgaattctcccgttatctgcggacggagcgagaacgcgtcttagtcagcgaccctacgcgttcacaaaccgcgcgggaatttttaagtcaggctggcgcggttttaaactttaactatactgatacggcacagcagctgtatgacgtctggccagcgaatatctattatctgcatgggtcgcttttggaaggtcagaccattcttggggttgacaatgatgacgtgttggcacgcgagccttatgaatatgccagtacgaccaagggctaccgacgcgacattcttgattttaaacgctgggcctggcagcagaatggctggcagccgcttgatgaaaaaacactggctgcctttcgaaactatgatgcctattattacggttggcggcgcttgtatccggtctttggcgatcaagagattatctcgctgctctatacgcttgacagcgatatgcccgttaccagccgctattttgcaacccgcttttttgaacagtggcagacacggcgccagtggctgattgatgcgattgccagccgctgtgctaaaaaacgcattgatcctcaggtactggcctataccgcagcaaatgcatttcggccgtttaagatcaaactgcccaatgacgtctatccagaagacattgccacgattgttatcatgggccattctttacgggctgatcacggcatcttaagcgatctgttcaagacggctcatcagctcaagcaggtaattctgttcgtctttcaaggcgagccgcccgaagaactggccatgcagaagcgaatgctgacctggcttttgggtgagggcagtcaggtcaagattttgacgcttgaatactgaaaggagactttttatgaccaggatttcaatggccggcaaatttgcaatcgaaacgcgtaaaatcgtctatatgccaggtgattcgctggctcctagagaagggatcgccaatttaagcgagctgccgccagaaaccagatttagctggcagaaaaagccggtgctagaaacgccgggactgacgcaggcaacgatcatggttgagtatccagatgcctcacaagcagcggtcaaggtgccaatcgaggtgctgccgcgaccggtaaagcaaaaaggacccagtcaaaacgtctcgattcaatttgatcatcaaaacaagcgcacgccgggaaccattctgtcaggcaatcagcgcggtacgatggtcgatgcgtttgcgggaatcggactgttggtcaaggcggtcaagaagggactgtccaggcatcggcaataagacgactggaggggatggcgtggaaaacagcaaaaccagcttaagcgaactgattagtttggaacggcccaattggcagcaccagccgaaaaacgccttgtcagctgccaacgcggtcacgacgctcaaacaggttcacgaaatcgttaatggtccagccaggctgctcagtcttgatctggagttctattgcgatggccagccccagatgccgggaaccacgcggctgggccagattgccggccgtgtctatggtcagaatgatgcattcaactattatgtattcagcagcaaaatgatgcccaaagatcagctgagtctgttgaaacggcttgatctgcgctattcagaagcagaacggcttacggtagccagcgttttgaaaaaggtgttaaggtttatcgatcgtgtgcagccagactacctggtcagctgggacaatcgcttggatcttagcgtgctcaatcaagaggccaatcgcctgcagctggcggaaaccagtcgttcatggaccagaattcagccattggacctagagaagatcatcagcagcgacgtatttgagaaaagctcaggcatcagtctggccaggatgtgcgatctcttgcagctgcagcatcctaagcctcatttggccgatcatgacgtcttgatgattgataagattctccagttttacgcgctggatttaaataaaattctgcattaaaaaattcccgttcgatctgagcgggaatttttcgttagaagcgttttttatgatgtttcttaagatagcggtacagctcgcctaaaaaaaggccaatgatgataatgatggcaatcgtgtagccggccgtccccagcttgaagatggcgggatgaccagcactgccttcaaccagaattgaagagcccaagatgattgccgctaagacgataacaatcaaaagccgattcagcatgcgctccagatttcgtaagacacgagcctgatctttgtactggaagttgatcttagcttgaccagtacttaaaacctccagcagatcattgatgcgcgaaggaatagctatcgaatcgagggcggtttgccgggcctgccaaatgctgctttctagtgagtccctccagttgaagtgcttgagcagatattttttggcaaatggcttggcaacctccatcaatgacatttcaggatcaagcgcggctacgatgccttcaattgagctgaatgccttgatcaaaagcgtgacttcaggcttgacctgcagattgttctgtcggcacagcgagatgatctgaaacagcattgccggcagatcgataccgcctaagcccgtgttgagataaggagccaaaaaaccggtcagctgactatagaattcctgctcatcaacctcgccagtccgattacagatgccgagaattgcttgaccaacctggcgggcgcttttggtgttaagggcgattacaacctgagcaatgccgtccgttaaactaggtgaaaggcgtcccatcatgccaaaatcaaggtagaccaagcgatagggcggcaagggatgatccttttgaatttcgatttcgtgacggcccagctgtttttggtaattgagatcctttgccattgcattgcgcttgggatcatctttgggcaggtcgtaaaacaaaacattgcctgggtgcggatcggcatgaaaaaaatgatcctcgaaaacctgcttgataaaattttcgaccagaacatgcgccagataatgattgcgttctttaagcctggccgcgctggtttcatcaagcggcattttttcgttcatcaaatgcttgatgctttttcccggcatggcttcattgaccagaatcttttgcgtgcagtactgaggatagactttgggcacttcgatgatatcaaagccgttgttgagccggtaaaattcctggccgttttgaacctcagtcgtcgtatcgatctcatgaagcaaagatgtactcagctcgtctaaaactcgtttaggatcaattaccgaaaaatcaattggaacgtgctcggccatgcctaacgcgcgtttaaacaatgccagatcggtctgcactaattgagtaacggcagggtgctggaccttgacgacgactttcgtaccatcaaaaagcgtagcatgatgcgtttgtccaattgaagctgaggcaaaaggcgtctgatcgaatgtctgaaaaacatcttcaatccgcttgccggtctgttcttcaaaagtctgttcaacggtcgcatatgagtcaacgtcaacctgatcctgcagctgacgcagttccttgatgtagtctggtgagaccagatcggggcgagtcgacagcagctgaccgatcttaatgaaggtaggccccagctcttctaaggcctgccggatctcttctgggtgtttttgccgataaaaattggttagaaacgaatgttgatttaagactttaatgatctgcttgagacgagtcttttggctgatcgttgtattttcttcattcagaaaaatcacgtccttatttgataaatcattagcttcattatagcaaaacaagcactccccgcgttgacgaagagtacttgtttttagtctagattcagttcatagacgttgcgcaggtcgcgatcagtcgggccggtgtagacttgtccccgcttgacgaagccgaagttttgcaccaggttgtggacgcggtcgtttttatcgtgagtagcaatgcggaagttgcggaccccagcgtcataagccagcgtgatcatatggctcataatgtagttggcaaaatgcttaccgcggtatttgccagagattgctacgcggtgaatcgtggcaaacgggtgaccaggacgattccatttaccattgacgatatgcatgtaatgagcatcgccttgcgtcatcagagttgccgtcccaacgatttcgttgccatacattaaaagccagcagcagccgccttcgatatccatttgaaaggtcaagcgcgtcgggtagccgtcttctccctgccattgttcgctaccgtcagccttcaaaagcgcgcgggcattttcaacgatttccattaccgtatccagatcgtttaaagtggccttgcgcatgtaaatagcttcactcacttttcttcacctcttgaaatttaagataagctttaaaagtttaagcctatttttttaatttgccaagtagaaattatttattttcataaactgcaatttcaatcaggttttggtcgggatcgtgcaggtagatcgactgcatgggaccttctgcgccaagccgatcaactgggccggcaattacatcgacatagtagctttttaagtggtgcaaaatagcatcaatcgggtcattggcaaccaagcagagatccgcactgccaacggttggcttgcgggctaccagggcatcacgatcggctttttgcaggcgaatcagctgatgcccacagcgcagggtaacgacaccaggcttggtctgctggtcgattaccggcatgtcaaagacttcatgatagaaacggcgggactgttcaagatcactgacggttaggacgacgtgatcgatacgacgcattttcataggttgagacctcatttcaatttattgatcgaattaattatagaactcatgatctggcttgaacagtctatgataagcttaaacagactgtttgaattcaaaaggaagtgagtaatcttgactaaaaatctgcttagcgtgatgctgtttgcatttgtcggtggctgtctgcgcgcaggctgcggtcagctctggggcagcttttgggggacgattctggttaatctggctggtagttttctactggcttttctaacctatcatgccgtcttaaaagagcagctgaccggctggctgaatctaggaatctgtactggtttagtcggttcttttacgacgtttggcacgttttcgctgcagtcggttcaactgctgcagcattcttttttggctggcgtcggctttttgacgattaacctgctgggcggctttttgatggcactaggcggctttaaactggcactgcgcttgaatcaggagtaaaaccatgacggaaatacttttaatcggtttgggagccagcttgggggcagccttgcgctggatcttgacgctgacttggaaaaaatggggccgatctggctggccaatcgcaactttattcattaatctgaccggctcttttttgattgggtggctgtcaaacattgcaatgacggatagtctgcgcctttttttaacgactggattattgggtggctatacgactttttcaacctttaatacagagctgctggcgatgcttgatgaaggcaaaaccgctcgctggtggggatacatgctgatcagcgtactgggtgggctgggatttgcctggctgggaatgtgcgtataaaatacattttatattcgttttatctaagatttttttgttggtttaaacaaaaagtgggatctgttttctgcttttgcccctaaaatcaaataaaagtagtataattatgcatataagcttaactggtttaggcagcaattattcattaagttaggggttattttgcaatggagcaagataaaaagaaaatcgggctggctaatttgaccatgatgatttttacgtgcgtatttggtttcgccaatacgaccgttgcttatgatcaaatgggctatgcctcgattatttggtatattctggcagctttgttctttttcctgccatcgtctttgatgtttgctgaatacggctcggctttgaagagtgccaaagggggcatctattcatggctgaaggtttcaattggcgaaaagatggcctttatcggaacctttatctggctgtgttcatgggttgtctggatggtctcgacagctgccaaggtttggattccaatgtcagcctttttctttggttcagacaaaacgcagaactggaatttctttggcttgacctctacgcagtttgtcggtattttggctatcttgtggatgattttcgttacctacatgggcagccgcggggtcgacaagattgccaaggttggggccgtgggcggaactttcgtcatgatcttaagcggtgtctttattatcgccagtctaatcatttggatctgcaatcatggcgcgatgatgcagccgattcatggcctgcactcgtttgttgcttcgcctaatccacagttccaatctggagtcgccgtcgtttcgttcatggtctatgccgtctttgcctatggtggcatggagtcaatggggggcgtcatggattcggttgaaaaaccagaaaagacgttcccaagagcattgatgatcggcatgatcgtaattacggttctgtatgcgttgatgatctttatgtgggggatgtcaaccaactgggagcgcgttttaggtaaagaaaacgtcaaccttggcaacatctcctacgccctgatgaacaacgtcgggctggtcttgggcagttctttagggctgtcgcatgccacggcggtgctgctgggcaatctcctcacgcggtttaccggtctggcaatgtggctggcttacattggctcattcttcgtgatggtctattcaccgatcaagtcctttatcatgggctctgatccaagactttggccagctaagatgactaagctcaacaagcatgatatgccagcttttgccatgtggatgcaggcaatcgtcatctgtgtgatcatctttgccgtcagctttggtggttcggccgcgcaacagttttatctgattctgactgatatgtccaacgtggcaacctcggcaccatacctgttcttagtcggggccttcccattctttaagaagatcaaggacctggatcggccgtttgtgttctttaagacgcagcgggcggccaactgggtttcagcgatcgtttggctggtcgtagcgatcggcattatctttacctgtctgcagccaatcttggatcatgactatcaaaccgcattttggacggtatttggaccaatcttctttggcctggttgcctgggccttttatgcaaatgcacaaaagcatggtttcaaggcagaaaaacagcaaaactaagaaaagcagcaaaggactcctcgtatcaaacgagcgagtccttttactttgcgacggcctgggctaagatgataatgaatcataattgagaggatatatttgttgatggaaaaaatcaaagccaacctgaccgaatatactggtcattggctgagctatagcggctttttattgatgatcgtgctgattgatcaggcaatcgtcaataaaaagccgctttttaaactgatcatgactagtctgatgcagcaagggcaggtaccaattgtctctaagatgacggccatggagatgttttcaatgcatccgttggctttgcttggcagcctgatctgcctgtatctatggctggtctggctaagcatcgtctgggggctggctatttacggcatcactctgcttagtcagcgccgttttgcctggtcggtgctgttgaaagacatgtccttttggctgcgaccaggctgggaaatgctggtgctggtcaattttttatggctgatgccgctgggccaggggttgttctgtgcattgcgttggggacacctaaattatccggcattgatgcttgattttttgacgcgcaaaatctggctgctgatcatagcagtgctgctctatctggtggtgctgacgattggttttttaacgctgcctgacttggttgcaatggcagccgatcagatcacgcttaaacaggcacggcaaaacccaaacgctggctggcaaggattagcaaacgcgctgagtatgttgggcggagtgctgattttgagcctgcttggctggggacttaatcatttgctgctgctgattttgagcgggttggaaatatttcctgggaaatgggtatggaaaatcgcgatcatttttcgctcgctgatgcttggcggcggtttttggctgctggctggcgcggtggtgattttggtgcttggccagcaatcgtcaaataaacggtttaaaaatcagccgatcgcgaattttcccagttggtttggcaaaggaatctggctgatgattacagtgttgatcttaatgaccagtgcaggcagtctgccgaccgtttggcatcagcccgtggccatctcgcatcggggcgtcacacaaaaagatggcgtgcagaacactttgcccgccgcaaaaaaaacggagcatcgccatcctgactatatagaaattgatgtccatgaaacggccgatcaaaaatttgtcgttgtacatgatgaaaatctgcagcagttaaccggcgtcaatcgcaagccgcgtcaattaacccttcagcagctgcaggggctggcggctgatgaaaacgggcatcgtgcgcacctggttagtttcgatcagtacttggaatttgcccaaaaacaccggcaaaaacttttggttgagatcaaaacgaccccggctgattcgccgcggatgctgcagcatttcaaccaacgctatggcagacagctgctgcagaatcatgcctggctgcactcaatggatctacgcgccgtccaagaactgcatcgattgaatcctaagcttgaagtcatggcgatccagccctacgttttaggctggccatcacggtatgtcgggtggaacgttgaatattcgatgctcaatccactgctgattgcgcagctgcattttaagcaccagccaatctgcgtctggacggttgatgatcctgataccatgcgtcaggctgccttaatgggagtcgatggcatcgttacggataatctgaaggccctggacatagcgctaaaagatactgagcgtcatcacgactacgcggcacggctggcagctcagctcaacgttgcgtataactggcataacctgatcgatggtcgccgttagcaaagcagcgactttgataaaaatgaaaatggcactggatctgcagccagtgccatttttagtatgattttagccaaactgatggcgagcaatcagtctgctcaaagcaaaactgatcaaaaaggcaactgctaaaaacattaccacgaccaggtatgggtattggtagttgatatccagcagtgcccctgagatcaaggggccgatgatgttaccgacactggtcagtgacatgttgatgccgtttaaaagaccttgattctgctcgctcatcttggtcaaaaacgttgtgatcgccggccgcagcaagtcgaaggcctcaaatacgaccaaggtggcgatgataatctgccaatgcgaatgatcataaataactacgaccgttccaactgcactcagcaaaaaagcccagcgcaccagcttgacttcacctagccagagcaccatgcgttcaaagaaaaagacctgtagaatcaaagagatgatcccgtttagcgtcagaacggtagcaatcgcgcccagcccgaattggtggacctcattgacgtaaagactgtagatgctttcaaagccggccagtccaaatgccgcgacaaaaatcattaaaaacgcggtcgtcatggccggactgagcagcgacttaacctgcgtccaagtgctgtcctgcagatccttttgaacgtcttcggtatgcgatttgaattcctcattttgatcgcctggcagtaaaagccaggccaccagagtactgatcagtccaagaataccggcaatccaaaatggcaccttatagccgaagttggctaagatgccgccaaggccgggcccaagaatcagcccaccgctaaaggaagccgacagccagccgattaccttggcacggtccttcaatgaggtcagatcggcagccaatgccattgaagtcggcacgaccatggctgctgacagtccatcaaacgcccgtgaaagattgaaccagaaaaggtgaccagccagagcaaaaacaaactcggccaggccgaaaaccaacagtccccagacgatcaacggcttacgaccgattttgtcagagatgcgcccgacgattggggagccaatgaattgaaccaaggcaaacaacgaagacatcaatcccatttcaaaggctgaaaagccatactcttttttgataaatggcatgacggggaagatcagactcatgccaagacagattagaaactgacagaccaataaaatcaagatggtccgttttgattgcgaactcataaaaaactccttattaaaataatttggcaaaaagaaagcgggaatggacgctgggtcgcatttccgttttagtcgctcagctgtttttgtttgatttgactgctggcgcgtttatgatgctggtgggcaccaactgaaacaagcgccaaaatgatgattaagaccgcgaaaaccaccagctgagcaagattctcgctaaaaattgcattgccgccaaacgagtagacaaacgagcacggcagcattcccaacgcaatcaagggcagcatctgcgtcagtgagaccttgagccggattcctgagtaattgaccagtgcgttgggaatggctggaatcatatagccgataatcaagccgagacgcgggtggggttggttgagcagtttttgcagcagctgatgcttcttgagtttttgtgacaggtgcacgcggctaaacagcaaggcaactgccagatttcccaggatgttgccgctccagctgatcaaaaggccgatccaaggtccatagcagacgccggccagaatgcataccgcggcaatcgacatgcctgggatcgcattaagcagcgcgatgaccatcattaaaagcagaaagtccttggccccgtgatcacgaatcatcttagtaagcatgacgcggtgttcgcgggtgggatgcatcagcagcttgatttctggccagtagtcaaaaccgaccttaatcaagacgatcatggcaaagatgccggccagaatcgtcagccagcgactgttaagatgtagtttttgaggcatcggggcatcttctttctatcggttaggcgttcagtgcctggctcagctcaaaaagcgtttagcgcagcagcggatcatgagcgtacagataggttcctttaacgccgcgttttaagattacgtttaaggcgtttaggatcattcgcttctcataatgaatgatctggtcgggatccgtcaagtcagcacgctttttaaaggcctcggtatcggtaaagcgatccagattgacctgcagctgattggtaccaggcttttggctgattactggcccaatgatgatgccggcataattgagatcaaaaccctggcaggtatagattgagccgacctcgtcaatggtttgcggcagctcagcccatggtgtggcggtaaagttgtactggtcccaaggcattttaaagtcgccttcacagatgtagtgcttgccgccatcaagggttgaaggatagccagatgttgaaagaattctggacaggccgacttcttggttgcgcttgacgatcagctgccgcatcttttccgcgtcgtcaaaaatacgaaaatcatagtgatcgcaagcgtttttaggcaggggctcaatcaagccgttggtcagctggttgaaccaggcaatcagatcgtcagaaaccgtcatgcgaaactggtgcttgagctgatagctttggtgtggataaggcgcgatcagctcatttaagcgatccaaagtccaaaagctcttcatgcgcagaacctgatactgatcaaataccaaaacaacgaccttagcgcgcttaatgatctcaagcagctgattttcatggtagaaattattatagtgatcaggcttgcttaacaatagatgcgcctcgtcaataactacaatgtcggcactggcgttgtttttgtccagctgattgataaacgaggttggccgctgatagtctttttttaacaaagttttgatcggtccggcaatctgtttgtagactttgaggacttcgggatggttgaccaaaaaatagttgtgcgtcccgtaaaaaggactgtctgactgaacccgggcggactgctgcagacgagcaaacaagtgcgacaagacgacgctcttaccggtgccggcatcacccaggatcgtatagactgcgggaaaatcctgcgttaagtgctgcttggcaaacaaaatcacctcatcgaccagctgagcctgttcgtcagtcaggtttttaaatggtgacagcttttcgatggcttggtttgacatcctgctccccctttctaaaacaatgcttacttaatgttacgaatctttttggttgccgtcaaattaaaggaattaccaaccgttttctttctttcatgaagtgttgtaaaatagatagctaagaagatcgtttgtaaatttgagaggtggaagaaatgaatcaacatccggatttcctgataaacgaagtcaatgagccccaagacatcaaatcgatgaacctggatcagctcaaggaattggctcaagaaatgcggcagctggtgcttgaacgtgacagtgcagtcggcgggcatgtcggtcctaacctgggcgtcatggagctgacgattgcgtttcattatgtgtttgactccccacacgataaagtgatctgggatgtttcgcatcaaagctatgcacataaaatgctgacgggccgcaaactgggatttttggatcctgatcattatgaagatgtcagcggctacaccgatccaagtgagagtccgcatgatttctttaaggtggggcatacttccacgtcaatcgccttggcagttggcatggcgcaggctcgtgacctggtaaatcctgacagtcatgaaaacgtggtagccgtcattggcgatggttcactttccggtgggcttgcatttgaaggcctaaataacgctgccaagctcaagagcaatctgatcattttggtcaatgacaatcagatgtcgattgatgaagatcaaggcggcttgtaccgcggcttaaaggaattacgcgacacgcagggacaatcagccaacaacatctttaagttcatgggactggattatcgctacgtggcagacggcaacgatctaaagacgatgattgatgtctttaaagaggtcaaaaacatcgaccatccaatcgttttgcacgttaatacgcaaaaaggcaagggctatcagccagccatcgatgatcaaaagaaataccactggcgggcaccattcgacctgcagaccggtgaaagcaagcagtcggcaccaaaagaaagctacagcgcggccgtgattgatgagcttaacgcccaggttgaagctggtaagccggttgttgccattaatgctgcgattcctgggatgtttgatctcggtcgctttaaagctgcccatgctgatcgttattttgatgttggaattgctgaacaagattcggtaacaacagcggtggctatggcagctggcggcgcgcggccggttctttttgagagcagcacgtttttacagcgcgcctatgatcaattggtacatgacgtggccttaaacgaatatccaattgtcatgatcgttcgtgggggcacgatttcttcgggatcggccacacatcaaggcacgtttgacatctcatacatcagtagtctgccaaatattgaatatctggcgccaaccaacgtcgaagaaatgatctccatgctgcgctgggccttaaagcaaaacgatacgccagtggttatccggcagccggaacatgaactgctgcatggcacgccttcccaagacagctatgctacgattgactatgacattgctcatcatggcagtgaggttgccattatggccgtgggcggtttctggcagctgggtgaagaggtctgtcgtcagctgaaggaaaagctcaatatcgatgctactttgatcaatcctaagtcagttaccaacattgaccagcgtgatctgcactatctgcaagaggatcatgacatcgtcgttacgattgaagacggtaatttaagcggcggctttggcgaaacgatcgaccgctactatggaccaaccaacatgaaagtcttaaactttggcgcgccgcgtgagtttgctgacaacgtgccgctggaagtactctatgaatggtatcatctgacgccggaacagatcgttgatgatatcgaacgcgtcgtccactcggcaatttactaagccgtctgcttgacaattggcaaaaagcattttatagttcagataatatcatcgcgaatcaattaaggatcgttcagagaatcgccggtagctgcaaaggcgagcaagcatccgaaatcctgtcgcgagctgactacattgaaatatttttttaaaagggtaaagcacgtctttaaacgagaatggtaccgccgtcactggtgtctcgattaagggcgtgttttttgtcttaacgaggtaagcatatggaagcaaaaatgattcggcgactggtcgtcaaagtagggaccagcagtctggtaatgaaaaacgggcggatcaatctgccttcaattgatcgcttggcctattcgctgtctgcactgaacaatgccggctaccaggtcgtcttggtatcttcgggggccatgggggcggggctggccagtctgaataaaacgcagcggccggcagctattgctgagcagcaggcgttggcatctttaggccaagtcgaattgatgcgcatctattctcagcgcttcttggactatcagacgcgaatcgcgcagcttttgttgacgcgcgacaatctggaatatccgcttaatcgcaccaacgtcttgaatacgattgaggccctgctgcagcaaaagatcgttcccattattaatgaaaacgaccccgtcagtgtcgacgagttggatcatcacacgaccttcagcgacaatgatgagctttcggctttagtagccacgcggatcggggcagacctgctgatcgttttgtcggatattgatggtctgtttgataaggatccgcacaaaaatgccgatgccaagctgattgaaaacgttgcagaactcaccccggcaatcagattgagcgcgaccggttcgtcaacgcgctttggcacgggcggaatggtgaccaagcttaaagctgccgaaacgattttaaacgcggatcggcaaatggttctgtgtaatggtcaggatccgcgggtaatcttaaaggtggtcaatggtcagccaattggcacgcattttggccgtcattcaatcaagccgttagcaattgacaaggaggaattttaaatgaacgagacattgattaaaatgggccagcgtgctcaggcagccgaacaggaactgatgctgctggatacggctgccaaaaaccaggcacttttgcagatggcccaggaccttttagccgctaaagaaacaatcatcgcggccaatcagcttgatatgcagcaggcagttgatatgcccaagaaatttaccgatcggctgctgatcaatgaaaagcgcattgaagacatggcagccggcttaaagaccgtcgcgcagctgccagatcccgttgccaagattgataagggctggtatacggctgatggactgcagattctgcaaaaacgcgttcctttaggcgtaatcggtattatctttgaggcgcggccaaacgttaccgttgatgccgcagccttgacgtttaagagcggcaatgccgtaattctgcggggcggtaaggaagcactgcataccaatgccgctttggccaatgtcttgcggcaatcactgtcagaccaggatctgccaaaagacagcgtacagttgataacggataccagtcatgaaacggctggcgatttgatgcaccttgacgattatctggacgttttgattccccggggcggccgcggcttgattcagcgcgtagttaagacggcaaccgttccggtaatcgaaaccggcgccggcaactgccacatctatgtcgataaggacgcgcagctgaaaatggcgcaggcaatcgtggtcaatgccaaggtgcagcggccatctgtttgcaacgcggccgaaaagctgttgatccatcaagacgtggccgctgcttatctgccggtcctggccaagagtctacgggctcatggcgtcgagctgcgtggtgatgagcgggcccaggcgatcgttgacatgcagccagccagtgaaaccgattgggatactgaatataatgacttgatcatggcagtgaaggtcgttgattcgtttgatgatgccgtcaagcatatcaatgcccacagtactcaccactcagaagccattattactgataatctagaacgtggtcaggcctttttgaaccgaatcaattcagcctgcgtttatatcaacgcttcaacgcggtttacggatggcagtcagtttggctttggggctgagatcggcatcagtacgcaaaagctgcatgccagagggccaatggggctggagcagttgacgacgatcaagtaccagatcatcggcaacggtcaggttcgtcattagttgcttaaaattgacaaacgagttgcataaattgttttctaatgctattctaatagcgtactaagttttaaggaggaagttgaaatgctaaacatgctatgtgaaatgtacctaattcagctaacctccacctcaaccacaacaatttaaagtggttgagttcttcaatctggatatcaataatgcagccaacagctgatcgaatccgctcaaccacttgctagatcttaagtgggattgagataggtggattcgatcggctttttgtttggttaaaaataaaggagttttattatggaagagcagaacaacaatcatctgcgacggtcaatgacgactggacagatggaaatgattgctatcggtgggacgatcggcagtggtttgtttatgggggccacctcaactattaaatgggccggtccatccgttctgttggcctatgccgtagttggtctggttttatatgccatgatgcgggctttgggggaaatgatctatttaaatccaggtacgggatcgtttgccgattatggtaccaaatacatcaatccattgtcaggatatctggttaaatggagcaacgtttttcagttcattattgtcggaatctcggacgtcattgcaatgtcgcagtatttgaactattggtggccgaatctgccagactggctttccggcattattctgatcgttatcttgaccctggccaatctggtttcggcaaaggcctatggatcattggaattttggtttgccatggttaaggtcgttacgattatcttgatgatcgtggtcggcttgatggtgatcgtctttggcctgggcaacaactggcatccagtcggtctgtccaatctttggtcgcacggcggctttttcccgaatggctggaaaggcttcttcttctcgctggcagtgattgctggctcttatcaagggatcgagctgctggggattgcggcaggggaaacggcctcaccgcaaaaagccatcgttaagtcggttaaatccgtgatctggcgaatcttgatcttctacattggagctattttcgtcattgtctcaatctatccttggaatcagctgagcgcggttggctccccatttgttgaaacgtttgaaaaagtcggcatcacgggagcagctggtctgatcaactttgtcgtgttgacggcagcaatgtcgggtgccaactcgggaatctacagtgccagccggatgctgtttaagctgtcggttgatcatgaggtttcgccattcttctctaagctgtccaagcgcgtggtgccaaacgtcgcgattttgacgattgccggctggattttaattggttttatccttaacaccattttgacgcagatgagcaaaacggcttccaacctgttcgttatcgtctacagtgcctcggttctgcccgggatggtgccttggttcgttatcctgctttctgaattgcagtttagaaaacaaaatgccgatctaatgaagaaccacccatttaagatgccgctgtatccgttctacaactattttgccacggcagccctgctgattattctggcattcatgtttatcaatccagatacgcgggtttcagtttcggtcggggtagtcttcttggtaatcatgtcgctgatctactttattcgggtccgcaagcatgaagaacccgaggccagcgaagaagctgattttgaaaatgagcatcatttaaagaaacattaatggaaattaaattagcgtctggtcaattggccaggcgctttttagcagggacagtatgctataatttttaataattatgaaattaaggaagggatcgcagtgaaacatacctgtacgacttttttggctggaaaggcagccacgattgatggatcgactttgatctgtcgtcaagaagactatggcaacgcgtttgatccacagcgctttgttgtcgtcaagccagaggagcagccgcgccactatgcctctaagacgaccagctttacgcttgagctgccggaaaatccgctcaagtatacggccgtgcccgatgctgacgatagtgctggtgtttttgcggccggtggtatcaatgccgccaatgttgccatgaccgcaaccgaaaccgctacgaccaatgcccgtgtactgggagccgacccgtacaattcggacagcgggattggcgaagaggattttgtcaccttggtactgccttatatcaaatcggctcgcgaaggcgtcaaaaggctgggccatcttttggaaaaatatggcacttatgaatccaatggtattgcgtttagtgatcaagatgaggtctggtattttgaaacgattggcggtcatcattgggcggctttaaagattcccgatgatgcctatgtgatcgcgcccaatcagttcaacattaccgattatgactttgaaagcgatgcgactatgtatgccgctgatctgccggcttttatcaatcgttatcacttgaatcctgaacatggcctgaacctgcgcgagatctttggcagtcgtacggccagcgatgcccgctataattatccgcgcgcctggtacgtacaaaagctgctgagcgatgaggaacaaaaacttccgactgaccaggatctgccgtttgtctgtcatccaaagcgcaaactggcgattgaagacatcaagcaggcaatgagcatgcattttcagcataccgactttgatccatatggtcagggatgtgcaaacgatcagcacaaatatcgaccgatcgcgttaaaccgcaatcttgaaattcacatgctgcagatcagaaaccatgtaccggcctcgattgcgggcgtgcactggctggcattcggtcccaatacgtttaatgccgtggtgccgttttacgccaacgttgaagacacgccggcaccatataagaatacgaccagcgactttgatctgcagaatatgtattggctgacgcatacgctggcggcgctgggcgatcagaactatcagcgctatgaaatgatggaagaaggctttgagcagacggttatggcggcctgtcgccagctgcagtcccaaaccgacgcgcgcgtacagacaatcgatgagatcagtgccgaactgacgcaagtcaacgatcagatggcgcagatctcgctgaccgagagcaccaagctattgggcaggatggttaaagaagcctttaaacacgagaaactgcaatattaataatcatatgatagtcaaggagaaataaatgaagaagaaaacgcgtcgagtcctgcattggctgacggctttcgtagttttgtttgccctcagcagtctgatcaagccggggacgcagactgacaattcagccacgactaccagcaccgccagcagttcagccgttttagccagtcagttaaaagaaaagctgaatggcctggttaacaagaccagcagctcaactggcagtcagcagggttccagtacgctgatcacgcccagtcagaccaaggccgcctcggttttgtcagaaggcgtgaaacagcagctgggcggcagtctgacctggaatgggcatggtgcatacattgtcaataataaccagacccagctgaatgccagcgtcagcagcgcgccatatgccgtcaactataccgacagccgcgggcgagcctggcgaggcgaggcctggttgaacaagacgacgcgtcagtatcgcagtcgtgaccagaccggcaacggcgctaccagttggaaaccagcgggctttttacaggcaacgaatcttaccaatggtccatcgcatgcctatgaccgcggccacctgctgggttatgcgctggttggtggaatttcaggatttgatgcctcagagtcgaatccgaaaaacatcgccacgcagacggcttgggccaatgaggcggccagcgagagctcaaccgggcagaactactatgaaggactggtcagaaaggcgctggaccaaaacaagaaggtgcgctatcgggtaaccgatatttatgatggtgccaatctggttccatcaggcgcacatattgaagctaagtccagtgacggcagtcttgagtttaatgtcttcgtgcccaacgttcaaaataatattgtagtcaattacgcaactggcgccgtaacggcaagcaattaataaaaaacagtcgacgaaaaattacgtcgactgttttttttactgtgtgtctttaatcgcgtcaatcaactgtaaaatcgcataggctgctttatcagcctgctgtggatccatcgattttagctggtagattaactgattaactgaaagagaggtttcgcggtcacgctgactgtcctcgaccaattgtgcagttgagatttgcatggcgttggcaatcttgttaagcgttttgatgctgacgttttgatcacttgttctctctaatcgtgagatgaaattgacagacaaaccgctttcttcagcaagtttttcttgtgttatcccgaggcttctacggaaggctctgatattctcgcctatatttaaaatttccggcaccccctctttttaaatctaactaaaaaatttgaaatttttaacgttacgaataaacggtttcacgaaacaatttttacaattaatgcacatattatagaattcacagaatttttgagtaatttgttttttgaataaaataaaatcctggtgagtgcacacaaatttgcttgtcattctttagggccaaaacttgcaaacgttataaaaatacagcaaaatggaacatagtataaaacgatgacgaagaaggaaccagtttatgagtacgacgacgcaaaattcggccagtcaaagacgacgggtccactacgtttttaataatcaagaggtgccacgcttgacgattcgtcagctgtttgacacccgccgcttcagtcgcttgacggcggttaccggggagctggatgccgacttttttaatcagcacctcagtgactttattcaagttgagattgccctaggtgcaccagaacagacagcgccgcagactgcagatgaaacagcgaccaaaggagcattgacaacggctttgatggctgccgccaataagcagccggcgcgtttgtttgaggccttgagcgggcagaatcaattgaacgtgctgaatggtttgtacacggttgagcaggctcccgtgcaggccattcattcacgcttttatctgcttagcgatgataccggcgctcagacgcgggtaattctgggcagcatcaatctgaccgcagcttcttttgatgagcatcacaatcagcttgaagaagtactggtgtttgataatagtcccttatatgctaattttatgcaacggtttaagaacgatcttaaaccagttttaaaaaattatttttccactgagctgctgagtgccgcgcaaaaacagctggatgccatgaaaaaggatcaaaaagctggtaaagacgtcggcaacgtgatcattcttggcaatgagacgactgaccaaatcgcgattgccgatatgaccgagctgatctcacatgacgtccagcagcagatcgatcggggaatcgttggccaggagattaccaaggccatgcgcgacattacgactgatcgagccttggtaaaagatgagctggagcgttcgattcatcaacatgatgccatcttcagcctgcaaaaagactcggtttcgccacgtgcggccaagccaacgcttaagacgcgcgaaaagatctataaacgagtgcggcagacgctgatgactgatatgacgccgcaggaacgctccgccgagaaaaaatacaccacgtttttgtatgatcggccaatggagcggaatctggccaatgacaacagcggcctgtacgtgccaaacgatgcgggaacctatccaattccatttggcaagctggccaccatcagcgagatccgcgacggcttaaagagcattgatgccgttatgcagggctatgccaagtacgtggtcgactacacgcctgattatggccggcgcttttatgaggctattttatacagctttacggcgccatttttatgggagattcgctctaaggccagtctcaatccggaagacggcaatgacgttcccaactttttggtgttgggagctacggcaggctcaggcaagtcaacgctgcttagaatcatcaatcagctgacctggaatacggaccgctcgctgattgactttggtacgatctatccaaccgagacgccgcaaaagaagctgaagacggttcaggcgttagagcactatatgaaaaccggcagtacctacccagtcttggtcgatgagatcgagccctatttcttccagcaggatcaatacagtcggcatctgatcgttgacaccatgaatgatctggtcaaccatccacatgccgtggcgcctttgattggtacgaccaattatgactccggtttcaccatgctgcgagaaacggcgcgccggacctactacctgcagatcgacaaggtgattgacgaggcgcaaaaaggcgaggccaacaaatatatctacaacgtccggcagaccctaaacaacacgctcttcaaggattttgtcgttcggatggccacgctgctcagtgacgacgagacgccatggcggacttttgataaacagacggggcggttggactttttggccaatacgcgcaagcttttcaaagaatattatgagatggcggatctgccattgcctgacttctttgccgatgccatctgcgacgattttcgcgaaagcgcgcggagtcggtgggccaagctgtatctgacgcagactgaggactttaagcactatgccgataagcacagtctgctatttgacatctctaagctcaatacatttaacggcttcagtgctgatagtattgaagagtaccgtaacgcgctgccggttgagatctgtgtcgatggcatcaacggcaaacgcggcaagtttatggagatcaaagaggatgcctttttcaagtggattggcgagcccgatccttatcttgaagacgccgactttgccaaggaagcagcagcggagccggaacgttcagcagctgtcgaaccgccaagaaaaaagaagggcttttgggcacgactgtttggctaggcaatcatctttgaacagccgctgttagttttgaattgaaattagcggtcgaaagggtttacaatatcttctagagatagtttaattaaacaattaactcaaggaaggtttgtcagatgcgttttaatcgagaattttataaggacgttttcttctggggcggagtactgatctttttgtcagcgattttatatcaaggcagttggtcaacctggtttggctattttgatgtcttcttgatcgttttcggtctggcattggtagcgatgaccatggttagccatgacgtccctaaaaacaaacagtcaagataaaaaggattttagcatgaggctaaaatcctttttgtttgatcagcttgcttagtcttgttccgctttgatcagtacgcgctttttggtttggcgcttggcatggaacttttccaataccggaacgaccatgcgctgataccagtggcgactcgtgagccagcgatggaagcggggcgacagcttagagagcgcaaacagcgccagcaggaaaaatggtacttgagggattacgggcagtgccaacccaataatgccaccgacaaaaccagtcagtgccagcattccccagccgattttctccaaaatgatcagcatacggtcatctcctttataaacgcgacttgattttgttggcaagattatagcacgttcggcttcaaaacgcattgaaaacgaatcggccttgagtcttttttaatctttgctcaaccagcggtgcgttataattaggctagtttgatgataagggatgatggtaatgctgaataaaaagcagctggtgatcaagatagtcttaaaacgggtgtggtacctggtttttggcattatcataattgcgatggccgttcagctttatttattgaagggaacgcccagccagcccttgaacatgcatcagctgcgctccgatgtcagctataccgatacgccgacgcttttgatcccaggacagggcggcaacacgattaccttcaatacgtttatcaagcgtactcaaaatgaaaatatcgcgcaaagtgccatggtcgtgcgcgtctcgccgactggtcaggtgcgcgtcaagggcagtctcaagggtaagaaaaatccgctgatccagattctgtatgactggaattataacgtttcgttcaaaccgcagatgcatcagctgacgcaggttctgatcgttttgcatcagcgctatcacgtcaagcgtttgaatatcgtcgcgcattcttatggtgggacggaatttctccacgcctatctaagcaatcagagactacaaaaagaaatcgcgtttcaaaaaatcgtactgttgggcgtgccggtagaagaaagctttggcaccaataccaagtatacggcctggctgtttaaaaagtcgcgggacgcggaattcaagcagctgctgcggcaggtaaaaaaagcacggtttgctaaaaatgaggccgtctacaatattatgggcaaagaggctgatcaaaagacggatggcgaggttcccaacatccagtcgcaaatgatggcaacgctgtttaaaaataccccggtcaaatacgtacagcgctggtatcccaaaaccactcatcgtcagctgcatgaaaaaaaggcgatcctggattacgtcatgcagacactttgggggaaatagcattgctgacaaaaaaagagcacggtcaaacgcgctcttttttgtaattagttaaagtgacagtacttatgctgaaagtcggcaattgcattgtattcctgctgcagatcgctgctgagctgaacatagatgggtaccagcgattgatagatatcataggtaaccggatctggctgacaggttgcggcctttttaagatgttctttaatgacatcgattttcttgatcattcccagactcttcatgcccatgactacggcagctaaggttcggctgtcctgttcttgcggaatggccacgggactttgaaagacatcggccaagatctgccgccacaggccaaaccgggcaaaattaccagttgccatgatctgccgtggttcgccgacgaccgtttccagggttagactgatcgcgtaaagctcatagacggttccctccaaaacggcccgtgccatgtgtccccgagtgtggtgcggcgtcaagccaaagaatgatccccgggcgttggcattccacatgggggcccgctcgccatttaagaaggggtgaaagatcagaccgtctgaaccagctggaatcgttttagcaatcttggccacgacatccagactttcttcatgcatcatgttggccagctgcttttctggggcaaacaatttgtcgccagcccaactgaataccgtattgccggcattgatgggaccgccaacgacccagtgctcctcatccagggcatagcagaacaagcgaccttcgatgtcaaagcgcggctgatcagtaattacccgaaccgctccggaagtatcgccaatcgtaatagccgtggttccctgatccaacgcgccaactcctagattatccatcggtccgtcagctgcgcccaggataaatggcgtatccattggcagcccaatcttagcggcaatctggctgcgcagtcctcgtacctgttcgtatggactggccagctgcggcagttggtcggctgagatgccaatcagcttgagggtttcctcgtcccagtcaagctcttttagatttaacagacctgaagcactggctgatgagatgtcggttttcaaaacgccaaacagccgccagaacacatagtctttgatgcccagccagcaggtcgtgcgctcaaaaatctcgggatactcatttttaagccagatcagtttatagggcagggccattggatgagttggcatgcctgtacgctgatagatctttagtcctgcgccgttttgcttcatttcggccgcgtacttggctgcacgattgtcgccccaggtcaatacgcgcgtcagtggcttattgacgcggtttaggccaatcagactgtgcatcatgcttgagaaagagacgccccgcagcgtgccgttgtttagatctgccttaccaacgacctcgtgcagcgtgtcaacgactgtgtcgaagatctcgtctgggtcttcttctaacatttccggctcatcgcggaatagatgatgtgaacgagacgcgtttgccaacgcattgaagtcctggtcatataaaactgccttggtgcaggtggtgccaatgtttacgccgatcaagtaatccatttgatcccctcatttctagtttctaaatacaagtataaaaaaagccaggcagtggttcaagcatttcaaaagattttgtgaaactactcacgataatttttgagccataaaaatgttaaaatatacaaaaaccaacagaaggtgaaaaaatgcaaaaagaacatggccaagtaacgggaatcatttggaaaacaccggaagaaatggctgcctatcagaaactgcggcagtatgcccaaaaccatggcatgacggtttcagcggctgccaaacaactactgatgcagagtctgcgccgtcatgtcaactgatagatcgccacgacttaatttttttggcaaaaggacttgcagaattaaaaaaatgcgactattataatagctatattaaaatttaatgagattcattaataatttgtttctaagaatgaataggagtgatcggaatggttcaattttcaaaacgggttccagcagatggtacggacgcagttggtgcaatcctggcagcagcggctgatccatcagtaatttcatttgctgggggcctgccagcgccagaactgttccccgtcgcagaaatgaaaaaagcggtcgatacggtttttgacgaacacggccgcgaagccatgcaatatggtgcatcgcgcggggtaacggaactgcgcgaactgattaccaagcgcgttaaggaacgtgaaggtattgattcaaaggtagaaaacgtcatggtaacgactggttctgaacaagtgctggatctggtcggcaaggcctttattgatgaaggcgatgaagtcttggtagaggatccaacctacctttgtgcgctggatgtctaccgttcctatggtgccaagttcgtttctgtggctcaagatgatcaagggctgcgtgtcgatgccctggaagaagcgctgaagaaccacccaaaggctaaactgctgtacacggtttccaatttccaaaatccaactggcaagacgatgccggttgatcgtcggaagcggattgccgaactggctgctgaatatgatgttatggtgctggaagacaacccatacggcgatattcgctttgaaggtgaacacgtaccagccattaagtcatttgacaccaccaaccacgtactgtacatgagcacgttctccaagatcctggcaccgggtttccgtttaggctgggttctgggtgatccgaaagttatcgacaagctgacggttctgaagcagtcaaccgacctgcacactgatcaactggcacaatgggcggttgttgaattctttgcgcaaaacgacatcaacaagcacgttgaccaaatcagtgctctgtatggcaagcgcaaggacctgatgattgaaggcatgaagaagtacttcccagaaggtgtcaagtacacgaatccagaaggcgggatgttcctttgggttaaggttcctggggttacggatacggttgagctgttcaagaagtgcttgaaggaaaaggttgccttcgtgcccggtgatccattctttgccggtaagccagaaccaggcaccttccgtctgaactactccaacatgcaggaagacaagatcgaagaaggtctgaagcgtctgggtaaggccttgtctgatgccgttaatgaaaacaagtaatgcgaatgattattgagtttagtttcattgatttttcagccaacgttttataattaatgaaatacggactgtcagctgcttagctggcagtttttttgattgattaaggtccgtgacagatattgctaatgccggccagatccagcgagccatatttatgtaatcgataaaaccggataagaattcggaaacacaatcaaatcaggccattgcttacagcttgcttaataaaaatttatttataaaaataattataggaataaagccgtttagattttatcagatcgttgctatcacttatagttatcttttgatcatcaaatatactgattgtaacttttggtaaaaataattatattagtggtacgttttatctttatcaatcaaaaactaggatggagggatgacaatgtttcgccgacattcgattctgttttttcaattggcgattataatggtaatcattgcttcgatggccttgatcatctggtcatcgctttaccagaccaatatgatgattgccatggccgttatgatcggattgggcgttttggtagggatgatgattcccagcatcttaatcagttggctgatcattgcattaacgacgctgggcagtgcgattctgctgcttggctatgtagtgatcgcggcaccgatcaagctggccttgctgttcacttttcccgtgattgcctcgttaactttagtcgccagagaactgatcactggctggggctggctggacaaaaaccgcagcgagattcagtcatacgcggcccactatgatcccgtcactaagctgctgactcgctataatgcggtcaagctgtatgaaaagtgcatgctgtatattcatgatcgcgacgacgtcaacctctggaccaacgtatcagccattcattgggcacacagcactcagtttcaacagtttcatgagcaggaatataatcagatgcttcaagagatcgcccgggttttaaaaatcgaccggctgccttctgaatcgctttactatcttggcaatgccacgtttatgattatctctcatgaactgtcagatcgcgtactggagcagctgaacgatcagaccaagcgcctgctcagcaagatcgaggtcaatggggccgcggctcagtataaatgggggacgcagaagatcgatcggcaaaacgtggcgcacttcatgacgtttgaaaaggttgatcggcatctgcagcgggaaatggagactgacattgtcaccgaatatctgaaaggaaatgtgatcgatggttaggatctttttttggctggcgacggcaattacgctgctgttcttgctggcaatggttgttttgtttatctgtaactggatcatctattatcgcattgaagagatggaaacgcatggtctggtaagaaacgatttgacgcatgctgaagaagatctgttaaagctatcgcctaaagagcatattaagcggcgactaaaggaactgggggtgaagtcggctgatgatcagtgaaataatgatggtcgtgacgctggtgtcaatctggctttcactgttgatgtcgatcattacgctgagcggagcaaccagtttttggttcaagcacagccagattcgtgctgatgtcttgccattgaaacgctatcccatgatcaccctggttgtgccggctcataatgaagaaatcgtaattgcccagactgccaaggcgattttggagctcaactacccccaggacaaggttgaactgctgctgtatgccgataattgcagcgacgacacgctaaaagaaatgcataaattgattgcgcagccccgctattttggccgcaacgtcaagatcatcaatcgtcatggtacgggcggcaaggcaggggtgctcaacgatgctctaaagatcgcgcatggtgaatatattggcgtttatgacgcggatgccattcccgagcgcaatgccctgtattttttggtgcaaaaagcgctggaggatcctgaacgctatgtggcggtgtttggccgtaacaaaacacgaaacgcacagcagaactttctgacgcgctgtattaatcaagaaatcgtcgtaacccagcgaatccagcattgcggcatctggcacatgtttaagattggccggattccgggaaccaatttcatcattcagaccagcttcgttaaatcaattggcggctggcgcaatggggcattgactgaggataccgacatctcgtttaagatcatgcagcagaaccgcttgattgcattggcctataactcggaggcctttcagcaggagcctgagacagtgcatgactactactttcagcgactgcgctgggccaagggcaactatcaggtggtgatccataattttagacatctgtttgaccgcagcaactggcgcgttaagctggagacgttttattactcatgtacgttcttttggttcaatgcggcgatcgttttatcagatgtgatcttttttgccaacgtggtcacgctgcttttgcggttggtagtgcctagtctgacggtgccgtttacttttggcgaaagcaacatcctgattgcgcagctgcttttattcaactggcttttgatgatcaacctgtacgttttacagatcagtattgccatgtcgacgcagtttggccaagcgactaccagtcagctttggcttgccctggcctcctattttacctattcgcagctgtttatcgtcgtttccgttcatgcggtcatctcggtaactctagatgcgattctgcaccgcaacggcaacgtctgggtaaagaccaagcgctttgatgattgatgatgggagattgcaatgaagctcaataaatatacctggatctttgttggcctgattgccgcggtttatctgggaaccttgctgtgggtgcgactgaccaatccagtctatctgcagcagaacatgtatcggacctgggaaaaaagctatgtcattcatcccagagctgatcagtcgtttgtcaataccagtacgaacaacaaccatcaaaaaccggtcgcactgtccgaatcacagggctatggcatgtggattacgatcatggccgctaaaaaaggctgggcgagtcggcaggattttgatcgctttgtcaactattggctggcgcatcgtgattacgttggcgatcagcaccagacgccgacttatctgatgtcttggcggcagtactataaccggcatcatcagtgggtggctgacgtcaacagtgcaaccgatggcgatgtgtatatcgatatggcattggcgcaggctgccagacagtggccgtcaaaagcagactattatcgcagcctggctaagaagctgagcagcgacattctggcctattgagtataatccacagaccagagcgttgacggttggcgactgggtgaccaaagactcgccatattggcggctgatgcgtacttctgacgtgatgccgtttgtgtttaagaccttggctgagacaacggacgactcgcgctggcagaccgtcaacaatgcaatgctggatcggttggttgacttgagccgccagcatcacaccggtttggtaccggattttgcctggatcacccgaaattctgtcaagccggtcaagccaaagacgatttctaccaaacaggatggcagctatgactttaatgcctgtcgggtaccaatgatgatggctgtttctgatgatccgcgcgctcgaaaagtattaaagaagatgctgcgtttctttagtcatcagcaatatgtcacggccggctactcgctaaacggcaaacgcctggttaagtatcagtcggccagcttttcggcaccgatcttttttgccgtcagtcatcatcgtggcgaaggctttgacaatctgtttgacagtcaaaaatacatcttcagccgtcctctgacgcgcaaaaactattatgacgcgacgcttacggtgatcgcggctttggaaggactgaactaaaatgaagattatgacggtaatcggtacgcggccggaaggaatcaagatggcgcccgtaatcaagctgctggcccaagacccggctttaaaatcagtggtcgtaacgactggccagcaccgcgaaatgctgcagaccgtttttgaagtgtttgattttaagcccgaccacgacttaaagatcatggcgcccaatcagacgctgacccagattaccagccgggtgctgcttgggatggaacgcgtcttgcagcaggaaaagcctgacttgattctggtgcatggcgataccagtacgaccatggtggccagccttagtgcgttttatcatcagattccaattggtcatgtggaagctggtctgcgtacctgggacaagtattcgccatatccagaagaaatgaatcgccaattgaccgatgacctggccgatctgtattttgcgccaaccaagcttagtcaagctaatctgctaaaggagcatcatcgtgccagtcggatcttcgtgaccggcaataccgcgattgatgctctgcagtatacggttcaaagcgattatcaccatgacgttctggctaagatctcgccccaacagcgcatcattctgctgacgatgcatcggcgcgaaaaccaaggcgcccccatgcagcgggtttttgaagtcataaaaaaagaagttgctcggcatcccgatgttgaggtcatttatcccgtgcatctaagtcccaaggtgcagcaggctgcccaggcggtatttaaagacgagccccgtgttcatctgattgctcctttagacgtggttgactttcataatctggccgcgcgcagctatctgattatgaccgattcaggcggcgtgcaggaagaggcgccctcgttaaacaagccggtgctggtgttgcgtgacgagactgagcgtccagaaggcgtcaaggccggcacgctacgtttggtagggacggatccgaaccgtgtcgcccaggcaatggaggagctgctttgtaaccagaccgtctatcaaaaaatggcgcaggctcctaatccatatggagatggtcatgctgctgagcgcatcgttgccatctgcaagcagttcttaaattccaaaaactgatacacattttaagatgatcccggtctcaagctttaggcagctgggatcttttttattgatggactggctaactaactcaaataggactagactaaaaatgatttgaatttatggagtagggagaaaaaagtgaaaaattatcgaatgcagagcctggtattggtcttgattgcctttgcgcttggctttagcgaatttattatcgtcggcgtcctgcctgacattgccaagacgtttcatgagccggtaaccattgtcggactgctggtaacgatctttgcgctggtttatgcaatcagtacgcctttgattacgatgctgattggaacgcgcagtctgctgaaagtcgagctggcattatggattgtttttattctaggcaatgcaatggtgatggccgcgcccagctatccgattctggtagctgcgcgggtgatcacggcaatcgtttctggggtaatcatctcgattgcaacgacatttgccaacagtctggcgccgtttgaaaaaagggcggggctgattgcctggaccttttccggtttttcaattgcctcagtctttggcgttccagtgggtacctggatttcaatgcactttggctggcgggccacgtttggcgtgatcgttatcgtcagcctagtcatcttatttatgatgcgggccagtctgccgattgatctcagacagggggcatcgcagcgtttcagcgatcagtttagaatctttggtgatcgccgcatctatatcgggatgctgctgccaatgtttaacctagccgcgacgtataccttctacacctatttaagaccgctgctggcaggaccactgcattttaagaccggcgcgatcacgctgcttttatttctgtatggcttgatgtctttgtttagcaatcagttctctggccggctggttgaactgggcggcttgcgcaaaatgccgcttgtgcatggtctgcagctcatgttgctggccatgctggcgatcagccttgactggcggtggcttgccatgatcgtgattatgctgatcggcacgctgatgtatctgatcaattcaccgattcagctgcattttatcgatatcgctactcatgactatccggcttctttagtcatggcgtcttcgatcaactcgattttttccaattttggcattgcgttaggatcggcaacgggcagtctgttggttaagatgcatggcttgagcgcggttgggccaggcggtgctgtttatgccggggttgcctgtggattgatgattttcttaaaccgcatcaatcaaaaacatggtactgactgagtaaaacgacgactgccaatgagcctttgttgattttaaaaataagccttgacatttattaaaaagtgattagaattaactcataattaaaacgaaacgatgcccctgggatgagtagtcgctttaagcctttcagagagctcttggctggtggaaaagagcagactttggcaatgaagatggtcctggatcagtggcgtattggcgaaatgagtagtcagtaccggcaagcgaccgttatctcgctgagtcaatgacttgataaggctgttttggcgacaagacggcaaataaaggtggcatcacgaaaaaactcgtcctttaaccagggcgggcttttttattaaaaggagtgattttatgacgttcaaggtagctgttgcccagatcgatattgcattgggcgaacctgaccgcaactatcagacggttacgcaggcagtcaaagacgcggctaaagcaggcgcagacgtggtggtatttcctgaaatgtggaataccggctatgccttgactgaattggcacggctggctgatcaggatggctggcgaaccaagcagacgctttctcgcgccgctaaggaaaatcagattgccatcgtgggtggatccgtggcaaccgtgcgtgctggcggtcaatactacaatacgacctatatctatgatcaaaacgggaacctaaccggcagctatgacaaggtgcacctgtttggtctgatgcatgaagacgaattcattcaagcaggcagtcaaggcagcttttttgaactaaaaggcgtcaagagtgccagtttcatctgctatgatctgcggtttccagaatggtttcggacggtagccaaacagggtgccgatgtaatctatgtcgtagctgaatggccgacgccgcggattgaacagtgggaggcactggtcaaggcccgcgcaattgagaatcaggcttttgtcgttgcggtcaatcgcgttggtcatgacgacgaaaacagctacaatgggcactcgctggtcgttgatccgttggggaacgtgattgccgatgcaggtgaaaaagcaggcctgacgcttgctgagctggatctggacgaattaaagacggtgcgtggtccgattccggtatttaaggatcggcgtccagatctgtatgactaaatcttgccgtattgacatgactaaactttgaaaggaagatcataatggaatttcaacaatcaaaactactggacacgttgccaaaacagttctttgccaatctggttgccaaagtaaatgccaaggtagcagaaggcgtggacgtcatcaacctgggacagggcaatccagataagccaacgccagaatatatcgtcaagagtacccaaaagtgggtggcggatccgaagacgcacaagtattcgccatttcaagggctgccagagtttaagcaggccgcggctgatttttatcaagaaaaatatggtgcgcatcttgatcccaataccgaggttgcgattctaggcggctccaagattggattggttgaactgccatgggcgctgatgaatccaggcgacacgctgctcttgcctgatcctggctatcctgactactggtcgggagcggctttaggcgaggttaagtttgaaaccttcccattgctggctgaaaatgactttttgccggacctggataagattccagaagccacggcacagcgggcaaagtttatgtatctgaactatcccaacaacccaaccggcgccgtggcaaccaaggaattttacgtcaagctggttgaatgggctaagaagtatcacgttggcattatcagcgattttgcctatggcgctctgggctttgatgatcaggcaccggtcagttttatggagacgcctggtgccaaggaagtcggtgttgaattctatacctactctaagacatttaacatggctgggtggcgaatcgcgtttgcagtgggcaatgcagatatcattcatgcgttgaacctgattcaggatcacctgtttgtcagcctattcccggccctgcagtatgctgcgatcgatgccttaaagaagccagagcgtgatgccgagattaaaaagatcgtgcaccgctacgaaaaacggcgcaatgccttcgtgcaagcaactgaaaagatcggctggcatgcctatgtgccaaagggaaccttctatgcatggatgccggtgccaaaaggctttaccagtgagacgtttgccgatctgctgttggataaagcaggcgtggcggtagcaccgggcaatggctttggtgagcatggcgaaggatatgtccggattggtctgttgattaagcctaagcgcctggttgaagccgttgagcgaatcgagaagctgcatttgtttaattagccaaccgtcaacattcaaaagcatcagctgaaactgctgatgctttttttgttggaatgaaaaatggcttaaaagcagattttgtctttcttttaccagaatatacgacagattttgctgaaagcggttgaaaatgtttcctgaattgcgttatccttaataggtagtaatatcttgataaatcaaacaagaggtggtgttaacaaatgctaattgtcagcaaaagactcacccctgcatttaaaaagacgctgattagtgctccaaagccgcaatacgttccagaaacgtcattatgcgactggatcattcgtgaggtagccatgcaggattatggcatgctgctgtgtatcaaccgcaatacgcagatgccaatcgtgctgccgggtgccgagtttctaaaagtcagtcccgtttcggttttaagacaggttttaatgtttgtaatggctgggatgggaatcagttccatcaagcttactgaatacgtcaactgcattgcgcacggtgaggtcagctatcaaaacatgacagccgacttcctggttgagaaagcctttcgtgcatacacgcccgagctgaccaagattgacgttgaacgactggatgatgaccagctgctcaatcagttgggaattctttccttaacgctgggcagcagtacaaaggtcttttgcgatctaagagagcctaaaatcgcaccagctgttcgttttaaagatcagatcaaccaagaatggcgtctgccggctaaaagaaaaggtagtatggcagaaaaatcggcatgggagtttgattatcgcttgttccatcaatgggatgatcagattcaaaaaacgcctgcttggacggggtatgccgcgatcgtacgggaaatgcgccaggtcaatgatgcctttttacggcgctatcatgactacctggaacagacggaaatggttgacgataccaggatgcagcagtatctgcgtttggctgatgtttatctgaatcgctatctgattgccagccatccagaaaccctgaccagcgacttgaccgcccccacggcctatctgtttgaatggctgttagagcatgggcagatcaaagccgagaacgtgcagctggtaattgatgccatgctggcgtttggggcgttcattaaagtggcaggcgtctattccacgctggatgaggatctgtatcgtcaagcggttcgtgacggcggtgatcgggtacgggctttttttaaggcagccgcagcccaggcccaattggaagctaaagacgatgcaccagtgagccgtcaagaggttgccggcagtcaggtggatacgctggtacaggaattgatggcactggccgatgatgagcggttggttgatgcactggccgacgttttcaatcagacgccggcgctgattgataagctgctggctaagatgacgcccttgcagcggcagaatctggctcgaaaactggcacggctgcttgctgatgatcatgatgactgataaaatcaatcccctctgcctcaaaatcgatgcggcagaggggattgattgacttaagctgatgaaaagcagtcaagattgagacgactaaatacatcggttgttgccataacgtttgactgatgctgggcagcattagggacggtcgataatcatgacttaaagagctggtccgaatactgcttttgagagggaacgttactcatggctagcggcgttgattcaatgcaaggctaatctggttgcagttttttaatcgttaccatagtcagtgcctagcaggattttatggcaacgcggccgaagagcattgaacgaaaattttcttgcattgcaacagcagcctgtcaatgctttgaaaaccaggcttcattatccgcacgggaagattcctttttacataaaaccattgacacacatcaatcttggtgcagtgatgcctatcattgaacgttttttgcgtgattaggtcgcagctatccatcagccagctgatattgtgaagaaaattagaccttaagtaggtaattgtagaggaactgtatatgcggccgactgaactttacctactattgacgcctttttccgaaatagtaggtaaagatttatattttggcgctgataggaggtgattgggccagaccgactttgtgaattacctacgattaggccttttttacttaaaagtaggtaatattaggggtccctaactcaatatacatttatttt

SEQ ID NO: 1843 - DNA, 4857 bp, Unknown
  gut microbiota DNA sequence
caaaagaaaagcatagtcagccttactcttgggagcaacggcaccgtaatctttaaaccgaggatcttttaatcgactcgcatcagcatcccatttttgtgaatatggtggattagcaaccacggcatcaaagaagtgtggacgatcaattccatctttatccaatccatctggccaatccattgctaatgtatccgcattgcgcagcgtcatattgccataatcaacgccatgcatcataaggttcatccgtgctaagttgtaggtggtcgtatttaattcttgaccgtaaaaacgtacgcgccctttctgcttaccatttggaatttcatcgcgcactgtcaataacaatgaaccggatcccatcgttgggtcatagattgtaaatgaatcctgatctgtattaatgttggccgctactaattttgccaaaacttttgagacctcatgtggtgtgtaaaattcaccggcctttttaccggcattgctagcaaactgtttaatcagatattcataaacatcccctaaaatgtcgtgtccattttcatcatagtagtcaaattcattaaccatttttgccgtcgcaatcaatgctttggtccgtgttgccagattattgcccaaacgactgttgtttaggttaacgtcggcaaaaaccccacgaaaatcccgttcggcaaatgaattcaactgagcattttcttcaaaatggtcaaacatattttggaaatcttcagcatttgccttgctctcttgaatcttttcaatcaaggttgcccaagtatcttctggagcaatcgcatatcccagtgcacctgagatatcttccaggtagtcttttaaatcctcacccgtagcttcttctcgatactcatcattaatgctcttaccatcaatatggtccaaaatatcattgtcaactaaatacttttcctgtttttccgataaataacggtaaaacataaaaccaagaatatagttccgatattcgctcgcgtccatcgttcctcgcaactcgtttgccatactccacagttggctggatacatcctgtgccttcgacatttttattctcctaactctaatacttacgtttcatcaaatcagcaaaatcattaaaagcctgccgcagatggtttcgatactgtacctttcgtaggttcttcacatctttgtcatgtgccgcatttttatacgaattctgtgcttctttgatgatgttcgttaattcaccttgcgtgtccaaatcatcatgttccaatgtatgctgctgaatcagacgagcaatattcttacgattattcccgtcagttagatccatcaagccccatttttgcatgaatcgttcaatctcatttgactcactgcccttagcaaatgaccgcatcaatttaccggcatctttaccttgcaacgggtagacactaccttgcacagctcgatcaaacaatgccttaataaatgccaacaactgagccgcatatttttcatcctcaatcgcattggtgtagctttgcagctgctcatgcgtcttcttggcccctgcctcatcaccgctgtgcagttggttggctagttgtgccaagagttcttcaatgtaatcataatttacgcgcacgtcattaacatgctgcatcttaagcgatgggattggcatatcgtcatcattgccacgcccactaatcaatctgttcaacttattagcaatgcgcccagtcagtgctgtttcgttttgcttggtcatgctgactttggcaagcagcttttcaggatgcttttcatcatatttatcgtcttgtttgatcttaaccatcagatgattgtactcatgcatttgatgccacaattcaacttgtgcactctcactctttggcacgtcatcaaaattaccagtcagctctttaatcttttttacgttatccttcagttcgtcaactagctcctcataagatggttctacgattccagccggtttatcaagtaattcaccttgaaccgcggctgattgacgattggcataaacagttaatgctttattcatcaaatcttctgaatgttgtggccaacggtagttaacgatccgcccaaatggcttttgatccatatcctgcacacgattagttcgtgaatatgcctgaatcaagttagcccctttcaatgtccgatcaacgtaaagtgtattcaacattggagcattaaaaccggtcaacaactgatcaaccacgattaccaaatcaagattaaccgcatcatcgcctaaatttcttgctaaacgattggttacgtcttcggtatactcttttaccgtatcagcgccaaaattggtgccaaactctgcattataggcttcaatagcacgactaaggcctcgattgttttcaagctgattatcaccattggtcgtatcctgactaaacgtaattgctacttttaagtgttgatcagccggtcgcagcttattttgtcgctgaaattcatcaaagtacatcatagccattggcgttgacgctttaccgccaccaacatgggtcgtcaacatagcactatacagtccatgattggatcgatttagccaatacttatagatgtcttcaaccaccaagcgaacgtgttctttattattgtcatatacacttggttgaatcagatcgtccatatcggccggcgtcagatttttaattcgttctttgatctgttcatcagtccaagatggattaagctttttaaagaattttggtagatattcattttcaagcgtttccttaggcagcgtggtttgaaaatcaaccttgaatcccaacacgttacgatcagcaatggcttctctaatcgtgtaaatatgcagtggatcgccaaagatgtctctagtcgtaatcaccttagccgcatcttttcgtttaggcttattaacggtctcttcatcaaacaccggtgttccagtatatccaacccacgccgaatgcggaaaggcctttttaatatctttgatcatgtcgccactagtcgagcgatgagcctcatcaacgataaagactatatgctgctgatcagtatacttatgccgtcgcactaaggttgccatcttttgagttgacgtgacgattacgctgcgatcctttttctttttcagtttacgacttaagtcaaatacattggccgtatccattaccacgccgccaccggttctttcgggatcgttatcgggatcataggcttggtattctgccacggtttgattagtcaaagcaactcgatcaactaaaaataccactttatctacattaggttgacgtgatgccaaccatgccgctttaaagcttgagatcgttttaccagatccggttgtatgccaaacatagcctagacgctgatcaccagcttcaaagtcgtgtgacctgatcttatccattactcgccgcgttgcgtaaacttgataagaccgcattaccttaatcatctgatggtgtggcgtaccatctaaaatcatgtaattagttgccaattgatgcgccattgggatcgacagaactttggaggcaaacaaacgccaatcgtgaataggtcgattagtcttttcgtcttgccactcaaatgcaaaatcggtattaaaatgatcagcatcattaggcagtgccatgtagcgaatttcattaggcgtcatgcctacaataatctgcagagttgaatagataccactatactgccactcatccaagtattgccgcatctggttaaatgccttatcagtgctgattgagttgcgtttttcttcgatctgaataattggcaagccattgatcaaaagcgtaacgtcaaaacgacgcgactttttcccactaataactggatcacgttgaatctgattaacaatctgatatacggtatcaccaccaccaatctgatcttggtcaaataccgtcaaaatgatctgctttccatcctcgtcacgtgaaactgctacttggcttttaccgccaacgccatataaaaacattcccgctttgtatgggttattgagtccttcaatctgctgcctcacctgattaaattcggtgtcagataagggtttgccatctagtttatcttggttgttttgttcaagaatctttttgaaattagcccaaagctggctggttgtcttaatatctgtcgcatatttccattgctttgtattaccaacatgctgtagatattcaatcaattcatcttcaaaagctaattctgctgagttattgctcttcataaattaccttcccaaatagttgtgatacataataaattataacctttggtggcgcttttaatgagcatcttaaagagattctcctaaagaaatatagttatacagtggcaatttcaaattgtataaaaatggcagtttaaaaatgtataataacggtaatctcaaattatacaattatggcagtccactccactgtcaatcaaatactgtattactctacagtgatactatgaatgctctcttatgattatctaacaaacgcaatcattgtggcttccataactttgaaaatctgctttggcgcattgaatgcattctttattaaaaaatccccacttcatttttgaagcaaggaatagatcttcaacaatacaatttgacaaagatacttattttacaaaaaaccgccaaacgacgtaatgtcatctgacggttaatcagttgggctagctgggttcgaaccagcgcatgacggtaccaaaaaccgttgccttaccacttggctatagcccaataaacaaaaatggaggatacagggctcgaacctgtgaccctctgcttgtaaggcagatgctctcccaactgagctaatcctccataatgcatggcaatgc

SEQ ID NO: 1844 - DNA, 48543 bp, Unknown
  gut microbiota DNA sequence
ttgcaatagatctgcttaccaaaggctgactattaaagtaagcgtttacagaaaatacttgcatgatataatgtatatataaatcgcgctatgaaagaaggctgattaaaatggtcgccaataaacccactatcaaagacgttgctcgtcaagccggggtttcaattgcgacggtttcacgagtgatggcaaaaaaagccaatacctatactcctcagactgcccaacgcgtctgggatgcagctgccaaactgggctatcagaaaaacagcgcggccgcagaactggcaacgcgctccagtgacaagattgccgtaatcgtcagcaatccaccaaccaatttttcgactggaatcttggatggcatgcagcagacagccctggcccataatcatcatattattatcctttatgccggcaatcacagtccccagctgctccaccaagcgattaaagatgccacggccggtccgcgcgccggtattctgctgattggtagccagattgatccgcaaagccttaaaatgctgcaggattcacagctgccggttaggctggtttccaactactcttatgaattaccgctacagtttatcagttctgataatactgaattggctgctcaaagcgttgaatacttaattaaaaaaggccaccgccgcattggtctttttggcattgatcattcacataccggtctccagcgccgcgccggctatcaaaaggccatgtatgaacaccacctgccaattgaacaggattggattcaatatggcgattacagctatgaggctggccagaccatcatgcagtactgggctgacctcaaactgagcgcggtcgttgctgccagtgatctggttgcaatgggcatcatgcgtcaggccgcgcagatgggaatcaagataccgcaagatctttccatcgtcagcattgatggtacctttctttgcgaggttacagatccacaactgaccagcgttacccaggacttttatcaaatcggcgttaacagcgtcttagacctgctcggcaatgctccttctgaactggtaccgttcaagctggttgagcgtggcagcgtagcagaacagccaaaataaaatcggattcgccaattgacgaacccgattttttagtcttcttttttgccaaacaaggctgctaatttggctgccatgtccggatcgagattatctgccaacgtactttcagtctctgctttttcttcttttttgacgcttgtcatctgttcaagctcatcagcaaccgcctgctcacctaagcgaattgggttaatgtccaatcgtccgccggctgcatcggcatgaccgccgccttgataataagtttccgcaaactttgccacgtcgactttgccattgctgcgcaaagaaacgcttttaggactgattaccagcgcagcatccagatccggctgctgtaccaatagctcatgcgcgatctctgatttataatcgctggcatagacgattccaaagcggtgcccatctgccgttgcctcgaccacgtcttttaagtgtgactttaagtacttggcccgtcgttcgttcaaggtttgaatcagcaggtcattgtcttgacgatacgccgtccagcctttgtcaaaaacgctttgcacaaaggcttcggaatgatcaagcggataaaaccagaacaactgattgaagtcatcagcggcctgacgctctttttcgctcatatcgggatcattttgccaatcccacgtatcataggcacgaatcagctccaccagttccgccaactgctgctgccgaccttgattcagcttaacaaagccaggcagtgtcttaagccaatcccataccaggctggtcgcgctgggactgatttttgcatcagcaggcttaaccgtattggccgcaaacttttgccgcaatgccgcttcagtctcatggtggtcaaaaaccagccagtgattggcaaactgctgattgagctcctgcatcgtatgctcgctgtctggcgtcatatccataatccagacatccgttgccgtggctgcttcgggacttttgaaccagtagtccagctcactgtcgattctaccggcaccgatactggtcaagtcaaactcagcatcgggaaacataacgtcttggaccgtcttgaccaatactggggccccaaagccatccagatcgttatgcgaaaaaattttaatattgcgcttagccataactaacttcctttgtgattttgattttattataaccgattcaacagctaaataagcgtttcgccagcaaaaccgacctgctttttgatttcagcatcccttgagctgatttaacatccataatctcatgcttgacaactgacatgtccgcttggctttgctaagatggaatcagtcaacttttagaaaagaggtacttgtgatggtctatgattatcgtcatgaactaatcgaacttttgaaccatactgccagcgacccggaaagtctgctgcagacccaacgcagtcttacgatcatcgtcgacctgcttaatcagctgcagccggttaaagagccgacgtctactgaaaaacagtctgccaagccaggctatcaaattcggcgtaacgtcactgcaccaaagatctcgctgggccagctgatcaatcagactgcggcaccaacgcccaagccgcatgaaacgcctgcaaaaccgcaaagcaataagcagcctgaacggtcaacggctaaagcagctgccaaccaggcttatttaagagacatccccgtcactgctaaaaacgaagcgccaactgaaccagcagctgcacctgagctttcggaagtcgaactgctggcacgtgacaattgctatcccgtccaccgtctgttaagcggcgcggaaatcaatcaccgtttctattcagaaagcattctgcacaagctgccatttccaatcaatgatggcgatgtcgtgcagctggaccgtcagcgcttgatccatggcaaactacccgtcatcaatcgtgttaccaatgaccatctggcaatcagcacgacgccaaccaaagttattgaatatgccactttggaaccagttgccggctcagatgtcctgcagatcaaaaagacgctcaagggcaattcgattctggatgagtcgcatgccaataccatcgtgatcgatccatacaaatatgccagtcggaatctcaagcctggcatggtcatcgactttgcctactatgatcacggcaacggaatgcgcgatgccaaggctggcgagattcgctggattcacagtgagcacgagtttgatacaaccaaatcgccacgcaagctgcagcagcccaaaaaagttaaaaagacacgccacgaatacagcgacaagcttgactacgacttaaatcaaaaacgggtcttagtggtaaccggggcccgtgaccgcgtacaggatcttaaagccgtcgttgccaagcatcatggcgtcttctacagtctggatgcctcaatggaagaaaacgtctccagtagcaagatcaaacgggccgttaaggatgccgatctgattgtcgtctgcatcgaccgtatccatcatcgcatcagtcagctgaccacgcaccatgccaagcgtaacgaccggccatttgcgattgccgctacgaccagcaataccgctgtcgaacgcgccattttccgggctctcaatggcaacaatgcctacgaaagcagcggtcaggacatggcaaaatacgtcagcgccgattaatcagcagctgcttatttttaaaaccaaaaaggatgcgccagctcttgacgcatcctttttcattttctgtagtttttattcgttgtccagcttggcagatacgtcatcaaaacgatccttgatatatttagccgaagcagccagcttgtctttttcttcatcagtcagatcaagctgcagctgccgaaccagtccttggcgaccaataatggcagggtagccgacatagatgccgtattcttcgcggaagttggagactggcaattcagcgtgcgcgtcattcaaaacggccgtaaccagacgcagagccgctgccgcaatcccaaagttggtgtgcttcttgccatggaagacgacatagccgcctgcccgcacgtcttcagccaattgatccagatcaacatcgtcacgatccttagccaattcggttacgggatgacccatgacccgtacctgtgaccaagcagagaattgcgagttgccgtgttcacccaggttgtagccagataccgagcgcggatcaacgtcaaacttttgaccaacgacttttttcatgcgtgaagtatcaagcagcgtccccgtcccgattacctgagtctttggcagaccagtgtacttttggaacagcgcggcaatcacgtcacaaggattactgattgagaccagcacgccatggaacccgacttcttttagtttagtaccgacttctttagcggccttgctggtaaccttcaattcaacaaatcgatcatgcttggcatcgtcattctgcacgccgatactgccgaccgcgatcacgacgacatccgcatcggccagggcttcatagtcgttgcgcaccactgtggtatgagttggcagattggccgccgcgtcttcaaaatcggttgcatccgaattcagctttagttcgttggtatcaatcaataccagcgtatccgccgtccctgctaccagcatattgttagccagcgttgaaccaacatttcctgaaccaataacaccaacttttcgcgtcataattacgcacgacctttctaatctttttttaatctttttaatttatgactaagaatttaacatttttagattcaaagtcaactcattttaaaaaaactaaattaaaataagattaatccttttagacagctggctttcaattaatttatttaataaaaataagcagccggcttaattatagctgactgcttatttgactatgatttgcgcaagctcagtttctcgacgtttaagaccttatccagccagccttgataaaaactttgctcgtggctgaccaggatcaggttcccgggatattcttgcagggcttttttgagtccttccttggtttcatcatccaaatgattggttggctcgtccatgattaaaaagtttgatggcgtcagttccaaaatggccagcttaaccttagtctgctcaccaccagacaacaacgacagcggcttttgcgtattagcggcattgatccctgctttggccagcttttgtcgaatcgtttttggctgcatggttggaaaaagattttgaatcgtttccagtggcgtcagattaggttcatcccacaccagatcctgatcaaagtagttaatccgtgctgaaggcgaaaaagcagccgtcccttgcagtgctgggatcttacccagaatcgacttgatcaaagttgacttgccgacaccgttaaacccggtaaacagcagcttttcacccatcgtcatcgaaaacgtcacgggtgcgagcagcggatgaccataaccgactgacagctgattgacctttaaggcattggcagaaccggtattttcataaggaaagtgaaacgtcgcctttagattatcagttggcggatcaatccgcttcatccgagccagcatcttttcacgggatttggccatggttgatttggaacccgccttgtttttacgaataaaccgctctgccttttcaatgacttcctgctgcttttcgtattcgcgctcctgggtctccttgcgctcggccttttgccgcattgcctgcttaaagctgccgcggtacttggtgatcttgccaaatgccacgtcacagatcgtgttggtcacgcgttccaaaaaatcgtagtcatgtgaaataatcatggccgcgccgtcaaaatcattcagatattcaatcagccattcaatgtgcgcggtgtccagatagttggttggttcgtcaagcaggatcacgtctggattttccagcagcattttggccaaaataatttttgagcgctggccgccactcatttcggaaacgacatggtccttaccaatgtcatttagccccagcccattcataacgcgctcaattttggtttcgacctcgtaaaagtcagccgcatccaaacgttcctgcagccggccagctcgttccaaaaggcgatcatccatttccgtggcatatcttgcataaagctcattcatctgctcattgatatcataaagttcctggaaagccgtgtgcagaaactgaatcagcgtcatcccctgcggaatatcaacatactgatccaaatagccgatcttggtgtttttctgccacttgatatcgcccgcgaccggcagctccttgccaatcaggattttaatcaaagttgacttgccggccccgttttgaccaacgatccccatatgctcatgtttttccaattgaaagctggcatcttcataaagcttcttgtcggcaaagctcatcgtcaggtttctaacatccaaaaccgccattttctctctcctcatctaatttcaaaaataaacaacgtgcttttcatgttagcacagaccttgcttgccgttcaattggcagcggtaggcttctgagacattgaaaatatttatcagtgctaagatagagttgttgtattgttaaagaatctaaaaagaaggcatttcatggaaattttgacaatcttaggcagtccccacgatcctgccgtttcaacgatcttagcacatcaattgatcaaaggagcccaggcagcagccaaccacgttacgatttttgacgccggccatcatcccttggctcccgttaaaatggatgccgacaatcacttattgccgggtgatgccgtaactgaacgactgcttgatcaaatggtagccgctgatctgatcgtttttgccacgccaatgttttattatggcatgtcctcacagatgaaggccgtcattgatcatatgggcgagcgtgatgagcagctgcatgatgacaaacaggccattttggttgccagcgcgccgcataatgattttgacccgctaaagtctgaattcaaggcgatttttgatcacctgggctggaagtttgctggacaggtcttagctggcaaggaaaccacaccacatcatctaagattttatcccgacctggcctacgagttgggcaaaagtcttaactaaatcgcaagtaggcttgcagcagttctgtcagtcattccagccgttaagtcaattgataacggtcttttgtctctgccaggttcaaaatgacttcatatttttttcaaatagtcttcactgtcccatcattttgtcttgttaaattaaaaaccgtgcggaatttcgcacaactgagcaaaaaacaaaaacatggagtgattactatcaagaaaaaagcagctaaggccttaattgctgccgtgggtgctgccggagccatgaccgccgcgcagacgactgcccatgctgatactacggttaccgtagcttcgggcgacacgatctgggcctatgcacagcaatacaagaccacggtttcttcaatcgtttcggcaaactcactttccaatccggatctgatcttccctggtcagcggattacgattccagaaacgaccatcaatcgacaaaagaacagccagcgtcagacgactaagactacgacggccagttccacggctggttccgtcagcgccagcgtttttgctgattcaagcaccagctcaagttcagcggcaattgtttccagtgctttagatactgccagtcaagccgttgcctcaatgacggcttcgagtgatgctgcaactgatacccaaacgaccaatacagtatcagctcagtctgctgattcagaatccgttcaatcggcttcgtctgctaatgagaatactgctgccgcgaccggctcaactgaagcaacgactgccgcaacaactactgcaacgccggcagccgcaacaaccgaatcagcagccagcacggcatcttcagccacctatgagtccaactcagctgctgccaatgccgcaatggccaactacacgattacctatggcttaacggatgccgccagtgccagcgcaagcaccacttcaacggcatcaaccagccacgtggcagctggtcagggactggcaaccgcgcagtcaatgattggcgttccttacgtctggggcggcaatacgccaagcggttttgactgttccggactggttcagtactcctatggtctgtccagcagctatcgcacaacgacccaacaggcaacgctgggaactcactactatgatgttgaaaacgcacccgcgggagccctctacttctggggaaccgattcagcaccataccacgttgcaatcgcagaaggaaacggcaactacattcaagcgccaactcctggtcaaaacgtgcaagaaggcaatattcaatattaccgtcctaactactacatcgttatgcagtagctttaaaacttatcaacattcttatcaacttaacgcttaagacaggctcttaagcaaaaggcgctcgatcgcatcatccgcgaacgggcgtcttttagttttcttctagaattgcttgggccgcgtgccaggccagggccgcacatttgattcgagccggaaactgtgccacgctgcccagaatcgcggcatcctggagctgctcttgcgtctgggcactgattttttgaccgataatcagattcgaaaaagcctgaatcagctgttgggcgtctgacaccgatttgccaatcaaaacatcgcccatcatactggctgaggcttgcgaaatcgtacacccgctgccggtaaacttaaggtcgctgatcttgtcgtcatcgattctgactgtcagattgatggtatcgccgcaggttggattatgcagcgtggtctgcgcggttgcgtccggcagttttccttggtgatgcgggtggctggcatgtgctaaaaccaacgtgcgatataaataattaagcttgctcaaacccattttcaaaaaactcctttgtggccttaatcgcatcaatcaagcggtcaacgtctttttgatcattatacaggtaaaaactggcccgcagagtcgcattgacccccagataatccatcaaaggctgcacacagtgatgaccggcacgaatggctaccccttccagatcaagagccgtcgccgcgtcatgagggtgaatgccagccagattaaacgccaagacgccagtatgccgatcttgtgggccataaagcgtcaagccatcaattgccaacagtttaggaatcgcgtaagcagccagttcttgttcatgttccgcaatcgcttgcatgccaaactgacttaaataatcaatcgccgcgcctaaggcaatcgcaccgctgatgttgggcgtaccagcctcaaagcgccagggaatcggtttaaaagtggccgtctgctgagtaacctgatcaatcatctcgccgccaaactgactggggcagatccgattcagccaggacattttcccatacaagacgccgatcccagttggcgccatcatcttatgaccagaaaaagcataaaaatccgcgtccagtgcttgtacgtcaactggcagatgcggcgcggcctgggctccgtcaacgaccaggcaggcaccaacttgatgcgccatggcactgatttttaaaatgggatttaccacgcctaaaacgtttgaaacatgggctacggctactattttagcccgtgaatcgattttgcacgcggcatcgttaagatccagctcctggcgatcatttaagccgatcagcctcagctcagccccagttcgcctagccagctgctgccagggaaccagattgctgtgatgctccattatcgtcactacgatcgcgtcatttggcttaatcagctcactcagtccctgcgcgatccaattaatactttccgttgttgaacgcgtaaagacgatttcttcagcttgcttggcattgataaaggcggcggttttttgccgagccgtctcataggctgcagttgcccgctgcgccagcgtatgcgtgccccgatgaacgttggcatgatcatgctggtagtagtgctcaatcacctttaaaaccggtgtcggcatctgagccgttgccgcgctgtccagataggtcaatggctcatcgttaactcgctgcttaagaatgggaaaatcttgtttaatactttcaatatccacttggctcgccttcttctaagaaaaaactcataaaaatctaacttttagttgacaaaagatcgtgacactgattatactttaaaacaatcaaacacgcgaaaggagataagcaaatgagttacaaccgcatccaacttaatattcgttggcaaagccggtagctcagatcgcacggaatgcggtctgggaagtcagatccattctgtgccggcttatttcataatgcaagcctgcatggaaccacatgcgggctttttaatttcccaagaggaggcctgcagactggcttcctctttttattttatcaagcagcaattattcaaaaggtttcggaaaggtggcaaaaagccatgaaaagaatgtataccgtaatcgccattttacttgcgtttcttggggtcgcctacttcaaggaaaatggcggcatcgtcaaacaggccaagcccaaagtcggggtcttaaccttgatgcatcatcccgcattggatcagatctacaaaggctttgtccatggtctggccgaagaaggctatcacaatggcaaaaatattacgatcgactatcaaaatgccaatggtgatcaaagcaacttaaaaaccatggccaacaagctggtcaatgaaaactcaactgtcctttttgggattaccacgccagcttcccaagcactggccaactcaaccaaaaagattccaatcgtcttaggtgccgtaaccaatccacaaggagccggtctcgttaagaacaacaagcgtcctggcggcaacgtcaccgggatttccgatcaggcaccggtcaaggaacaactgcagctggtccacaaatttatgccgcacgccaagacgttagggatcatctacacttccagcgacagttccgccgtcactgaatataaggaattcatgaaatatgccaagcagatgcatttaaatctgaaggcttactcgatttccaacagcaatgacttaaatcaagtctcacaacaaatgctgagcgaagttgacgctgtaatcgtaccaactgacaacacgattgccggcgcgatgcagacactggtcaaaaatgccaatgccgtcaataagcccgttttcccagccgtcgacacgatggttaagcaaggcggggtcgctacctacagcatcaatcaatacaagctgggcgttgaaggcggtaagctgacggccgatattctaaagggcaagaaaaagccatccacgactgccattaagtacatccgtcacggcgagccagtcttgaacctaaagcaggcgcgcaagttgggcttgcacgttccagccagtttccagcgtgaagccgaaaaatatggggaggtaatcaaatgaatctgatcgtatccgcaattggccagggtctgttatgggcactgctggggttgggcctttacctgactttccgcatcttgaatctcgccgatatgacggttgaaggcacgtttccattaggggctgccgtagccgttaccgcaattacgcatggtttttcaccattggtcgcaacccttttggcatttggcgccggtatgctggccgggttggtaactgggctgctgtacactaaaggaaagattccattcctgctggctgggattctgacgatgacggccacctattctgttaacctgcgcattatgggtaagtcaaacatctcactgctgggccaaaagacgcttttttctggatcgtttatgacctcgctgccgcagtattttgacagcgtcgtcttgggcatgatcgtaatcgtcattatcacactcctgctgatcttcttcttggataccgactatggccagtcatttatcgcaaccggcgacaatcccgtgatggctaaatcactaggaatccacaccgacgccacgatcaacgttggtctcatgatttctaatggactggttggactttgcggcgcgctggttgctcaaagcaatggctatgccgatgtcaacatgggaatcgggaccatcgtaatcgcactggcttcaatcatcatcggcgaagttgcctttggtgagctgacactgtcgcagcgactggttgccgtaaccttgggaagcatcatctaccgtttgattctgctggcagtcctgcagctgggattcagtgccaacgacctcaacctgatctcttcaatcgtcttggcattgtgcatgatgctgccgcagctggacaaactattccacattcgcaagccgttctttaagggggtccaaaccaatgactgaaccaatgcttgagctaaaaaacgtcaaaacaatcgtcaatccaggaactgccaacgaaaccacgattttaaagggcatcaatctgaccatcaacgacggcgacttcattaccatcgttgggacgaacggtgctggtaaatcaacccttttcaatgttatcggcggcaatcttaaagccgatgctgggcagatttttcatgccggcgctgatattaccaaaacaactgaagaacagcgcactacttttttagcccgcgtttttcaagatcctaagctgggaacggcaccccggatgacggttgctgaaaatatgctgctggcttccaagcgtggtgaaaaacgtaacctgatgccgcgccgcttgaagcagcgaatggcagaatttaccaaactggccgcgcaaatgaacaatggcttggaaaatcgtatgactacgccaaccggagcactttccggcgggcaaaggcaggccctgagctttttgatggctacgctcaagcgaccagacattctgctgcttgatgagcataccgccgccttggatccacacacggcacgcaacctgctgcacgctaccaatcagcgcatcactgaggatcatctgacggcattgatgattactcatcatatggaagatgcgctcaaatacggcaaccggctgatcgttttaaaagatggccagatcaaagccgattataacgcagctgaaaaagctcaattaacggttgacgatctgtatgcctactttgagatgtaaaacaacgacattcaaaaagacattccgtaccactacggaatgtctttttagtcagcatcattaaaaatccacctcatcaggtttggcacattgcccaccaagatttggcaacgcctgaatcatctgcatttcaaactctgaaagcgcaaagtcaaagatttccatattttgtgccgagcgttcacgatgaaccgactttggtagtggcaaaacgccttgctgcaattcccagcgcaacgcaacctgagccgtcgacttgccatgagctttggcaatttctttcatcgtatcgttaactaagactttagctccctgaccgcctaatggaccccagccttcaaccagaatatcctgttcctgcagccactgaactgcttctgtctgcggccagccgggatgaacctcaatctggtcgaccattggcttgattttagctgttttcatcaaagccttaatgtgatgtggcaaaaaattcgaaacaccaattgcccgaattctgccttcattgtaaagatcttccatcgcccgccaggtttcagcattcagcttttcggcatcctgaccaaactgtttttcgttggctggccaatgaatcaaataaagatccagataatcaagttttaaccgatccagggtggcttgaaaggcggctttcgttttttcatagccacgctcggtattccaaagcttgctggtaacgaaaagctcttcccgtgcaacgcctgaagcagcaattccttggcctacgccaacttcattttcatagaccgcggccgtatcaatgtgccgatagcccaattcaattgcatccataactgactgtttggctactgattccggcgttctaaacgtaccataaccgacacatgggatttcaacgccattgtttaagcgccgcatcgaagtaacgcttgtgaaatgattgtccattataatccttctttcttttgcatctaacaattgtaagcatattataaaatcagaactaggcaatacacaataacgcacctttttgtgacctcaatattaagcagcggctgttttaaactactaaagcattgattcttactgttttttgaaatgcggtcgattcttttgccacatcaaaacagccagcagcaacgtcaaaacatcagacgcggcctgagctgaaacgattccccaataaccaaacagatgatgcagaactacgatgcagactaaaaaaatcaagccttgccgtgatactgacagccaaaatgccgggactgccttacccattgactgaaacatcgtcgtaaataccaaaatacagccgcccagcgtcgttgaactggccagccagcgaatcatggtcgtaccttcactgatcacggtctgatcctgcataaacaaacgaatgatcaaaggagctgccaacatcatcaaaagtgttgccacgaccccaaaaacaacgacgaccaaaatatcaaaacgcacggtttcattaaaccgcttttgatttttggcaccgtaagcatagccaatcagcggctgggccccaaacgcaaagccgaccatcaccataaagataatagtattgatcttgttggcaattcccatcgccgccacactggttgagccatacgcaatcagatagcgattcgtcagtgccattgagaacataaccatgatattggtgatcgaggccggaatcccaattgagtagatttctttttgcagcgttggacttaatctggtttcatgaatcgaggtcgtcagtttttggcttttggtattcaaataataaatcatcaagacatcgccaatgatattgctgacgacagtggccaatgccgaacccgcagcccctagtccacaagggaagataaagatcggattcaaaatgatgttaaaaatcgttcccaccatgctggccgtcatagactgaacggccaatccctcagttcttaaaatattggttggtgtcaggccaaaaacaataaacggcgcgccaaacgcaatcaccaggtagtattcacgcacgtactgccaagttgccgtggtcgcccccaatagatgaagaatcagcgtctgaaaggccaccatgatgatcgtcatcaagattcctacaataatcgatacgtaaaaacaataacctgaagccaggcgtgcctcatgatcgcgcttttcaccaaacagccgcgaaatcaatgagctgccccccaagccaaagatatcgccaattgcaatcagcagactgaaaaccggcgcgccttgcgatacacccgctaccagatcaggattttgggtcttagaaacaaagaacgtatctaccaggttatagataataataacggctgaacttaaaaccactggcattgccaacgtaaaataagcctttttaatggaagaacgctcgaaaagctgatccatttttctactcccttcattaactaaacaatcttgattattttagacgatcgcctcttgatcaacaatcattcaattattggtctattccatattttagtttcaaatcataagaataaagcgttttcatcgtttttcaattttgtctggtctaataaatttgtttaatttttcggaatcaaacttaggctattgtttttgaaaaagaattggtctaaattaattgccattaagaaaatgattagagttttgagaattggagatggcaataatgagtacagcaaacactttattcgtaatgattgccagtattctggtgttcttaatgacaccaggactggcgtttttctatggcggcttggtaagtcggcgcaacatcgtcaacacgtttatgtcggtctttttcgtctgtggtctatccgttctgctttgggtagcagttggctggtcactttcattcagcggtaacggcgccattgtcggcaacctgcaccaattgatgatgcacggcaccaacctaaagcagctgacgactggcaagattccggtcggcatcttctcaatctttgaaatgatgtttgcattgatcacaccagctttgtttgtgggcgcgatcgttggccgggtgcgctttaagtttttaaccttctttatcatctgctggtcgattctgatctactacccattggtacacctggtctggggcggcggtctgctgtccaagctgggcacgcttgactttgctggtgggactgtcgttcatatcaatgctggcgtcacggccctggtactttctgctatgattgggccgcgtctgcacaccaaagattcggatggtcctgctgatcggtcctgggttctattgggtacgaccctgctttggattggctgggatggcttcaacgcgggttctgcgctggccgtcaacagtattgccatgcaggctttcttaacgacgacagttgctgccgccgcggccatggttacttggcaattactggaaatctatactgaaggacacacgactttggttggtacctgtaccggcgtattgtgtgggctcgttggcattacaccagcctgtggctacgttaccttgaccggagccttgattatcggaatcggttcgagcttgatcagcggctggttcatcaccaagatcaagccgcggctaaaagtcgatgacacgctggatgcctttggctgtcacggcgttagcggtatctggggaagcatcgcaactggcctttttgctactcacacggtcaaccctgccgttactcacgatggtctgctgatgggcggcggcttcacgcagtttggcattcaaacactggcaaccctggttacgattatcgctactgctgctatggtctgggctatcgttaaggtcttgggtcgctttatgacgattcgagtttctgctcgcgaagaaggacgcggcttagacatcagcgaacaccatgaactgatcggctcattggcgaatcctcagctctaaccacttatctgaataattaaatctgctgcactcgataatataaaaagggcaatcccgctttggcgagattgtccttttacgttatgcgttaactgaaaattcaatgctaatgttcttgaacttcttcagggtgtgccttttcgtagcgatgttcattccagaagtagatcgtgatgatcgcaaagcagatggctggcacgatgaaggagaactgcatggagccggaaaggtcggatacccgtccttgaatggctggcacgatggcaccaccgatcagggacataacgatgaaggcaccaccagtttccgtgtacttcttttcgtgaatctggtccagcgtgtgagcgtagatcgttggccattcaggaccgaagaagaagctcgtcgcaatggctgcgtaaacggccgttgcatttggaaccgtaaaggcaattaccaggcagaccatcccaagagcagagaaccaggtcagcaccttggtaatcgagtagcggttcatgaaccagttggcaaccagcttgccgatgaaccaggcaacgtagctgtagatcataaacgttgaggcttcagagtcggaaatgccgtgcataactttcagtgccagccggatggtaaatgaccaaaccgtcgtctgcatgccggcgtagacgaactgtgcaccgacacccatcataaagcgcttgttgtgcgtcaggtagtgaatcgtctcgcccaaggatggctgtgcttccttgccttctgcgcccgttcctgccgtggccttggcgcgtggcatcttggtcagtagcaggacgatgaagataacgattaaaattgcaaggatgaatttgtatggacgcagcgtcagttgaagcatgtgcaggttgtaggcgtgggcttcagccttgctcatgtgagcgaccttgtcagccaggttgccgccttcaccaaagatcaggtacttgcctaagacgatccccaagatgtcacccagcggcgtcagcgtttgcgcaaagttcagccgctggttggccgtgttgcggggacccatcattgaggcgtaggtgtcacaggacgtttccaaaaagctcagcccaacggcaatggcaaagatggctaccaggaacacgctgtaggtggcaattcgggatgccgggaagaacagcgagcagccgatgatgtagaacatcaggccgaccagaatggccaccttgtagctggccttcttaacgatccgcgatgccgggatggccatcaggaagtagccgccgtagaaggctgactgaacgaaggccgtggccgtgtcattcagcgtaaagaccgtcttgaactgcgtgatcagaatatcgttcagactggctgctgccccccagagcgggaagatcaggcagacaagcaggaactgaaacattggcgtcttgtcaaggtagccgtctggcagctgcagccagctttggcccttgtcagaattcttactgttttgcatggctcacacctcgctagaacgtaacgccggattcaagaataatgttggagtaaggcgtcatctcacccgtacggatgaaggcatgcgtcttggccagattcttctttaaatcactgtgaggcatgaattcgatctcaacatcaggcaaagcctttttgatgttttccagctgttctggattttggtccttgatttcatcggcaaggaagatcttttcaaccttcatttcctttaagacgttgttcaaaacatccataaagcttggcagctgcttgtcgagcgccagatcgatcttcttggttcccattggcaccggcatgccggcatcgccaatcgacagccagtccatgtggcccatgttggcaacgacagcggacacttcagagttgataattccagttttcttcatgatcaaaatctcctatattcctatttttttatttctgcgaacggtcagccgcgattattcggcaagtgcggctttgacttcttcacccgttggaatcgatggcatggcgcccatcttttgaacggtcaggctggaagcacgctgcgcatagaccagagcatcggcaacattgctcaagtcgttgtccagctgggaggccagcgcaccgatgaacgtatcaccggcagccgtcgtatcaacggccttgaccttgaatgctggcaccattccgtgaccgtgtggcgtgcagtagaagacccccttcgagcccaacgtgatcaacagattcttaacgccttgttgtttaaaccattccgcggatttaagcatggagtcttcatccgtaatcttgattcccgtcaaaacaaagctttcgctgtcgttaggaattacgacgtccgtgtattgcagcagctctggtaaaatttcatgagctggcgctgggttcaaaatcgtcgttacgccgtgttccttggcttgcttgaatgcttctacggtaactgcttgcggcgtttcaaactgactgatcagaaagtcgatttcttcaaagactgaatcggcatttttcaaaacctcagtcgtcattgcttggttggcaccaccataaaccatgatgtcgttttgtccttcggcatcaagcgtaatcaaagccgttcccgtaccatgcagctcatcaattccaatcagcttggtatcgatatggtcttcttgcaaggcctcacgcatgaacttaccttcgttgtcagcgccaaccatcccgataaaccaggtcttggcaccagaccgagcagccgcaactgcttggttggcacccttaccgccaggagcggaactcttggaacctgccgagatcgtctcaccaggcattgggaaacgctgtacgtggtaggtagtatcaacgttgatactacctaaaaccgcaattttcttagccatttgcttcctcctatgatctccactgtaaaacgtttttgtaaatcgttttacgaaaaattcaacgttgttaatttaacatgatttgaaatcgtttgcaacccctctttaaaaatttaattcaaaagttttactaatgtaagcgatgaaaatggcgccatggcaaacgattccctaaattaactttttagtaaaaaaaagatccgactcgctcaaacgaatcagatcttttttataatcgctggtcttattcagctgttttacgcgcgaaataatgtgccagccgatcttttggatagatacccgttactttttccttggctacgccatcgcgaaaaagcaccaggctaggaacactcatcactttatagcgttccgcgattgcttgttgatgatcaacgttaaacttaacgaatttgatctgcccggcaaattccttttccaactctgccatgatcggttccatcattttgcatggtccacaccatggcgcccagaaatcgactaccgtcagcgggccttgaatcatttcgtcaaagttttcaatggttgcttcttgtgccatcagactactcctttttatcggttgcctgcgcatgctttttgcgccgtaccaagtgcacgataatcgtaatgacgaaaacggccaggacaaagatcccaaaagcacttgaaggaatctcaatatcaattgcaggaatcgataagaacaatttaatggccacgaacaaaatcaagatatacgccattggctccaattctggaatcttgttcatcaagcgcataatcacttcggcaattccccgcatacagatgataccaatcaagccaccgatcaaaacgatcactgggttgcttgaaattgcaagtgaagccaacacagaatcaacggaaaatatgatgtccatgaactcgatttgagcaacgacccaccagaaccgcttccgaccagtcaggcctttacggttagccttaggactggcctgcttgctgcgccgtttcgggttgccctgaaacttatagcggaagaagcggtaaaccagatataccaggtaggcagccccgatgaccttgatttcccagaaatggatcaggtagacgccaagtccaataatcaagaagcggaagatataagatccccaaatcccgtaaaacagagattcctcttgttctttaagcgtcggcaaaacccgtgtctgagctgctaagaccaccgcgttgtccacggataacagacattcgatcaataccagtgaaaggatgatcagccaatcctgacttgaagttatcacagcttcccagttgtgcaagtcgaagaacggtccgtaaagcttagttaaaagtgacaatgaactcctccttatctatttgttgtctctttatttgtattttaacaaaatttgtttgaattcgtcatctattggtgcctgaattgtttgaattttttcagtaaatggtaaaaccagctgctgcttaatgccatgcagcatcattcgcgaagcatcaatcgtgccatacagcggatctccgatgattggatggccgctgtaagccaggtgaactcttaactggtgagtccgaccggttgccaattgcagtctgaccagcgtggcgtttttaccgcgccaggcaacctggtagtaggtcagtgctggctgactggcaaagccgttgactcgtcgcttgcgctgatcaagcagatctctgccaattggccaatcaaattttccagcatccgacgtgatggtccctgccaccagcgcaagatattggcgatgcatctgcccttgactgatgcggcgatccaaaatcggtacgacaattggattcttagcgattgccacggcgccgctggttgcttgatccaagcgatgaaccataaaggcatcagctgatgaagtctttaaataaccggccgcatcgttgagcagagtcccagtttcaagcggctgattgggatgcattttttggcctgctggtttgttgactaccaagacgtcgcgattttcaaacagtacgttcagcctgggatgtggggttggttgatagtgcgtttgcggcgtccgaaactcatcgccattaaaattcagctcaattatatctgccggctgcacttgatgattaacgggataatattgaccattgaccaagacgttatgacgcgttctaagataatatacaaagcgccgcggcagcagccattgcttttgcagcagatcacgcagcgtttgggacggctgatcttttgacagcgtctcgatgattttccagtttttttccatcataatccccttaattgatgattatttgatactttttttcagttcttatggttacctgggttgaattttagcgcattaaatagttgaattatacttaaagaccaattttcgcggaggataaaatcatgttgagtgccgaactaatcaatgaacaaagctattggatcagcgtgtttgagcccctgcctcatgaacgcgaagatttgatcaacaagtacgaggttaccaaagagcttttggattacgccatcgacccttatgaaaaagctcgggttgaggttgatcgtgatgctggtgtcactttgctgatctttgacgtctatgtgcccacgcatgaggtctcggcaccccaaaccgcgccaatcggcattatgctgacggccaacaacgttttaacctttaccaacgcgcagaccaattttgttaacggaatcctggccaagcagcttaaaaccatgaaaaaacgcggtccggttaatgatcgctttgatttcatcctgccaactctttacaaactctcaaccagctattttggaccaattcggcgtgccgatcaacagcgccagcagattcagcgcaacctgcagaaccatacggaacgcaaggcaattaccgaatttatggaaatcgaaacggggctagtctatattctgacttcactaaaaggcaacgtttccctgcttgaagaattcaaacgacgctttggcaaccgaatgtcgcatcgccagcttaatgatctggacgatattattatcgaagctcagcaaggtttagaaatggcccagatgacatctgacgtctcggctcgcgtttctgacgcctatagcaaggtcctggacagtaatctgaaccagaccatgaaatttctgaccatctattcaatcgtcttggcaattccgccaatcgtttccggcttttatggcgaaaacgtcaggtcgctgccgtttgcccaaagcgaatgggcctggcagatcacgatcgcgattactttaattatgattctgctctcaatctggtttttattcaatcgacactggtggcattgaaataagttcgtaattttatgattgattaaccttttgattgtcaaaaggttcggattatgttaagatgaatcctgttaaattaaagttaagcctatatattctcgcaatacgggcgagagtctctaccctgaaccgtaaattcaggactataagcagccaaaaagtcgtcatggttgcctgccatggcgactttttgcttatctgtatgggctgactcaggaggaaagatcttgaatagtgcatcacagggaaaattaaacgactttggcaaaaatctggtgcttggctttcagcatctgctggccatgtactcaggcgacgtcttggtcccgcttttgattggaaactttctgcatttcaacgcagcacagatgacctatctggtttcaatcgacatcttcatgtgcgggatcgccacactgctacagctgcgcaagacgccgctgactgggatcggtctgccggtcgttctgggttgtgcggtacaatcagttgcccctttggaatcgattggcggcaaactgggcattgcctacatgtatggtgccatcatctgtgccggaatctttgtctttttgattgccggcctgtttgctaagatgaaaaaactgtttccaccagtcgtaactggatccttgattaccattatcggttttacgctggttccagtcggttttcaaaatctcggcggtggctcagcagctgccaagtcattcggtgcgccagccaacttagcaatcggctttttaacgattgtcatcattttagcaatcaatgcatttgccaagggttttgttaagtcaatcgcaattctactggggattttgattgcttcctttattgccggcgcatttggcatggtctcattaacaccggttgcccaagcttcctggttccatctgccgcagatcttctactttggggttcctaagtataacggcagcgcgatcgttaccatgatgctggtttctttaacgacgatgatcgaatcgactggggtctactttgccctaagcgacgttactggtcagaagattactgaagacgacatgaaacgcggctatcgtgctgaagggattgctgccattttaggcgggatcttcaataccttcccctactcaacgttctcgcaaaatgtcggcgttctacgcatgtccggcgttaaaacccgcaaaccggtctactatgctgctttcctgcttttggcactgggactgctgcctaaagccggcgcactggcaaccgtaattcctacgccggttctcggcggggccatgatcgtaatgtttggcatggtcggcgtacagggaattcagattctgcaaaaagcggatctgaacaagaacagcaatctactggttgcctcgatgtcaattggactggggcttggcgtaactgtttatccacagattttccagcatctggcaaccgaagcacagatcgttctgggcaacggggtggtcgttggcagtctggcagccgtaatcttaaatctgatctttaactggcaggacttcaaaaagccggttcaaagcaaaattaagaacaacccaagaactgctgatccaattatgaatgaaaattaaaattaaggcatcggtgatcgcttcactggtgcctttttagttgtaaaataaagccagatctaacttgaaaggggttttgtttcatatggaacattttggttcatttcattcttcatgcacggcaatgctggttggcaaaaaggcaacgattgacggctcaaccataattgcccgcgatgaagacggcgaaagcggcattaaccaaaaaactttcaaagtctttccggctcgcgactatgatgaggagttcatttctgaatactcaggcgttagaatcccgctccatggtcatggctgtcgctttactgctacaccaaacgctcaggaaaatgagatcaaagggcgctgggacgaacagggcatcaatgaatacaacgtggcaatgagtgctaccgaaactgaaggtaccaacgctcgctgcctaggccacgatccgttggttaaaaacggcatcgacgaggattccatgctgtatctggtactgccatttatcaaaactgccagagaaggcgtggcccggcttggtaagctgatcgaacaatatggaaccggcgagtgcaatggtattgcctttgccgatcaagatgaggtctggtactttgaaaccggtgctggtcatcaatgggccgctcaacgcattccagatgactgttatgccatctgtcccaacatcatggtgattgaggaaatcgactttaacgatcccgacaatttcatgtttgcatcatctttaaagtcattcgttgaaaaaaatcatctgaatcctgacccaacgacctttaactatcgcaacatcttcgggacgcaaagcgaggctgacagctactataacacgcctcgaacctggtatggacaaaagctgttcaatccatccattgaacaggatccaaccagtcaaaacatgccattcctgcggcggccagaaaagaagatcgcgattgaagacgtggaagcctttctttcttctcattacaatggcacgccatatgatccgatgggaacttttgcctcgggaaccaaggaagagcagcgcaaattccgctcaatctcacttgatcgcaatcaaagctcctgcattctacagattcgcaatcacgtaccaaaagaatttgctgccattcaatggatcaatttcggtttctactgctacagtccatacgtaccgttttataccaacatttccgacacgccagccaactaccaaaaagctggcgccgaggtcgataccaacagtgcctattggatgtacaaaacgctggccgttgtcgttgaaccgcgctatcacaaatttatcaatgaggtcaacgaatatcgcgatggctgtcaaagctttggcctgcagcgaattgaccaaattgaccaacaggcggctgaacttgaagtagatgagctgaacaacttccttaccaaagccaatctgcaaacggccgccgaggttaccaagcgaacccactcgctgctcagcagtctgatcaaacaatcgctgcttgactccaagtatcagtttgagcttggcgataatctataaagagctactaaaacaaataatcgcgtgccgtcagcattaagtctgattacacgcgattttttcatttgtctgcagttatttgcggttatagtattcaacctcaacatcatcgtcagtcagaatcagcttagtcagactgccgttttccggacgcaccgtcagatcgtacttaccctggccaaaacgctccatcaagctaagcagcgtattgccatgactgacccagagaatattggcgtcatctggtacctctgagtgccgaatcaggtcaattccctgatcaacgcgggcccagtattcagcattgttttcggcatgatggaatggatcagcatcctttagccagtctttggcctgaccgatgctatatttttcgacgattgccttaaaagttggcagaccatgcggcgctcctgccagataccaggcctcatccatattggcaccttcaaaatagccatagaactcttctctaaagaatggtgccgttattggctgcttgaccgagtcagcctgattcatatccaggatcgtctggatcgttgcttcggcgcgggtggtgtcgctgcaaaaagctgcatcaaaatgaatcttagccagcttttctccggcattgcgcgcatcctgcatccctttttgcgtcaacggcgaattgctccagccctgcagcttgttatagatgttgtagtacgtctgaccatgccgtaccagatagacattcaattttttcaatctcgttaccccctttgaatctaaaacgattgtaatgctttcttgaacttaaggataacataaggcgcccatcatagattcttcaaacattccctttaatattaaaagcatcgaaagaagggatgttgcttgaaactacgtaatccacattctgaacaagatgtcgtcgctgcccagatcgttgggatgaatggcaagaccgttaccgtcaaaaccgaaaccggccagattctgcggctgccattaaccgctaagcatcagcatgaccagatctttttggcatcattaaaagacatctggcacgcgcaaatctggatccctgtcaaccgccagctcaaaagactgttccattatgattggctgctcgatccagctccagtcaaagcataaatctgattaagtttcctcaacgttttgccacaatacacttacacaggctgaatttgtgctagaatgattgacgttaagctcttttatgagtacgttaagaatcatataactgcgaggatatttttcgacatgaaacgattaagcaaactcgtgaacaccaggattggcttttttgcactcttggtgttccttttttggattaaaaccttgattgcctacttcactgactttaaattaggcgctcaaggcttggttcaatatctaatcgtcctgatcaatccactgggaaccaccctgctattgtttggtctggcattttactttaagcgatcgcgctttttctatcccgttttaatgggaatcgacattgccaatacgctgctattatatttaaacgttatctactaccgtgagtttacggactttatgacgattgccaccatgaccggctattctaaagtcaaccaggggcttagcggcagttctttggcattgaccaatctgcatgacgttttttattggctcgatattgtcgtcatcctgctcttgatgctttttagaaagattaagtttgatccccgcgctttttcgcaccggctggcatttgccttcacctcagtttcattggtcgtctgcggcttgaatctgatggtggcagaaatggatcggccacagcttttagggcggacgtttgaccgcgtctacatcgttaagtacctggggctggatgcctttaccggttacgacctggttaaatcagagcacgtcagtcaaatgcgtaagagtgccaccaaatcacagctcaagaccgttgagaagtttaccaaggagcattatgccgcgccgaacaaaaagctgtttgggattgccaagggccgcaacgtaatcgttattcacctggaaagcttccaacagttcttgatcgataaaaaaatcaatggtcaagaagttacgccatttttaaattcgctgtatcacggtcaagacacctatgccttctctaatttctttaatcaggttggccaaggcaagacctcagacgcggaaaacatgttggaaaccagcacgtatggactttcgcagggttcactgtttgcaacgctgggcaatgacaataccttccaggctgctcccgctattttgaagcagcgggctggctatacctcagctgttttccatggcaatgtcgccagcttctggaaccgcaacaacgtctacaagaatctcggctatcaatacttctttgacgccagctattttgacacgtccggcgacaaggcaaccggctatggcttaaaggacaagctgctgtttgctgattcgatcaagtatctgcagcacctgcagcagccgttctatgtcaagtacttaacggttaccaaccacttcccatttgatcttgacgatgaggataaagactccaatttcacaacgacgaatactggatcatcaacggtcgacaactacttcgttaccgcgcactatcttgatcagtcgctgcaggaattctttagctatcttgataagacgggtctggccaagaaatcaattatcatgatctatggtgaccattatggaatctctaattcagaaaacaagaacctggccagcgtcttaggcaagaatgctgacgactggaccgattttgacaacgttcagatgcagcgggtgccgctgatgttcgttattccaggatctggtggtcacggcggcatctacagtacttatggcggcgagatcgacgtcttgccaacgctgctgcatctgttgggaatcagcactaaacgctatatccagtttggaactgatctgttcagctcacagcatgatcaagtcgttgccctgcgcaatcaagactttgtgacaccaaagtacaccagtatcagcggcaagatctacctcaactcgaccggcaagttggccaagctgaccaagcaggagaaaaaacagctgcgggccgatcaaaagaaggtctctgaagaactggccctgtcagattcgcttaacgaaaagaatctgctgcgcttctatcatccaaaaggctttaagaccgtcaatccaaaagactacaactatgctaacggattaaagaaggaaaagaagattgaaaagtccaagggcattcaatcaaccagcatcttctccaagaacaacgacaagaccactaccgacagctatagcaccaacgccccagaacagggacattctgctacgagttccaaccgaatcaagatcaccaatcctgatggcaatggcaattaatgtttcgttaatctaatttaagtcccagggctgttaagtcagttctggggcttttactatttcgctcagttacctgcttaattggtcccaaaattcgtgataaaattaaagaaaattgatttagaaaggcgtgagctgcattatgcgagaacatgaagagattcaagaaaaactgattgaagttgccaaccgccgctatgctaccaaaaagtttgatcctgaccgcaaagtcgatgacgatgactggcgcactattctagaagtcggccgcctgtcgcccagttcgtttggctatgagccgtggcagttcgttgagcttgataatccgcagatgcgtcaagaccttaagccaatcgcctggggagccgtcaacagcatcaatggcgctgacaagctgctcttgatttttgccagaaaagacgtcacctacgacagcgactacgtaaaatacatggtccaagacgtcaagcgccacgaatacgatcccaattccaaatcatcacaggcctttaagcattttcaagaaaccgacatggacatcaacgacgagcgcacccgtttcgactgggcagccaagcagtgctacattgccatggctaatatgatgatggcggcagctgcgctaaagattgattcttgtccaatcgaaggctttaatcgcgaaaaagtcgaatcctatctggctgaaaaaggcgtcttagaccgtcagcactggggactagccgtgatggtaagtttcggctatcgcgatgagccgatcaagcctaaatcacggcaggctatttctgacatctaccgcacgatcaaatagacaaggagcaagaacatggctaaagaaatgctggttacgacgactgaaaagattccgggccataactatgaggttttaggcgaggtctttggcgtcaccacccaatccaaaaacgttttttccaatatcggcgccggactgaaaaacgtggttggcggcgagatcaaagcctataccaaaatgctgcatgaatcgcgtgaggtcgcaattgccagactgcgcgaggatgccgaagccaaaggtgctgatgccgtggtcatgatgcgctttgactccggctcaatcggaaccgacatgcagtcagtggttgcttatagcacggccgtaaaatttactgaataaaaaaaagatccaggctgaacatatcgcctggatcttttatttttacttatgctgctcatcgatgtgcatcgatgagctgtgcgtggccattcgttttttagggtaaagcgccttggccaaagccgtaatcgcaatcggcgcctcgccaaagccaactgcaatcagcgcagccttgcctgggtaggtaacgccatcaccaattgcatagacgccagggacgctggtttccattttggagtcaaccttgatcagtccccgctcgcttgccaatggcagttcccactcattaagcgcggcgttgttggaggtaaagccatagttaaccaagattttgtctactgccagatgtttttcttcatcggagcgcatctttttaagcgtcaaatcaatcgaatcatcttcgtttacttgcagttccttaggcaggtatggcgtttccacctgaacctgagattttttcagctgggagacggtatgctccaaagcacgaaaggcatcccggcgatgaatcaggtgaacctctttggcaattggctccagcatcagtgccatatcaatcgccgaatcgccgccgcccagcactgccacgcgctgatcggcaaaatcagactgatcgctgacaaaatagcgcacctgtcgtccctccagctggtctgcgccatccaatgccagtctgcgtggtgaaaaggcgccgttgcccaatgcaatcaccacggctttggaataggacgttcgctgtgctgattcaatcttaaaggtcccatcagccagcttgacgacgttggtaacctgctcgcctaaaaattgatcaaccggcgcaatggccatctgttttttgagatcagcaatcaactcgcgcccctgcacgccagcctcaccagctacgtcccagatttgtttttccggatagagtgcggcaacctgtcctcccagctgaggtaggctttcaatcagctgcgcctttaattcatgcagaccagcgtaaaaagcagcaaacattccggcgggaccgccaccaacaatcgttacgtcatatgtctgttccatcatctttacctcgttttaaaaaaatcttttctacgacaaaagccattgtaccacggcttggcgccttaattttgataaaacggtttaattgttgtcaaaacaatgtttgagttttaattggtttttggttattatgtaattgtaaacgttatctaacaatattcattcggaggaaatcaatcaatggctaaaaagaaaatgattttagacttggacactggtgttgacgacgctttggctctggcttacgcggttgctgatccagaagttgatttgattgggatcgtggcttcatacggtaacaacctgctggacgtttgtgctgaaaacagtctgaagcttttggaactgctcggccaaaccgatgtgcctgtctacaaaggtctgccacactccagcacgaccgacagctttgaagttatgcaggtttctaaagacattcacggtaacaacgggatcggcgatgttgagctgccaacccctaagcgtgccgttgaagctgaatccggcgtcgacttctatatcgaagcagctcacaagtatggcaaggatctgatcatcattcctactggcccaatgaccaacctggccgctgccctggaaaaggatcctgaaattgctcacctgatcggcaacgttacgttcatgggtggtgcattgacggttgaaggtaacgttactgacgttgctgaagccaacatcaaccaagatgccaaggctgccaacacggttctgcaaagcgacctgccattgacgatggttggcctggacgttacgctgcgcacgcttttgactaagaaggaaacgcagcaatggcgcgacctgggtacgaaagctggtaaggcctacgctgacattaccgacttctacatcgatgcctactacaacctggatatcgacaaaaacggctgtgccctgcacgacccactggcagtcggtgtctccatcgaccctacctttgttcaaacgatcagcctgtttatgaaggttaactacgaagaacacaactacggccggacgattggcgacaactcacgcttgaacgatcctaatccaaacgttaaggttgccgttaacgttgacaaggaacgttacttgaaggtattcatggaacgtttgaacagcgtcttgaaagaacactaactactaaatcaaaaaacctcatcggtgcttgccgatgaggttttttgatcctattcagtctgcagattagctgacagcagatccatagctgcgttctgagccggcataacagcatttagaagcgttaattgcgctaaggtctcaacccactcggcatcaccatttaaagctggcagcaattgatattcgcttccaccagcagccaaaaaggcagcgcggttctcctcgcccaattcctgaatcgtctccagacagtcagcggtaaaactaggcgcgatgaccagtaccttgcgatagccttgcttaggcagcgcagtcaaaagatctttggtggccggcgtcagccactttgccggtccaaagcgcgactgataggcttgaaaacagggaacctgcagccccaaacgctcaattaccgccatggttgtttgccggcagcgctgggcataaggatccccagtcttttgataactgagcggaatgccatgatatgaaaagacgattgcatctggattcattttagcaaccgctttttgcagtttattcgataatgctttgacatacggccaaaaactgctgtagtcactgacgaatctaatttccggaaccgttttgcgatcctggtaaaaccgagcgacgtcatcttgaaccgaagccgtggttgtagttgaatactgcggatacattggaatgatcgttaaatcggtgattccttgaaactcaaattcttttaagaccgcaccaatcagcggctgactgtagctcatggcatagcgaaccgtataatccggcagttgcttttgcagcagctgggcctggcgctgggtataatgcagcaaaggcgagccaatctctgatgaccacagctgctcataattggcggccgacttgggagcatgtttgggcagcaccatcatgtttagaattggctgccagatcaatggcggcatatgaatgacccgccgatcgcttaagaaccgccgtaaaaatctggtaaccgctggaacgctgggatcacttggcgttccaagattaaccagcagaatgcctttttgatttttcttcatagtcttgcctcttactcttatttgaaattcaatagaactattctaccacgacatctagtagccattttatgttcaaacgccacatattgtgtccagactgatcaaatgattatcagtgaatctcaataaatttaaacccagcttgattcaaatcaatttctccgcttaaattctttttatttcaaattaaacttcgataaaatttctgctggcttgcactatgccaagttattttgtaagatgaaaacgatcaatcattcatgtctggggtgccatacggctgagataatacccattgaacctgctctggataattccagcgaagggagatacggtaaataatctgttgtaatcagccccactgtggatcttttccatagtgggttttcttttggacaggtgattgaaaatttcaatcattaggagggtctttcatggccaaaaaaaataacaagtttcatctgcgcgacatcatcctgctggcactggtcggcattatctttggggtgatctactgggcagctgcctttatgtacaacgcgctgaccattgtctttacaccgctcaaactgccaatgatgggtaacgatctaaccatggggctttggtgcatggccggtccgatggcgggatttatgctgaaaaaacctggtgcacctttccttggcgagtttttaggtgccgctggtgaagccttgattggtgatcaatggggcgcggccaatctgatttctggtgccgttcaagggattgccagcgaactgggttttacgttcaccggctacaagcactatgactggctaggggccgtttcaacaaccattaccacgacgatcgtaacgtttgcctgggattggttccgcaatggctataacaagtttggcttcaaaaacgtttactactttagcggccggctgctttcaatgttcttcttctgcggcgttttggtaatgctgatcgaacggcttctggaacgctcgcacgtcatgaaacgcgaggaatttaacgactaatgaatcatttggcaattgacaatctgacttttgcatatacgccaaagcatccgacgttaaaagacgttgcgctgagaattccagttgattcctggacgctcttttatggtgcttccggcagcggcaaatccacgctgatgcgccttttagccggtctgctgcctaaatacggcggccggattctgcagggaaacatcgagctgccgaatggtttaaccgttgcgatgatgtttcaggatcccgggatgcagttcgcgcttgatacgccgcagcatgaattggaatttgccttggaaaacctgcagctgcctgccaacgagatgcccgcccgcattgagcatgccttaaaattctgcggcattgagcacctgcgcgatcgtcagctggccacgatgtcaggcggcgagcagcagcgggccgccttggccgttctagtcgcgatggatactgatattctgctgttggacgagccatttgccagcatcgacaaccataatcggactttgttgattcagcagctgaccttactgcagcaaaagtatcacaaaacgattatcgttgctgatcatgatctgcatggctatcgcggtttggcaaaacagatcattcactttgaaaatcagcgggcccaattgcttgatgccgctgccagtgatgcactgcttcagtctgccgatcagctggccgccacggtccaccacgtcaaactaccgactgccagcgatcagccgattctaacgctcaaaaaagtagtgattgaacatggaaatcaaaagctgatcatggcaaatgacttttcatttttcaaaaatcaagcgacgctgctgactggcgccacgggaaccgggaaatcctcattgtttaaggctattacacacttggcggcctaccagggaacaatcgtctataatgaccaggacagccaaaaaatcaaaccgcgccgttatgctcaacaggtcggctacgtcttccagcatgccgtcgaccagtttcttagcgtaacggttaaagaggagttggcgctgagtcttaaaaagggccgtaatccctactttgacgaggatcacctagccgcggcacttaagttgcttgatttgaataaattacaggatcgcgtagtctactcgctttctggcggtcaacaaaaaaagctgcagctgcttttaatgctgatgatggggcagccggttctactgttggatgagccttttagcggccttgatcttcattcgctgcacaatgtcgttgatctgatcaaggccagccaaaaagtctacccgcaaacaatgatcattatcagccaccagctggagggcctggaaaagctgattgatcggcacgtaaaactggcagactgtcagctcagctatcgggaggaattttaaatgaatccaagttttaaactgttgttggtgctgatcattgccttagaagtctcgtttacgcgccatttaacgatcaatctggtcttggttgccgttgccataatctatcttttgactaagcgcattcggccccgcttgtttggctggctgtttttaatgccgttatttccagcagtcgcggtatttatcacgattgcctggttcagtcccggccatgactatttttatgcctgggtgctgttttcacgaatctatgtctacgtttttaccggcgcggctattacgcagaccaccagtccactggagctcacccgctctttggaacaaaatctgcatctgcccagcaagtttgcttatggaacgctggcagccgtcaatctgattccacggattaaaatggcagttaaaacgattcgcgcggctggtcaaatgcggggcatcaatctgtcttggtggtcaccaacgctttatttcaaggcaatcctgcatgccatcacctggtcggaccaactggcgcaggctatggaatcacacggctacgttgaggatcgcgcgcggaccagcgttcatcagattacattaacggctcgcgattggtcgatattgataataagtattattttaatacagattatcacatttgccctaccatagcagattcgatataattaaagaaaatatttggaggattccaattcatggataacaaattcggtcagcgaatcgtcagcgcgctagcctacttcagcattttctttttaccggtcatcttcccattgatcgtctggattatcgcaaaataccaaggcttcaacgaggtgcgtaaaaacgctgttaaggccttctggagccagattttccccttgctgtacatgattgcgatttttgtaatcattggcgcagccaacatgcagaatctggctcatttaggcggcttgttcagcattctggcagcttttgcattgctgctggccttagtacttttgatctacaacgttgcgatgggaatcgcggttttgttgggacgcaagccacaagatcatcaccaggaattctagtttacaagtcagtaatccttgtctcagcactgaggcagggattttttattttgacatattaaaaatcagattgtgtaaaaacagattattagcatactaattaagcaaaaaaagcactatgctaagctttgtcgtgcttagcatagtgctttttttgattacgtttatttagtgcttgaattgagccttgatgactgattcttctggaatgttcttttcgcccttcagcatctgcagcaaaatctcaccggcacgctgccccatcaaaaaaggattttgcgaaactaccttagcatagggacagatactgccaatcaacgcagtatcggcaaagccagttaccgcggttcttgcttcgtcaatgacatgctctttcatcaatcgcggcagaaattccagcaaccagcgttctttgagggcaaacaaaagacatttacctggtcgactcaaggcttttttgagtgcaccatagactgcatccggctgaaagttgttctcatcaatttcaatcgtctcaatggtcgacgctgcttgactgattccttgaaaacgctgaattcgcgttgaagccaactcaatcgtcgaagtcaaaactacaaccctttgaaagccttgatcagcgaaatattccgtcgtactgcgcgcagcctcatagttgtcagttactactttgggccatgttgagcgtggtaagtcacgatccacaactacgactggaaaatcacgcgttagctcaccagcgacctgctccgtatcgctggttaatggctgaaaaaccaagccatcaaagccatgctggttgattgaatgcagcagctgacgttcatgagtcagacttgagccggaatttaaaaggaccgatatgtatcctgcctcttcaacccgacttgatatgccacgatagatttcaactgaaaaataatctgcaatattagccgccagaaccgcaataattcgactgctattgcgcgccatctctcgtgctgctgagttgggaacgtaattcatttttttaatggcaacccgaattcgctcagcagtctggtctgacattttttgcgttttgccatttaaaaatcgcgaaaccgttgccactgaaacatcagcaactttagcaacatctctaatcgtagggcgttttttacttgcatcttttatcgacataaaattcactctttcgctaatcctctaaacacttaattataacaatggcgactgttgatgacaatttagccctaattcatctctctttttgtaagcccttaaatttttttgataaatttaaggtaactggttaacctttataaaccctttaatatcaataggtaacaggttaaccacatgaaacaaaaggaatttgcaagctaaaaatagtattgaatattttaggttaacaggttacactataaatcgttgaaagcgaaatcatttttggaggtgcgatcttgaacgaaagaacactaatcgatccagaagcctttgccttgaagtttgcccaaaccgcccaaacggaagcaatcgcagacaaagacctggccgttgccgctaagaagtttctactgagctatctaaccgcctattatctggttgacgattttaacgccattgaaagaaccaatttcaagcgggttgatgagaaaaaatttcaagatctgacttttgaagaattgctgaatcgagtcaaatcattaaacaagtactgagacattttaaaaaggggacgaaaaaaatgactttaatcttaaacacttggatttttgaaaatgatgttaagaaaggtgtcagtcaagttgacctggttaagcgggttgccgctttgggtgcagatggcatcgaagttcgtcgcgaatacttcaaagactttgatgttgaattagccgccgttgccaaagccgcccgcgaaaatgatttgatcgtcaactacagtgtgccggatgtgatctttgaagctgatggcacgatcaatcctaagctgccacaatactttgcggaaggcaagcagatgggcatcgccaaaatcaagttcaacactggcaacttctcaagctaccatggcgacctggcaaaagatttaagcaaactgccattggctgaaatcaaaatgaatgttgaaaatgaccaaacaccagtctcaggaactcctgatgcaatcattaaattcctgactgcagcaagaaacgctggcctcaacagcatcggctacgtttacgatcttggcaactgggcctttaccggcttcgatgccgttttggccgccaagcagcttgcaccttattgcgactacatccatcttaaaaactccatgctggacagcgaaggtcatatgatcaccaccgatgatttggataagggcatgttcaattggaagatcatctgcagctatctgccgcatgacgttcaatttgctttggaattcccaatggcttccgaccaagacgttgccgcacaaatcaaactgtttcaagaaaatatttaattcatcagaaagtctagggtgagcaattatgtcttctactatcattgcgatcttgcttttgatcacatttattggttttattgtctatattcttaaaggcggcaatttgatgattggttttttcatcatggctattttatgggccgtgattggattagtgccattcaatgttgccattaaaaaaatcttcgctgagccagccctaaactacggcccaacgatcatctacattgtttttggttcttggttcggacgcgtcttggttgacagtggcatcgcaccagccatctcagccgctaccaataaagtcggtaagaaaaagccgcttttggccgcggtgttggttgccttggtcacatgcctgatttttgtcagtgcctatggggttggctcggtaatcgcaatcggcgttatcctgttgccaatcctgctgtcggtcggtttaccccgtgatctggccctctcggtattcgttttgtcgatcggtgctcctatgtatctgaacgttgtcttgtacaaccaaatgaaagcattcttcccaaaggcggtctacggtggcaaataccttgaattcggcattgctgccatgatcgttcagatggttgctgtattgatctttttattcgttcatcgcaaacagattgaccctgccaaagcagatgaaaatctggcaattatcggcgcggctgacaacgctgatgaagtcaagtcggtaccggtgatttcatatcttgtgccgatcatcccagttgtcatgaacatgcttttcaaatgggatgcggttccggccctaacgcttggtactttaattgcaatgctgctgacgggacagtttaaagattacaagcactcgattcaatttatgaatgacacgatcaaaactgctatcagcgatattgccggattgattatgttcttgatggcactgaccatgtttagcggtgccgcttcaatgaatgccgttcgtttccgtccaatctttgctgccattctgccgcacaacaccttaattctgtgtctggcaatgggaatcctggcaccattagcattgttccgtggtccgctccatgtctggggtgccggcgccgcaaccgcagccgttctttcaggaatcggtctgttctcggatgcattgctgctgcctttaatgtacgtgccaacgttattagccgtttcaactgatattactcagtcatggaacgtctggggcctggactacatgaaggttgattctaagaaattcttgaagaatggcgtacccgttatgtggattgtaagtatcattaatgagctgctagtattccatttcttcggctaaactaatttaaaaagaggtatatgaatcatgagtgaagtaattactatcggtgaaccaatcgtcactttttgttccaaagaacccgatgtttcaatggctgatgccttagaatggcacaaaatccttggcggtgctgagcttaacgtagcaattggcgtcaagcgtcttggccattcggttgaatacatctcgcgtgtcggcgaggatccatttggcgaatacaccaaaaagacgattgccagtcatcaggtcggtacccgctacgtttcttctgaccccgactactggaccggtcatcagctaaaagagctcgttaccaagggcgaccctaaaaccttcaactaccggaagaactccgcagcctgccatctcagcaaggaagtcattgaaaaagttgacttaagcgacgtcaaaatcgcccacatgtcaggaattttccccggcatctctgacaccgcagaagaaacgttccgcgcgctgtttaaacgactgaatgaaaacaatattcttactacctttgatcctaatctgcggccgctttggaagagtcacgactatatggtcaagacgatcaatgaactggccggctacgctgatatcgtgctgcctggcgtcgaggaaggcaagatcttgatgggctctgatgatccagaagcaattgccgacttctacctcaagggagaacgaaccaatacggtgatcgttaagatcggtgcagaaggcgcgttcgtaaaaaccagcaatggcgacaagtacacggtcaagggcttccacgttgaccatatcgtcgacacggttggcgctggtgatggtttcgccctgggtgtcattactgccctgcttgaaggcaaatcgctccgctctgcagtaatgcggggcaatgccgttggcgcactccagattcaaacgcccggcgacaacgatggctacccaactcctgatgagctaaaagcattttatactcaggaaggagttgctgaagactaatgaaactacaggcagcaattgaccgcgttaccttagaacaggctaaggatttagcgcgtcagcttgatccaatcgttgacatcattgaaatgggaacgtcattgatcaaggattacggcttttacgcattgaataaagaagcattaggactgcagcatgccgagctgctgttggacgccaaaacgattgatgagggacagtacgagtttgaaaagggctttgaaaccggagccgacattctaaccgttatgggcgcggcttcgcaaggaacgctggaaactacttataaggttgccgaacggtacggtcggcaaatgtttatcgacctaatggaagtcaatgatcaaaaactggcagccattgatcaatttgaaaatgcaatctatggcctgcatcatgccaaagatgataccggtgcctttgatgccgctgactcagttgccagcttccatcaaaaatatccgcagatcaagcgcatcaacgtggctggcggcattgacctgaatcaggcacgaaaactcaaggcacagggaattacggaaaccgtaatcgttggctctaagatcgtcaaggctgctgatccggtggccgctgctaaggaatttatgaaagaggttaaataacatgagcttaattgcacaagtcaaacaagaaatcgataccgttttagatttagttgacgaaactcagctggatgccgttgcacctttgctgaccaaagaaaagcgcatctttgtcctgggtgctggccggtctggtttaatggcgcgtgcctttgccatgcggctgatgcacatcggctatacgccctatgtcatcggtgaaaccatcactccttctgtgcaggctggggatgtcttagttgccgtatcaggctctggcaataccaagagcatcgttgaactggcagaaaaagccaagcaaaatggtgctgaagtcatcgccgttaccagcaacgccaactcaaaactaagtgaacttggcgatggcgtcatcgtcgttccaggtgctaccaaagctggcgatggggttaaatccatccaactcttaagcaccctttttgaccagaccgtccatatcgttttagatgttttgtgcctgaaactaagccgccgcgaccatacctctaatgatcaggcagccaaagaacacagcaacatggaataatcgttcaacctgcaaccaactccctatcctcaaactcccaaaaaccccaatgatcgttgatgatcattggggttttcctattttacgtattgatccaaaaatttctggacgtgtttttgataggctttaggattcgtagcaaacgacttggcatgtgccgcacctttaacgacccaaagctgcttgggaccacgagttgcttgatagttttgatataccatccgcgttggcacgaaatcatcatcagctccatgaataaacagtattgggcgatgattttgcttcagcattgccgttgagctggcatcgcgcagataaaagccattggcgatgcgattgatgatgctcaatgatccttccagcggcttgcggaccagccatggcagatgataaaggttctgtgcctcataatcgatctcagcagccagactggaatagccgcagtcttcaacaaaagccttaacctggcgcggaagctgaatgccgctggtcatcatggtcgttgctccacccatgctgacgccaaacatcacgatctggctgtcttgaccattatgcttgatcagcttgttgatccatttgcgctcgtcatagcgttctggccaaccatagccaatatatttaccctcgctttgtccctgcgcgcgggcatcgggaaccagaacgttatagcccagctgatgaaacagcgcgacataggctcccatctgatccttattgcccataaagccatgcgcgatcaaaacgctcttattagtcttttttgtcgctgggacgtaccaggcatccagccgatagttgccggttgcggatttgatcgtccagcgcattttatgaacgtcttgataccactttttctgctgatacaagggatcgctcttaacgattttcgtattgttattgataaagtctttgtgccccggtaccattgccacgtgaaaaaagtagccgccagcagcaaaaatcatgatcaaaagcgttgctgccacgccgatcagccagcgcagccaccgatgcttcctaggttgattatgcaaaattatccctctttttctcaaattcgcaatgactaacagtttagcagattttattttgattgtcgaaattctttttacacgctctgttgctcaaataatgataaaataatcgtaacaaactaattaaggaagtgagcgtatgtttccagaacgtctgcgtgctttaagaaaaggccaaaacctcaccctaaatgaacttgcccaagcgttgaacgagcatctgggacctggcgaaagacccaacacgccaactcagatcggcaactgggaacgtggcatccgcaatccctcattcgttgaggttcgtaaagtagccgaattttttgacgtcagcatggattatctatgcggccgaaccgaacgtgatggtcacgacttggcaaaacttttcttctcaaatcaagacttgctgtttgaaggtaccgtcctaaccagccaggatcgctatgaaatttttcaattaatcaatggctacttaaagggacgcagccagcgcagtgaaactgacaccttttatggcaagcaggaagaactgaatcttgattttaaggagtaaacgatgaaccccaagcagttaaagaaactcaaaaaacaagttaaaaaagcccatcaagtcgttaaaaagcagccatatatcgagcaattgatgacctatcgtgatctattcgacgattttccgcagattaaatttctgatcaataacgtcttggaaagcgatcggctgatcaaaaatggtcttttaccgcagccattacctaaactgctgctgcccgacaatattcaagacatcatctttaaaaaagtcaacgagcagtacccacaaggcaacccagaaggcgaccggctctggaatcgctacgtggataccttgccaaaactggaccggcttctgcgtaattatcgcgactatctggaagcgacctatggcatgtggtcctacgtcaacgcgccttacatcaaggccctttcagaatacctgcatggacggccaacgcttgagatcatggctggcaatggctatatttccagcggcttgcggaatctgcggccagcacagacgatctttgccaccgacagtaccgattggaccaaggaaaacgagaccggcaagcatcccgtcaccacgattgagcctctggatgccttggccgcaattaaaaagtatggcagtcaagtcgattatgtcatcatgtcatggtcgcccgacaagctggaaattgattgggaagtcttgcagctgctgcgtaaagactatccagaagtcaaactgctggtcattggtgagaaaaacggtgctactgattcagctaaattctggcaaaatgctcatctaacccaggatgacgagctgaaaaaagttaatgaacagctccactcatttgacttgattgacgaacagatctatttggctcagtaaacaaaagaccaccgaaggaaaaatcctccggtggtctttctgcgtattgatattatctcaggctaatgacgaacgtccactttcgtcattgccaggccccttgcaatccggcaagttaacgggccccgctcgaaatgtcatttccgctcgcgcggggcagccaaacaagggtcggctgcctgacctctcgactcatcgcaatggctagaatagcacacttaaagctttcatgcaaactattcagccgccttggccgcgcgattctcattagtctgtgccaactgtttcgttacccaggcctgcattttttcagtcagggccgtggttgagccgtttagctcgtcagcagcagccaactcatcaattcgtaagcctgaagcattcaaatcggttcctgtagccaccagatacagattaactggtttggcatcggcaccttctaatagcttagggtcaagacgcatggcctcctgcattggaatattgatcaagttcgtttccagagctacttcaagcgaatcaccgcttggcatggcaacctgccacacataacgagccagatagccggcatccagctgatcgattacgaactgcaacccttttgtcaaagtcgcagcttgttgaatctgagccgcgtcggtagtatctgtctgcgttttggccttatcaagctgggtcagataatcattaaccgttaattccatcgcttatcgccccattttgttgatttcttggattgagtaatagtgacgctgtttcatgccgtaccagattccggcaatacaaagaatgatccccaggattgccagcacctgtacgaacatcccgtagacggaagctttaggccgcaccacctcaaaagctccccaatctgcggcagcataatacagcattaccaataccgttacataaccatcaaaacgccagtccagtgccgccaaaaaatcaacgactactgaaagcgcaacgatcagtccggcacgccataaaaccgtgctgctgaccagtgacgtgccgtgttgatgatacatcagcagttccaaagtcagtgcaatcagcatcgtaaccgtggaaatggcaatcactttgatgacgttgttcgacactttcttcattttaaaaaaatctcctcataatttgcttggcaacatcaccattctactagaaagcgctgtaaacctcaattactctgccgattgctggccaaaaatattgtatactaaatttatagaaatcaggagggatcaacaatggcagatggacaatatcacaacattttagtaccagtcgatggctcaaaggtcacggctcaggttttggaaaaaggcattgcgatggctaaggcttgcgatgctcacctggatattttaaatgtcgttcaggttacgcagctttccgatggttacgcgcctgccagctcgctttcacccgaccagacctatgacttggttaagacgactcaagaacgcctggaagaccttaagcaaagggcaatcgatgctggcgttgctaaagtcgacattcacgtgcggtttggcaatcctaagcaggttatcggccgcgactttcccaaagaccacaacaacgatttgatcgtaatcggctcaacgggcttatcagcttttgaacgcatcgtcttaggctcagtaaccggctatgtaattcgtgttgccaaacccgacgtcatggttgctcggacgcaaaaatagcaattattcaattaatcataaaaggacatgccccatttggaattggatgcatgtccttcttttttgcattttagcggaaaacaggcgcttagtctaagcccagccgtgtcttaaccatcttttccacttcatcagccgtgtagcacaggttgatggcatcgctggcccacttggcgcattccttggtatccagatccttcatcatgctccgcgtccgcagaatcgagctggcactcatggaatactcgtccagtcccatgcccagcaataatggcatagccagctgatcaccagccatttcgccacacatggccgccttggtgttgttggcatgagcggcgtcaatcacgtgcttgatcagccgcaaaaaggctgggttgagcggctgatacaggtaggaaaccgcgtcattgccccggtcggccgcaaagcagtactgaatcaggtcattggtcccgatactgaagaagtcgacttccttagccaattgatcggcatacaatgcagccaatggcacttcgatcatcattccgatcttgacgttgtcgcctagacccgggtgatccttttgcagctcatccttgcattcctggtagattgccttagcctgacgcagctcagccagagttgcgatcattgggaacatgatctcaacgggaccaaattcggaggcccgaatcaaggcgcgcagctgcgtcttgaagatgtcaggccggtgcaggcagattcgaattgcccggtagcccaagaacgggttcatctcttcgggcagcggcaggtagt

SEQ ID NO: 1845 - DNA, 108812 bp, Unknown
  gut microbiota DNA sequence
caaagttcgatcagctcagcttcttccagttcatctcaagctgttactcaacaaaataccagcaatactcagacagaaacaacaaataattctcagcaatcagcacaacaacagtttaataagtctgatccaaatacttggcataacgtcccatataaaggttatccatcgtatgacgcttactgtgaagctaatggtggtgatcctgaagttcaggcagaaacagcaaatatgcaacatgccaataacgtaaaaatgggaattgaaaatccagacggaagcgaaacgcaaaatttcaaaaattggctaaatgctcgcgataacgcatggaacaatggcaatgataattttccaagttatgatcaaaatcagcaatggtaaaaatcatttctggcaggcagttaactgctatcgacgcaatctcggcatgatatttaaatatcgtggctatttattcgatctaagacatggaatttatttagtcagatgttaaccttgaattcatttaccacatttacggacaattgtcaatccttttcacattctttttattcgcgctttattgtacttacaaacccttatataacgggattttattctttttctttcttttttatgagaattgtccaaaatctgatgacactaaaagctgagaaaagtattgacagtttcgtcactctttgtaataataaacgtacagatcaagtccaaagggccctaggagtaggtgttggactaacaaagccttagttctgtgcgtttgtgcagttctaaggcttttgtttttttttgaggtgagatttttgtcagacacaaacaattccaaaccgttcaaaacattaaatcggcaactaacaattctacgtgagcgtggccttgatgatgcccacgctaaagctaaacgctcattagaacagatagaatattattctttaattaatggttataaatggatgttcttagccagggattcaaacgggaacataattcatccagaagtatacaaagatgatgcatcttttgatgaaattaaatcattgtatgatttcgactttgaactaagagcaattttatatcgtgctctacttaaatacgaaactatgttaggagcagaaattgcataccgtttttctgaacagcatcaagaagaacatgcatatttagcgatggataatttttccagaaatccccaacaagtttcttcagttgttggtactataagttctctatccagtacaattaaaaaatactctgatcgcaaaggtaaaaacgctataaaacattatgttaataagcacggtcacgttccactctgggttcttgtcaacttcttaacattcggtgaattaaattatttctattcaaattgtacaccggatatacaactaacaattgcaaaagattttcaacataccaaaaaagtttcgtacgatggcagcccacaaccagcaattacaccaaacgcaattatggatatcaatcaaatggttaatattttcagaaatgcagttgcacatggtgaaattacttattcaaagatcgttcaacgaactcctcatatgcgtgacataaaggtcgcagccaatatcagaaatgttcagttaaagagtcaagctggtatttttgaacttataattgcaatgaaagctgttcttcccagaaaaaattatcaaaggttaattaaggatatcaacactttactaaaagaatttaaaaagtgttttactccgattaattattcagcattattacaagatatgcattttccaaataactatactgatatttggtaactaaaagatacatccactactgacataaagaatattcaaccagatcatcaacgttaaaagctttgaacaaaatagccctagccgtaacagctagggtttaaaaagatacttataagaacatatgtacgaaaggaaattgttatgaatagaaacgaattattcgaatacatcgaaagtaattctaccgttattactatcttcaagaataaggttcgcgctgaccaaaaattaaaaaacaagaagcggcaacccgctaaacgttggaatgaatctaaaattgaacgaactgttgataaaattaccgatgattttattaacaatgtttatgataaattagcaaaaggggtaaaagctaataggcacaccaccaaacagcaatggattacatttattgaagagcatgaagtactagatgaacttgaagaatctgtcataatgattagccttgaataacactagtcacgaaaaataaggtatttaaacaatgtttgagaagtaattaaccaaggatactaaaaaagctaaacttagtccgctgacggaaataaaggcaaacgtcaagtgaccagatccattaatttttatacgtatggcgaacgcatgtttattttataaaataaaaagaactttccttaatttaaagaaaagttcttctctgtacctaaccatctttgccaatgggtaaatccaattactaaaagatgtctcccacaactgtggaagacattgaatataacattggctagcactagtatatcattttttagataagccttacaaaaatggaggaaattcatatgcctaaagttgcaatctatgctcgcgtctctacactcaaccaagctgaagaaggttactcaatcgaaggacaactagccagtctgcgtaaatattgtaatgcgctcgattggcaaatttatcaagaatacgtcgatcctggcttttctggaggctctttaaagcgacctgctattcagaaactaattgaggatgctaagtcgtgtaggttcgatattgtgctgatctacaaattggatcgattatcacgatctgttcaagacacactttatcttgtcaaagatatctttgataaaaataagatttctttcgtatcacttaatgaaaaaatcgatactagttctccgatgggaaacttattcctcacgctgctagcctcaattgctgaattcgaacgtgaacaaatcaaagaacgtatgatgatgggcaaagtaggacgtgctaagtctggtaaagccatgggctggtctaaggttccattcggctatacttacgataaacaaactggtatttatcaaattaacacattacaagcacagatcgttaagagaatttatcgtgattatcttgatggtgtatcaattaccaaacttgttgatttgcttaatgccgaaggtcatatcactaaagatcgtccttggacttatcggaccgttcgtcaagctttagataatgttgtatatactggtcgacagttttatcaaggcaacgtttatcctggccaacatgaagcgattatttcaattgaagactatgataaaacccaagctgagctaaaacgccgacaattaactaatgcccaaaaatttaatccccgccctttccgggctaaatacatgctctcaggtcttttacgctgttccgtttgtggctcatcaatgatggttcaaacacgctatttaaagtatgcagatgactatcactattatcgttgtgtcagttcaataagaaaacgtattcgctttagttatcgacaagataccgaactttgccaaaatcgatctgattacctaaaagacgatcttgagagcgccataattaagaccatacgacacctgcaactgcatccagaccaaatgcctgttaatactgttaagtttgacgacaagcccttaaaagacgaattaaatcgtattaacgacaagctaaataaactagtggatctatacctaaattctaatggtatttcaattggcattataaaccaaaagcgtgaggagctgctgcaacaaaaagaagtgctcgaaaacaagctacaagaacgtaaacctaagcaaccggaattagatcccaagaaagctttgttacttttaagcaagaaaaacattctagagttgccatacgaagaacaagtaaagcttgtaaaatccttaatcagcaaaatcgaagtcagccccagcaagatgaaaattcattggcgttttaatgtcgaaaaataattttaggtttcttgatttccaatagcgtaaacgcgtgccgtttctgcttctttaacatcttagtaaacctcctgcagtgagtgatagattggcaaaagaatactgagatacattaaaaaaatcccagcagcaatcaaaataaaaagcgctggctgcaccaataccagaatatgcatcgttgactgccgaaattttttaaacttgagcttggaaaataaagtcagttcctggcctaattgttcattggtcaagccacgattgataaaaatagccagttcatccggtaagaaaggtgctttcaagattaggtcggtcaactgtcttccctgcgagctgagctcaaatgctgcctgaccaacctgatgcaataacgaatcatcatcaaatttattcgtcagttggcaaatttcacgcaaagagaaaccatgctgcagcaaaatagctaaattggacgtcagataataaccatagtattcacgaaagattttgccaaacagcggccagcgacactgatgtcttactttttttagcgttgacatatgccgccagtgaatcgctgccaatcctccatagctaaaaaaaacaccgcctgtaattatcagtgtttcgccaattggccattgctcgccgattggcagctgattctgctgctgccagctttgcagctcgggaaaaacaaaaatcagcaaagccgccaaaatcgtccccagcatcaccaataaaatcagcggatattccaaaagcgtctttagctgacgatgctgctgcttttggacctgtaaatactgaccaatctcttttagcgttatcgaaagacttccatgctgctcagccagcaaaagctgatagtaaagctcaattcttaaatatggctttaacgcatctgccagcagacgaccggccctaagctgctgatcaatttttgaaaaaaaagcagcctgctgcggataggctcgctgtgagaattgaactgcatgctgcagcgagaagccaaccgctaacaaatcatgcatcagtaaaaaccaatcagcctgttgaccggctttaaaattaaccggcttggtatgactgggccacgctcttttccacacagcccttggccacgcaatttttaagctgctgctgccaagcatcggtcatccccacctttcgctttgtaaaactttcctgcaatgcatcatcagccaatagatcaaagagtaccgccaattgtttttttacagtcggcaagagtcgttgatagcagacacagctgaccgcctgctgcagataaaagtcatcgacgttcagctgttctagacgagtcaacgctccgtagacgtttctggcatgcacggttgccatgaccagatgaccgcttaaggctgcttgaactgccatctgtgccgtttgtggatcacgaatctcgccaatgataaagatctgtggtcgatgccgcaagccaaccttaagcagctgctgatagcccatctcagccaattcgttgacctgcagctgaataaacattggctcggtaatctcaaccggatcctctatcgtcataacaacacactggtcaacgaactgacgcgccagatgatacatcgtcgttgtctttcctgatcccattggtccggcaaacagcatcaacccccgttttttagcagtctgctgcagtttttgccattgcggcggtaccagcatccgataatcattgcataaacgatagataaaacgtaccaccagtgactcctgtccacgacagtcaccaaccgacgacaatcttaagtctacctttcccctaggcgcgtgccagcaaagcgatcctgactgtgggcgacgatgctcactgactgacatatcagcacgatactttaaatatgcaatcaaacgcttgccaagtggtaatggccattgctgataaagctgcagctggccctcatgcatgattaaaagtcgatagtagctgcgatatggcagaacatagagatccgacacccggtagcgaattaaaaccgcaatgtctcttgagaactcgcttttcaaaattatccctcctctaacaatgctatatgccaaaagaagcaggatgatatttttttaatgccgattattcgcttgcaaaagttttctaataaaaaaatcacgccactctcgactgtaagcgtcgctgttggcgtgatcttctaaagattagcattaaaataccgaaatacattacctgacattgttaaatattgaatgctttggagaaaaaaaagacgcaggcattattgcccgcgcctaaaacgaaactattcagcatcgtcatcgtcttcgataaccccagcttcataaatgtcggcaacatcgtcgttgtcagtcagttcgtcaatcaagtgcttgtattgactaaccttgtcgctaggaacaaccgtcgtgttttgagggatcatcgttacttcagccgtatccagttcgtagccttgttcttgcagagcatcacgaacgctggtcatgtcgcttggtgccgtgaagatctggaacttgtcgtcagtagccttcatgtcttcagcaccggcatccagagcatccatcagcatgtcgtcttcgctcttgtcgagaccgtcacgcagaatttcaatcaagcccttgcgatcaaacatgtaggaaacagagccactggcacccagcgaaccgccggaatgagtaaatgcagaacgtactgcagcggccgtccggttcttgttgtcagtcaaggcaaagaccatcactgcaaccccacctgggccatagccttcgtaagtaacttcttcaaacttggcaccaccagcaccagtagccttttcaattgcccgttgaatgttcttcttaggcatgttggctgcatgagccttgtcgattaccagacgcagttgagggttgtttgctggatcaggatcacctgttttagcggcttggtacaagtcacgagaaatcttttggaaaatcttgccacgcttggcatcctgagcgtttttacgcccttgaatgttatgccattttgaatgtcctgacattactaactcctcttttcttatatagatttagataacaaacattgaaattttaccaaattaagctggtaaattcaagactttatcaatgacgacgaacaattcgcagcccaccgcgcaaaagccagccaaccaaagccagcaccgacagcagccaggcaattctccatcccctggttaaaacgtcattgccaatggttgcaatcgttgaagcatagtctggttgttcttgagcagcctgattgattccaagctcgagcagccagacaaagccaaagtacagtcctgctgaccaggcagtcgaccagctgaaaacggccagaaaacagtgtttaaataagctccagacaattaagactgccagcgccaatccactgattgccaacagaacgttaacgactgttttaacggtcgtaatcgttttggcagccgtctgtacctcatcggtgttcagtttttggttgacctggttcgtcagctgctgattgaactcactggttgccgaagaagggagcagtgatgttgaaagaccatatgatcccagctcatcatcaacctttgactgcagtcttttttcaacattggtaagatcaagcttaatgctcttgccagcataaacttgtttaactgcctgccttaccaagcgatgcgtttccttggttgttagcagtgagccagaaacgccatattcgcttaaactgccattgacttcttcttgaagctgcgtgctgattggcgaatcggccagctcatcagccgcaaaatcggcatctaagaccgttgcgtttagcaaaaccgcgattgccatcaccatcgtcagcaagatccccaaaaaggtcgccccaaaatggtgatgacgcggctgttgaacggaaacatcggcctgttgtttttgacgatgcatctcttctcgagacatcaaagatcaatcaccttctagcgcgttgactgacgcttttcaaaaccatgttccaaaataacgtctttagattcatcatcttctttgtcttcatccttgctgttcatcagcttggtcaatagacgcattgatacggcccctaagtcataaagcggctgcgtgatcgtagtcagcttagggcgtgtaatctcagtggtcttcgtgttgtttgaggcaacaatctgaaactcatcaggaaccttgacgccgtgatcagtcaaaccattcagcaagcccgctgctacgccatcatcgctgacaaaagctgccttggcgccactgtcagcaatagcttgagattgcttgtagccttcagcataagaatcatgcgtctcaaagatcagcttttcgtcaaaatccttgccagcttcctgcaaagcctgcttgtagccttcaatgcggtaacgcttgttgatggtactatcctttgagcctactaccagtgccaccggaccatcaacacgttcaatcaggtacttaatggcttgtttggcagcttcttgataatcaatccggaccgttggcagctcgtcatcattagtaacggaaccagccacaacgaccggtacattagatgagctgaattcctgccgcagctcttctgaaatgtcatgccccataaagataataccatcaacctgcttggccatcagcccacgaacgacttgcagcgcctttcgatcatcagcatctgagttggtcagaatcatgttgtatttgtacattgaagcaatatcgtcaatccccaatgccaattctgcaaaatatgcattcgtaacatctgggatcacaacaccaaccgtcgtcgtttttttgctggccagtccacgagcaacggcattcgggcggtagtttaactgcttgataacgtcgagcacttttttgcgcgtttctggtttaacgttgggattaccgttaaccacacgcgaaacggtcgccatggaaacacgcgcttcacgtgccacggtgtaaatggtaactgattgtttttccataatttataagccctttctttgttgattttagttgctttcatcggtttttcataaccgcaatcaatataacaaaattaacggttttgcgcaaacgtaatgataaacaaatatgctataatattaacaattgcttaaaaaaatctcatcttatgcataaggagcaagacaaatgaacaaattatcacaattgcgtcaagctgtcaatgaagcacagctcgatgttgcctatctcagtgatccaatgaccattaaatatctgactggttttggcagcgatccgattgaacgggttttggcgctgctggtctttgctgatcacgatcctttcctgtttgcaccagcacttgaagtagaagccatcaaggatactggctggccttatgacgtttacggctacctcgatcatgagcagccttatgcgatgattgccgaacaagtcaagaaacgcgttgccgctccaagcagattcgggattgaacaaggctttttgaccgttgctcgactgcgggccttacaagagcagtttcctaaagccagctttgactatgatatgacgccaacgattcagcatatgcgtttgatcaagtcgccagacgagattgctattctggaagaaaatggcaagtgggctgatttcgcctttaaggtcggttttgatgccgtcaagatcggcgcaaccgaaaaccagattgccgctgaaatccactatgctctgcaaaaacacggcgttatgcatatgagttttgataccttgattcaagccggtgcccatgcagctgaaccacatggcgctaccaatgacaccaagattcaagacaacgagctggtattgtttgatttgggaaccaacgttgacggctacaccagcgatgcctctcgaacagtggcagtcggaacgcttaatgataaacaaaaagacatctatcaagtctgccttgaggctcagctggctgcccaagaagctgccaagcctggcatgaccgccgcggaactggataagattgcccgcgacattatcgaccaggccggctatggcgaatacttcattcatcgtctgggccacggaatgggaatgaccgaccatgagtttccttcaatcatggaaggaaacgacatgctgcttgagcctggcatgtgcttctcaattgaaccaggaatctacatcccaggttttgccggtgtccgaatcgaagactgcatccatattacaaaagatggcaatgagccatttactcatacgacaaaggaactgcaatacgttggcagataaattgcaaatcaaaagcacttcaccagcaaaagtgaagtgcttttttgtcgattcataatttttaatcttggttgcttgatgatgaatgatcatcctgactagcagcgtcattatcttcatcagatgcatccgcagttttgtcgattacgatgtcatcttggcttgaggtgtcggattgggctttggcaagttcttctctaatctgagcggtttgttcgtcaaagtcatcgttggtaaaatgattgaccgcttgatcagcactttttttaaccgtatcagcgcctttttttactgagccggccaagtcgctaaatttatcgccaaacttatcaacagcctgttccttaacatcctgcaccattccatcggcaagatccaaggcattgattgcatagtcggttgcataatcaacggcatcatgcgtcttatcagccacagcctgcttaatctgctttttcttatcggcactcagcgattgccaggctccaaatgcggccgcgccaccaaccaaaaaaccagctaaaacttttttcgtcatgtgcttatcctccaatcaaaactagttttccttggaacgatgcagcttgctaaacaggtttagtgctgcttttttaccggcatttgccaacagctggcgtccctgcttggcactttcatgctgcgcgttcagcttgtcagtaaactggcgtgccgctgcgttaacgtcgctggcactctgcccaagattggcaatggcttttaccgccggatccagttctgacgactttttgttcaagtcttccaataattcgttggtatttcctaaaacgttttctaattcatgagtaagtgcatcaacgtctttgcttaatccatcaatacttttagtcgtttcttccagtgtcttgcccaaacgagacaaaaacattccaataaaacaaaccagcactacaaacgcgatcgccgcgatcaggccggcaatttgtccagcagtcatttaaaagctcctcctttgtagttacaccaagtttaacatatcgcataattttttgttaattattattagcggttgacttatgatatagttgtctggaatctatataaggagcgatttcaatgaacaagcagatccaacagctgactaaatcttttgccaacgtcgatctggaccagattgcccaaaatatcgtcaatcgtctattttcgattttactgacgatcgttatttttttcgtgattctttgggcgggcaaactcatcatcaactacgcctttagtcataccaaacgttttaacatgcttggcgctcatcgcatggcaacctttcacaccctgacgctcaatatttatcggtatacctgctttttctttctgctgtatgccctgctttctttgattggcgtaccggtgggaaccctcgtcgccagtgccggaatctttagtattgctttgggacttggcgcacagggattcgtcagcgacatggtcaacggtttttttattttgctggaaaaacagcttgacgttggcgatgtcgtggtgatcggtacggttaagggcacagtttctggcattggactgcgaactacccgcgtcaccagcgcggatggcacgcttaactacattcccaatcgcaatattactaccgtcagcaatctttcccgctcaacctggcatgccagcgtcgacattcctattggtcccaatgcgccattggatgagatcaaaaaagtcattgcagcggtcaaccaaaaactaatcacacagggcaagttcggcaagcatcccgctcctaaaatcgttggtcccgttacgattccagcaactgcttctgccaaggcctcattggtttaccgcgtggctttgacgacaacttatgatgccgaatatcaattgaccagtgactgtctggcagcttatctgacggctttaaacaatgcccatgtttcgcttgactaacttcaccaagaaaggtttatgactatgtctattcgtttaattgctaccgatatggatggcacttttttaaataatgagcacgactacgaccatcaccgctttaaaaaagtctttgacaaactgactaaaaatggcgttcagctggtggcagccagtggttcctcataccctcgtctgcgtcgagaatttgccgcagttgccgaccagatgatttttatctcgcaaaatggttcggtagttcattatggcgatgagctgattgattgctttccgctgcatcatgatgacttaagggccgttttggtcgcgttgaccagactgtatggtgatgacgacatcaatcagctggttatttcaggaccaacgacctcatttgttgatcaatccatggatgagaaaaattttgccatcgtcaagcttttttatgaaaacgttaaacgcgtccccaacctgcaagacatttttaaatatccgcttgacgagccgcttactaagatttcggtaaattttgccgatcatattgatattaccgatgttaccagtgaattggacaatctgctgccagccaatctgatcatggaaaactcaggcttcaatactgaattaattggtgatgctcatgctactaaacgcaatgctttaatggcaatcgccagtcaattcaatctgcgtcaaaacgaaatcatgacctttggcgataatgaaaacgatctgggcatgcttacgctgacttctcacagttatgctatgaaaaatgctgctttgccgattcgcttggccgcatccaacgtaacgcgtctgactaatcaagagagcggcgttttggatacgatcgaacattattttgatttttcccactaaaaaaagagcagcctaagtcaggctgctctttttttagacattttcagtttctggcagatcaagcacctcaaaatgccgatcaaacgtgtgagccgcatagttaacggccttcaacaattcgcgacgcgtaacgatgccggtaaattcaccgtgttcagacacgaccgtcaaaaatgactgatcaatcagcagatgcagattttcttccacgtcataaggatcagtaatcactggggcatcagtctgcataacgtctctgaccttcatcgtctgcagcttatccagattgattcggtcagtttctaacagttcatcggtaatcattgaaagcgacagtaatccgcgatagtgactttcattatcgacgacaacgatcttggcataatgatccttagtcagtaccaagaatgcatgatacagtgaattgtcttcattgaccgtagcaaccaggctggctggaatcatgaatttttcacggcgatccatcattaattggcgaatctgttggttaatcattcttaaaaatcatcccttcatcaacctgcttttattgtaatgcttatggacgtcaaatgcgactgttattccaaatcaagatgatcgtctattgacgtaaaaagacaaagtgcagatcattaatcggctgcatcctgcgatcatagtactgaacatcaagcttatttgagtcagccgtcacaatcgccaaggttccgccaatattttgatactgtccacgcggctgactgatgctgcccggatttaaataaagcgttccttgattaaactcaacggctaattgatgagtatgaccataggctgcaatcgtcgctctttgctctttagccagcagcattagtggcgtcaaggtaaaattgacttgataaagatgaccatgcacgaccaaaattcgttcttgatccgcgactgccaactgagactgcggatagtccaatccccagtcggtattgccaatcacggtcttaaatggctgcatgaccggatcgcttggctcaaggtttgaatcaccgcaatgcagcattatgtcgacttcattgctaaatcgagcagctattttttgtaaaatcgcgcgatcgccgtgattgtcactgacaaataatgctttcattaaatcaactcccctaaactgtcatcgtcgatcaggctatgcctgccaccactcattaaaatgcttcataaaatccgctaaggcgcgaccccggtgactgatggcgtttttttgctcgctgttcagctctgccatggcacaatgcagctcatcgacataaaaaagcggatcgtagccaaagccattgctgccggttaattcatgcagaatatgtccatcaacgcgcccatcagccgtcagttgggcaccatttggctttaaacctacaatggtcgtgtggaagtgcgccgttcttttttcgtcagctaccccagccatcttttccaatagcttggcattattggcagcatcatcatggtctttggcataacgcgccgaatgaactcccggctcaccgtttaaagcatcaaccaccaatcctgaatcgtccgccaaaactggtaagttcagtttttcaacggcggcctgggctttaatcagcgcattttcttcaaatgtctgaccgtcctcatcaattgcaaaagcgggaaaatctgccagcgtcttgacctcaattccttttggcgccaacatttcagcatactcacgcgccttacccgggtttttggtagcaactacaatggtttccataactgctttcctttcttaaagttccaaatgtgcacacgtatagtttgaattgctcagccactgattggcccctgattctaagaccttgacgtcgccggttgagtaaagctggctctgtggaagcagcgcagcgtcattgcaggcatcgtgactaatcagccatttttcggcactgttgactgcttctttagcgggatcaaccaatgttaccttcttaccgagcttttgttgaatctcagctgccaagaacggaaaatgcgtacagcctaaaatcaaggtctcaaccggctgttgatcaaaaactgccagctgttcatcaaccgtctgtttggcaagactagttccggtctgaccatgttcaacgattgaaaccaatggctgcgcggctttttcaactactaagacatcaggatctagttgatgcagtgctttttcataagcatgatttttaattgttgacgccgttccgatcacgcctaccgaatcatggtgctcctgctgcagtgctcccttggctccaggagcgatcataccgattactggaaacggcatcttctgctgcagagttgacaaggcggctgctgttgccgtgttgcaggcaatgatcatcatcttgacgttttggcgcttgaaaaactcgccaatgtttaaggctagttgacaaacgtcctgttgcgtgcgcgtaccatatggaaaatgtccctgatcgcccacaaaaatcaatttttcgtggggcagctgctggttcatgatccggatgactgataagccgccaaggccggaatccataatcccaatcggccgtttatccataattgcaacacctttcttccaaatacttgaaactccattatctatttatttgtcgttattttcaagttttgcggcaaacctgagcttaaaatcgtcaattgatgatttgccaaccagcagtcaaactcgttttgatcgcaaaaaagcatcagtatcaaattaaaataagtttttaacgatatttaaggaactaatgtctgactttctattataatgaattatgatttgcgaaaaggaaggatcgtatttctgatgagtcaaaaaacctacgaccgtttgatacacagtcatcgcggcttaattgccggcaccatgcgcgatgtgattttgccagcaattctcggcaaagaaactgacggcattctttattggattggcaaggacctggcccgtgagtatccggtagcatcgcttgaggacttgatcgttttaaccgagcagctggggatgggaaaactcgaactgcgtcaaaaaaactcaattcagcatatttggcgtttgagtggtcccatcgttgaggagcgattggcagttgataaagaggaaacctctttttctctagaggccggttttctcgcccaagaactggaatttcagcttagtgccgttactgaagccgaggtaatcgagcacaaacgcagctacgtcgaaattcttgctcaaaatgatcctcagtccgatactgaatcggaaaggacggaactggctgaatttattgaaatcgaaaagccagtctctgaacaagcttctgaagctgattctcgaaagggccgccgctttcgtcataaaaagcaggctccccaaaaataaaagcatcactcatcatcaaattgattgagcgatgctttttattttaaaggtattgattcaaaacctgcttgagctgatcggcagaatgatagccaatcagctgatcgaccacctgaccatcctttttgatcatcaaggttggaatactcataatccgaaactgctgaggcgttgccggattttcatcaacgtccatcttgtaaaaggcaacgtcaggcatctgttctgataaggcatctacgactggcgactgcatgcggcagggaccacaccacgttgcccaaaagtcgatcaagacaacgccttgctgggtgtcctgttcaaaagtctgatcggttgtagttttaactgccatgataaaggctcccttcattgattgatgatcttatcataccaaaactgctgattttcgtcacttattttgcttactttttataagtcacgcttaataaacttattctactgtaaatagacgatcgttgccccatcgccaccagcattaggtgccgcgtaggcaaacgacttaacgcgcggattgctgcgcaggtattcccatgttccttttcgcagcgcaccagttcccttaccatgaattacggtaaccggtgaaagattattaagcagtgcatgatcgataaactgagccaattcgctcatcgcctgttcatagcggtgaccgcgcagatccaggcgggctgacgtatgccgcgtttgaaccgtacgcactggacgacgcttgggttcgcgctctttttcggcgttggcgagctgctgtttggatattttctccaggtcgttttcgtcaatttccatccgcaagattcccagttgtacttcccatttgtggttgccgcgtttctccaaaagctcgcctctttgaccgtaagatttgactaagacggcatcccccttatgcaggtcgcgcttttgcttggcttttttcaagactgagttgtgctttaggcgtggattttggtgcagcgcatttaaagctccctgtgcatcgatcaattcattttccttaacgctgccgccttgggtaatctccagttggcgcaaatgatggataatctgatcagcttttttcttagcctgcgagacttgatggttagccttggaacgagcatcttcatatagcttctcgcgctgttcctcaaaccgagtcagcttgtcgttaagctcttgttccgctgctttatttttggtcaaaagcacctcaagctcctcgctgcgctcccgggcctgtttgcgctgctcaaccagttcgccgatcatcttgtttagatcctggctgtcatcactgaccagcgattgggcctcggcaattacgtcttgaccaattcccagccgtttggcaatggcgatcccatttgactgtccaggaatccccagcagcaggcgatatgtcggccgcagcgttttttggtcaaactccatgctggcattaatggtttctggtcgatcataggcaaaggcttttagctcgggataatgagtcgtaactacaacgtcactgcctaacgcaccaatcttgtctaaaatcgccattgccagagccgccccttctttaggatcagttccggctcccagttcatcaagcagtactaggctgtgagtcgtagtctgatctagaattgccttcacgttttccatatgaccagaaaacgtactcaaattctgctccagtgactgctcatcgccaatatcggcaaaaatctcgtcataaactgcaatcgtgctgccctcagctgccggaataaacattccagactgtcccatcagctgaatcagccccagcgtctttaaggtgatggttttcccacccgtgttgggaccagtgatcacgatggcatggtagtcctgtcctagcttgatatcgttggcaacggcttttttaggatcaatcaatggatgccgtgcctttttcagtactacctgaccgtcttggctgagcaaaggcagtgttgccttggtgtcatgggccattttagccttggcattgacaaaatccagatgtcccagaatcttggcattattctgaatatccagccgataaggagccagcatcgttgaaagagctgccaggactcttctgacctcttgccgttcctcgatttgcgattgacgcagacgattgttcagatcaactgtactggctggctcaatatacagcgtttgaccactggcgctttgatcatgaactactccgccaaagcggcttcgctcacgactcagtactggcagcacataacgttcattgcggaccgtaataatcggctcgcttaagtacttggccattttgccatgcgtatatttttccatctgctggcgaatctcagcctcagttttagcaatcagctgtcgaatcccatgcagcttgctggaagcctcatccaaaacagcaccggtatcctgatcgattgactgtaaaagccgcttggtaatggaaggaatcgtcaccaattcatcaacttctttaggcagtacctgcagcatgattttttcggcatgcagtctttcaaaaaaatgctggacgctcatgctggcccgcaagaccttggcaatctgcgccagttcggcaccatttaagctggccttgatctttagtcgcttcatctgcggccgaacatcagccagtttaggaatcggcatgccgccttttaagcgcagaacgtctgctccatccatcgtttctttctgccagaaaagtaccgtttcataatcagactgcggcatcagctcagcaagttcctgcttgccggttgccgatgccagatactttgccagttgatctttaattcgctgaaattctaatgtttctaaaattttttcgttcatttaaaactcctttcagtccgtatcaagcacctattaagctttaaagactgatgccgatctatcccaatagctgcagagctgccttggccatccccggcgtatccctgatcatcagctgagcaattcccgattgagcaagctgatcttgccaccattgactaggaaacagctgaaaaatcatcaaaaacataaaaataatcaaatagccgaccaagacgtccagtgccccaccagcccaacgattggccgagccaagtacaggaagacgattcagccagttggttcttttcagcagccaatgtcccaaaaaagaaatcgtgctgaagatgatcataaaagccaagccattatagaaaaaagaagttggatcaatactgctcaagagactgccactaaccgagccggtagtattgctgctaatctggggcagaaattcagccaatgcgccgcccaaaaagcgcgcccccactttagcggccagccagctgatcaaataggtacaagtcgaaatcagcatacctaacaggccacggttggtgccgttaatccagcagccaatcaagagaactaaaattactgtcgttaaaatcattttccggcctcattaatctacagtatcaattcaatcaataataaataagacccagcatccggataaaccgcacgccaggtcccgatatcttaacctgagctggctaaaaaagtctcttttagcctctctggtcggacttaggcattgaaattgccttcatcatcaataaacgtattaagcacttcttgaaccattgcccattcttcatcactttcaattggcatcagctgaatgtcgccactgtcaacgccatccatgtcgctggctggttcaaatgaaaaggcctcaatatcaacttcatcggcattttcttcatccaatgggtaaagacagatataccatttgccgttttgatcggacttaaagcgcattgcttctttgtagagctcttcattgcccttttcgtcgaccagcgtaaaaatctcttcgttgtcgcgtggttgattttcgctcataagtaactcctttatcgctctttatagcttttgaaccagcttgccatgccgatcaagatagttttgcaggatcagcgttgcagccaactcgtcaattactttcttttgcttgcgtcttgaaatatcagcctgttcgaccaacattcgatgagcctcaaccgtagtcagacgctcatcttgaaaatcgattggcaggccaaatttttctaccagcagctcgccataatgatgtgatgcctcaacacgtggtccctcggtattattcatgttctttggcaggccgatcacaaaaccagcaatctgccgacttttaaccagttctgccacccgatcaagaccaaactcgccggcttcctcatcaatcggaatgatctctactgcctgtgccgtccagcctagtggatcactttcagcaacgccaacggtcttagagccgacatccagtcctaagagtctcatttggcgtctccattatgctgcagatagaagcgcacgagttcttcaatgatttcatcacgctcatgttcacgaatcaagttacgggcatcattcaagcgtggaatataggctggatcgccagaaagcagataaccaacgatttggttgattggattgtagcctttttcttctaaggcttggtatacagtatttaaggtttctttgacgtcttttggcttttcttttccaaagtcaaaaaacatggtcttgtcacttgccatcttttcacccccgacctttctttatcagtatttaattctactataccacttaataaatcacaatcagcaagcttttccttaatcaacctttaatgaaaaaaagacgcagtgccgttttgacactccgtcttctaaattgcatgcagctatttattcagatattcggcggcctgctttagtgcagttggaattcccgccggctttttgccaccggcttgtgccaggttaggacggccgccaccgccaccgttgattgctggggcaatcgccttaataacatcgccagccttgatgtctttagtcttgttatcgctaacggctaccagcatgttggccttgccttcactgccagttgccaaaaccaaaacatcagacagctgcttggcccgccagctatcagccagctgccgcaattgtcccatgccggcaacgttgacttgcgctgcaatcaacgttccctgcttagtatcttgaacgttgtcaaagaccgcgttggcttgttgggcagccagtttggcctccaaagcctcattttgcttttgagcttctttcagctgactttgcagttcttcaacacgatgcggtacttctttcagctgagcaaccttcaattcaccagcggtttgtgtcagcagatcgtcatgttcctgcataaacttgaaggcatcgcttgaggtaacggcttcgatccgccgtacgccggcaccaaccccaccttcagaaacaatcttaaacaatccgatctcattagtgttcttaacgtgatcgccgccacagaattcagtgttgtaatcgccaatcttaacgacccgtaccttgtcaccgtacttgtcagagaacagggcaatggcatccatcttcttggcagcttccagatcggtttcaaccgtcgttaccgggatttctttccagatctgttcgttgaccatatcttcaacggctttcagatcttggtccgttacctggccaaaatggttgaagtcaaagcgtaagtagtgctgttcaaccagagaaccggcctgctgcgtgtgtccgcctaaaacgttgcgcagagcctgatcaagcaggtgcgtagcggtatggttcttttcaatcttcaaatgacgcagccgatcaaccttcagtgcatagcgggcaccttttttcaatggcgactgcagctccactcgatgcaggttttgctggtttggcgcgtgctgaacgtcaacaacgcggccaaccagattaccgaagttgtcgataatgtcccccgtgtcggcaacttggccacccatctcggcataaaatggcgtgacgtcaaaaataacctcgacatccttgtcgcctggcaatgcctcttcaacgtgctgaccagcttgagccaaaccgattaccttggcattttgaacttccagatcggtatagccaacatacttgcttggctccttgaattcagtccaaacgtccgtctgaacgcccatcccgttgtcaatatcacgagctttgcgggcccgattctgctgctcggtcatggcagcttcaaaaccagcttcatcaacgctaagaccttcatcagccgcatattccttggtcagttcaattgggaagccataggtatcatacagcttaaaggccgtcttgccatcgatcttattgctgccatctgccttggccttttcaatcacgtcgtttaacagactcaagccaccgtttaacgtcgtgttgaagcgttcttcttcagacttgataactgaggcaatgtagtcggcattttttaagacgtctggatagtatgattccataatcttgccaaccgttggcaccagcttgtacaagaatggcttgtcaatgcccagcttcttgccggcaacgaccgcgcgccgcagcaggcgacgaattacatagccacgcccaacgttggatggcagggcaccatcactgattgcaaacgtgatcgtccggatatgatcagcaatgatcttaaagaagacgtcatcatccttgtcaacaccatacttcttaacaccgctgaattcttcagtctgtttgatcagcggcataaagaggtcggtttcaaagttggttggcgcactttcaaaaatggagacaacccgttccagccccatcccagtatcgatattcttatgcggcagcggctcataggtatcctctggcgtgtgattgaattgagagaagacgatgttccagatttccagatagcgttcgttttcaccaccagggtagttttctggatcatcttcaggtacattgttcatttcctggccacggtcataaaagatttccgtatcaggaccagatggaccttgaccaatgtcccagaagttgtcttggttggccagcaggtgatcttcggcaaccccggcttccagccagcagcggtgagcatcgttgtcttttgggtaataagtaacgtacagcttttcaggatcaaagccgaaccattcgtcactggtcagcagctcccaagcccaaggaatgacttcttttttaaagtagtcgccaaccgaaaaattacccagcatttcaaacatcgtatgatgacgcgccgttttaccaacgttttcaatatcattggtccgaatactcttttgcgagctggtcatccgcggatttttaggtacgacctccccatcaaagtactttttcatcgtagcaaccccagagttgatccagagcagcgtcgggtcatcaaccggcaccaaagaggcacttggcatttcggtatgaccgtgttgaataaagaaatccaggtacatgcggcgtacttgggcactattgaggtgctttaattccttgctcatgttatcttcctttcctggtaaaaacaaaaaaccatccttgcgaatcagagacgccttttgacgcggtaccactctgtttgcaacgatggatttcgtttacctctttaaatttccgaatttcggaagctgattgttgaattgtgaatctggggagcacctgatgatgatcgtcgtttttcacagcagccaaaacgtttctgaaagctcacatcaaaaagcatatcccaaacagtccatattataagcgagctgaccttaaaaatcaacgaccattattttcccgctcccgccgatgctgacgctgacgctggcgttttgccttacgcatttcatgacgcttggcgagcttgcgtttttcctgctcatcttctttgatcgcacgctggatccgtttcttgtagccaggcttgaccttctttttggtctttttgacaaagccacgcagcgtcgtatccagactttccttgcgacgatgatagtttttccgtcgattacggtcataagtcgttacgatctgcccattcttaaacgtctttggggtaaatttaatgccgcgctcttccaatttggcaatcatctcgtcttctgctggagcatacagcgtaattgccgtccccttcatattggcacgccccgtccgaccaacgcggtgaacaaagtattccagatcacttggaatatcgtcattgattaccaatgatacgccatcaatatcgattccccgcgcagccagatcagtcgcaacgacatattgatagtcaaggttgtgaatctggcgcatgatccgtttccgtgctcttggctcaaggccgccatgaatcaaggcaacctttaatccttgctgctgcaggtagtcggtaatctcttcagcgcgctgacgagtattggcaaaaatcaaggccagatatggatcgcccagcgtcaaaagctgatagatcatctcatttttatcgcggcctttagtcgacatcagccagttatcgacattgggattgattaccgtttcagtaggaatctcttcaacgacgggattttccatatatttcttcaaaaatggccgcagcccttgaggaatcgttgctgaaaagaccatcatctgcaagtcttccggaaaatggctggcaatgccgtcaacctgttccaaaaagcccatatcaagcgtcatatcagcttcatcaacgacaaagcggtgagcagtatgaatatccaaagcctgcgagttgatcagatccagaatgcgccccggcgtaccgattaccagctgaggctgtttgcgttgcagctgatcaatctgatgctgcttgtcggtacctccaacgtaattgtgaatcgtaaacttttgcggtgcaaaccgattcagctgcttggctgcgttatagatctggtaagcaagttcacgactgggcgtggtaattacaacctgcacgttttgattttgagcgtccagctgttcaaaaatcggcagcaaaaaagcatgcgtcttaccgctcccggtctgggactgaccaaccacgctcttattggcaagcacgattggaatcactttttcttgaaccggtgtcggcttaacgaaatgaagatcttttaaggcctccattaaaaaaggttgaaaatgaaaatcagcaaatgtttcagtcattgaggttggatttcctttcttggttaggcattggcagccaactcgtccagctgactgaccacttctttgatttcttgttcatcacgagccttggcaccactggctaatggatgaccgccgccttgatgctttttggccagctcattgataaaaggacctttagagcgcagacgaatccgataatggccatcctcttgttcaacaaagattgcccatgccttgactccttgaatcttgcccagcaaaggcacgacagccgaagtcccagcttcagtcaagccatagcgcttcaggattgcatcggtcaagaccacataagctgctccgctttccaatagagtcatgttttcatagacgtatgccgataagcgagccatgggcagcgtaatcgtatcctcacgctgacagattgttgccgcatccgcaccggcagccatcagctcacccgcaatccgcatcgtgttaggcgtagttgccggatacaaaaaacgacccgtatcgccaacgattccagcatacagagcatgagcagccttttgcggcagcttcagttcgtttgtgaaacgttcataaaactcataaatcatttccgagcagctggaagcatcgtctctaacccacatcaaatcaccataaggctcgtcattaggatgatggtcgatcttgatcagctcatcgccattgttgaaccgccgatcatcaatgcggggagcgttggccgtatcagtcacgatcaccaaagcatcgtcatagacgtcgctttcaatttcatccatcgtaccgatccaatcaaatcctgggatgtgcttgccaacgacatagacctgcttgtagggaaacgaagcctttaaaatctcagccaagccaacttgcgagccgattgcatcgggatcaggacgctggtggcgatgaatgatgattttgttgtacttttttatctgttcaagaattgacgttaactcgtccatttaacaaaatcctccttgcatattaaataaattgctattttaaaaccattcaccagtatatcagcaattagcgttttttgcttgttccttaaacgtaaaaatcccgatgagctgtttgcccatcaggatttttagcgttgagttacggattacttgtccgcgtcagcactgtcgctttcagccggcttttgatcatcagcagcttcagccgattcactggctggtgcggcttcgcttgccggagcgtcactagcttcactggctggttcttcgctggccgcagcctgactggcaggttgggcttcagcagcttgggtcttgcttggaattacccgtgcaattgcggaaaggtcaaaagtcaagtagacgccttcacaatcaatcgttaccgtttgatcggtagtattgatttcatcaatcaccccatgcagacggctgatcattacgacctgatcacccttcttcaagtgatttaccattgattgatgctctttacgttgcttttgttgtggccgaatcataaagaaatacatgaaggcaatcatcaaaacgataatgatgatgctagacattccagatccggtactgcttgcagctaaaatttccactgccgttcatcctctcttagtaaattataattatatgctcaataaacaactttaccaaaaaaacgacacaaataccactggttcaatcaaaaagaccgtcagctgactgaatgaaacgtttttttctaaatcaggttctcaaaaatcgccgtgatgggttgatcatgcatgatcgctaaacgagcctgacttaccagctgccgcagataccaaagattatgctgactaatcaagcgcggaccaacggaattatccatatgcagcagatgtctcagataggctcttgaatattgctcacagactggacaatggcagtcttcagcgagtggttgtgggtcagcagcaaaacgcgcctttttaatcggcagcagtccttgagcggttaaagccttgccatagcgtccccaatgagtcggtaaagaggtttcaatcagatcgatgccgtttttaagcgcgctgaccagctgtgctgacgattgaatgtcaaccaccatccgtgccttatcggcaggcagcagatcgacgcttagcttcaagacgcgatcaaattccttgtcattgtcaatatcgcttaagccaccgattacatagccggaaaaatccattttagctaaagcctcgatactctgttttcttaactgggcaaacccagcgccttgcatcacgccaaacaacgccggcgaatcagcagtcagtttctgaatggccgcagctgcccaggcagaattgattgccacggctttttcaacatagtcatacggtgcataataagatggcgtctggctcagcatcagcatgatatccggctgcagttcggtttgtgattcaattaccgtttgcggcgtcatcaagcgaactgcacccgtcttgacgtcatgaaaacgcacgccgtctttagtcagatgattcttcttgaccaatggcaaatgccgaaaatcacctggcttggcaatcaccagaccatcccaagccatgaaacgatgcaggccgcccaaatcacggactgtttcggttccaggattttgcgagatgatgctctcatcgatgctaagtcccttgatctgggatcgtttgacttccgctaacgctagatcatgaaccgttaaggccggtgcaggcatgatcagacttggcgtctcaagcgtctggcgaccgattgccagctgggctgctcgggctgtttcagcatgatgctgcagtttaaaatcaaacttcaaaacggttatcctttcctttttacctagtgtacctaagttctaatcactgggcaaagcgacccctaaatgacggtaggcggctggcgttgcaacccgtcctcttggcgtgcgggcaatgaagccgatctgcagcagatatggctcatacatctcctcaatcgtccccatctcttcgccaacgttggccgcaatcgtttttaagcctactgggccgccatggtagtagtcaatcattgtatgcagaatgcggcggtcaatctcatctaagccacgctcatcaacctgtagcaacttgagtgccttgttaacggtgactgcatcaatggcatcgcagcctgcaacctgggcaaagtcacgcacccgtttcaaaagtcggttggcaatccgtggcgtacctcttgaacgcattgccaactcacgggcaccagttggttcaatcggcatggcaaaaatcttggctgatcgaaaaataatcttttccaattctgcctgactgtaatatgccatatgctcaataatgccgaaacgatctcgcaaaggcgccgataagactcctgctcgtgtcgttgcgccaatcagagtaaacggcggcagcggaaaatgaatcggatgcgcggttggtccttcaccaacgacaatatcgataaaatagtcttccattgctgagtagagcatttcctcaaccgttttcggcagccgatggatctcatcgataaacaagacatcgcctggatgaagctcatttagcattgcaaccagatcacccggcttttcaatagctggtccgctggtcgtcttgatgccaacgttcatctcatgagcaatcaccattgccagcgtggttttccctaatcccggcggtccatataacagcacgtggtccagcgcttcttcacgactgcgggcagcttgaatataaacagaaagctttcttttgatctgttcctggccaatatagtcagccagccattgcggccgcagactggtttcaccggcactttcagcttcgttttcaacctgtgccgacatcaagtgctgatcatcgtccaaaaaggttcctcctctcttagctcagcaagcgcagtccctgccgcagataatcatcagtcgacattgccgattctttgctaagcgctttttgtacttttttcaccgaccgttccggatagcccagtgccgttaaagcagccaaggcatcccttaattcagtcgtcatctctatgtcgctggctggcacgttgaaatccagcggctcattggcacgcagctgatcaatcttgtcatgcagatccaagacgatttggccagccgttttcttgccaatcccaggaaacttggtcaagtagccgacgttgtcattggcaatcgcgtcaatcaagccctggtgatccggattggccagaattgccaaggcgcttttgggaccgattcccgatacgttgatcagctgcataaaaagctgcttttcttctgcactgacaaagccatacagagtaatcgcatcctctctaacggcttgatatacataaaccttgaccttatcgctgggattgacctgccaacgaaacggattggcacaggccagccgatagcctacgccattgacgtcgattacgatgtaggttggcgctgtatcaacaattgccccagtaagatattcaaacaatttttattcctcactttttaactgttgtttttcattataccacacaaacgttcgccatctagaatgaatgggcatcaaaatcgcgcgaataggcttggtgatgatcctgaatccgtttaaaaagcttctctagatcagtatcagtaaagcgaatcgtaactgggcggccatgtggacaattaaacggattttgacactgggccagcctttccaacagcgccttagcctgctgattatccagatgatgattagccttgatcgcacgtttgcagctcatcatcattgccgttttcaaacgaaaatgcgccacgctcagttctgtatcgctcaatacccaatcaatcatttctttggccgttgcctcttcttgtccttcaacaaaccaagtgggatgctcagaaaggacaaaactgttctgtccaaacggctccagatgcaagtcaaccccgttaagaatgtcgagatgctcactgatttttaatgcctcggctgtcgaaaagcttaagaccaggggcgtcaaaaatgcctgctgatcatgaccaacctcgccgatctcatgccgaaagcgctcaaagttgattcgttcttgggcagcatgctgatcaaccagataaagaccatctgaagcctgagccagcaaaaaggtgccatgatactgcgctagatactgcagatcagggaagcgctggttttcctgatcgcctgcatcgtcaatatccagcgccatttcttcagtctttacgtctgcttttgttggctgactgatcgaaatcggctgctcaaatggtggtacctgcgactcattttgatagcgctggtcaaaagcagccattgcaggccgggtcagatcctcacgctctttgacgacaaccggtgcagcagcctgatgctcatcatcttcagctgcggtaaccgtcggcggcgtagcttgagccggtgctttttcatcagccgtctggtaggcaggtacggcttcagcaaaatgcgctgcttgagctttttgcttatcttttagctgccgtgcctgtgagccagcgtccggaatcagattctgattagccagactatgatagacagactgttccaaaagactggccaactgatcttccttgcttaggcgaacctcacgcttggctggatgcacattgacatcaaccaagaccggatccagatcgatattaataacggcaagcggaaaccgtccgaccatcagctttgaccgatagccggcaataatcgccttagtcaatgcatagctgcgcacatagcgatgattgatcgtcagcgtgatatggcttctttgggcacgcgtcagttctggtcgcgagatatagccagaaattctaaaatccggattttccccttggactggaatcatcccgcgcccaacgttaacgccatcgatagcggcaatgacctgctgcaatctgccattgcctgctgagcgaaacatttctcgcccgtcatgagtaaacgagattgcaacatcaggattagccaaagccaaacgattgacgatatcaaccagatgactcagctcggttttaggtgacttcaaatactttagccgcgccggggtattataaaacagctccgtcactaaaatatccgttccttgccgcgcaattgccggtttaagcgacttctccacgccaccgcgaatatgataggccgtcccttcttgtccttttgttgccgttgtcatgattacatcagcaactgaggcaatactaggcagcgcttccccacgaaaccccatcgtctggacgcgaaacagatcgcgcgctgattcgatcttgctggttgcgtgccgcttaaaggccattggaacgtcgcttctggcaattccgtcaccgtcatcgatcacgcgaatactgcctaacccagcttcagttaccgcgacgtcaattcgatgactgtgcgcgtccaaagcgttttctaccagttcctttacgattgatgagggacgttcaattacctcaccagccgcaatctgattggccaaaacgctgcttagttgatgaatttttcccatgaatgctcagctcacttttgttttgccagttttgtctgccattcgtagacctggttcatgatttccattggcgtcattcccattaaatttagattcttaagctgactgatcacttttgcttctggacctgatgcagacttgacagtttttggtactggagcaaacagttccagctgcccatctggttcggcggcaagtggcgttggctcatcagcatctggtaccgcaactgatgatgaagcagccggcgcagcgattttttcagctggtgcggtcaatttgatctcatcttgactttccaactgattgagaatttgagcagcccgtttcaacagatctgccggcattcccgccagtttggcaacatgaatcccataagacttatcagccggaccatcctcaattttatgcaaaaagacaagctcgccgttttcttcagttgcgccgacatgaacgttatgcaggtgcttaagcgtctgctccagatcggtcagttcatgatagtgcgtggaaaacagcgtcttagcaccgacatgatcatgaacgtactcaataattgcctgtgccagtgccatgccatcataggttgccgtgcctcgtccgatctcgtcaaacaaaatcagactgttagccgtagcatgctgcagtgcattgttagcttccatcatttcgaccataaacgtactttcaccagcaatcaagtcatcagcagcgccaattcgcgtaaaaatctgatcaaaaatcggcaggttcgcctgatcagctggtacaaagcagcccatctgcgccataactgctgttagagccagttgccgcatataggtacttttacctgacatgttgggacctgtgatcaaaagaatcgatgtctgcggatccatcaaaacgtcatttggcacgtacttctggtagcccattaccttttcaaccactggatgccggccgtttttgatttccagacggtgcgcttggttcatctgtggccgtacaaaatgatagtcttcgctgaccactgcaaaactctgcaagacatccagctctgacaaggccttcgccagtgactgcaaccgattgattgcctgcttgacggtttcgcgcacgcctacaaacagatcgtactccaaagcagttgatttctcctgcgcgcctaaaatcaaggcttccttggcttttagttctggcgtgctgaagcgctcggcattcgtcagtgtctgcttgcgttcgtaacgttcagtcggcagcttgcttaaattggccttagtaacttcaatatagtagccaaaaacatgattatagccaatcttaaggttgctgatgccggttgcttcgcgttctttggcctgcagctgtgcaatccactgcttgccattattcatcgcgtcacggtactgatcaagctggtcgttgtaccctgtcttgatcacgccgccgtcagtaaccgagattggcggttcttcagcaatcgagcgttcaatcaagtcggcaatatcagacaagggatccagtttggctgccagatcatcaaaaaccggcgcgtcaagcgtttctaaaatatacttgatttttggcacctgcagaagcgatgtctttaactgaatcaagtcgcggccatttacgctgccatatgcaacccggccagccaggcgctccagatcgtatacttgggtcagttcctgctgcagattgcttctttcaaaatagttgtccaacagtacctgaaccttatcctgccgctgctcaatctgttcagcatcaatcaaagggcgatccagccagcgttttagcagccgactgcccattgccgttttcgtttcatccaagagccataccaacgttccctggcgcttgccgctgcgcatattggtcgttaattccagattggtcttggaataatgatcgattttcatataggagctcggctgataagagatcgccttttgcagatggtcaagcgagcgtttctgcgttgtcagcagatatgagacaagctgcgcaaccacctgtttttcgccaggtcgttcgaggtcttgcgtcaggtagctgacttcggcattttttaaaatttcagactgtttggatagtaaaatgttgcgtttggtcagctgctgttctatttcagaagacagcgagtcatcagcgacgatttctttggtctgcaggttgatcagctcgtttaaagccgcgttttttcctttcagcgtggtagtctttaattcaccggttgccagatctgcataggccagctcaaacgttgagccctgctgattcaaagcagctaaatagttgttattgcgagccgcatcaccgctttgatccatctgcgttcctggggtaatcaagcgcgtaacggcacgcttaaccattcccttggcttttttaggatcttccatctgttcgcagatagcaaccttgtatcccttatcgatcagaatgtcaacatagccatcaacagccttatgcggaacgccgcacattggaattgggttggcagcactgtgattgcgtgtcgtcagcgtcaattcgaggatctgggcacccttgacggcatcatcattaaacagctcataaaaatcacccaatcgatagaacaaaaaagcatctggatattgatctttaacttgttgatattgtgccatcattggcgtaagctttttagccaaaaattttcacctgctccatttatattaatttctttattttacatgaatttgaatcaaaaacgcaaaacagggactgaagaaccgcttctccaatccctatttttactatttagcataatcgacggcacgtacttcacgaataaccgtaaccttgatatggccaggatattccagctgtccttcgatctcccgcttaatatcatgtgccaaagccgtggcctgcaagtccgtaatcttgtctggcttgacaataacgcgaacctcccgcccggcttgaatagcatagctgtgatcaacgcccggattgcggttggcaatctcttctaattttttgagtcgttgaatgtattgctcaagcgactcgcttctagcacctggacgcgcacctgaaactgcatcagccgcctgaaccaatacggcaatgactgattcggccggtacgtcgccgtggtgagaggcaatcgtattaatcacaactggattttctttgtacttgcgagtcagctcgacccccaattcgacatgtgagccatcaacctcatgatcgacggccttgccgatatcatgtaataaaccagcgcgtttcgctagggtaacgtcttcaccaagctcggcagccataatgcctgccagcttggcaacctcaattgaatggtccaaaacattttggccatagctggtccgatatttcatccgaccaatcgttttgatcagatcaggatgcatcgcatgcagtcccagatcaaatacggtctgttcgccagtctcacgcagctgagcatccatatctcggcgagctttttcaactgcttcttcgatcttggcaggatgaattcgaccatcttggattaagcgttccaaagccattttagcaatttcacgccgcaccggatcaaaaccactcaaaacgaccgcttgtggcgtgtcgtcgataatcagatcaatcccggttaaagtttccaaagttcgaatgttacgtccttcacgcccaataattcgacctttcatatcgtcattaggcagggcgacaacggaaacggtcgcttctgaaaccgtgtcagcagcactgcgttgaattgcttcaacaatcagctgcttagcctttctgtcagctgccagttcagcagtctgctcactttcgcggatcataacctcgcgttccgtcttcaactcattctggagctgttttaacaacagttctttggcatcttcatgcgacatctgagctactttttccagttcagcctgacgctgttcaatcaattgcgttacttgttgttgacttttttgaatctgctcgttcctttgatccagtttatgttcgcgggaactgactgcattttctcttttttcaagggcattatccttgcgatcaagggtggtttcgcgctgcagcatccggtcttcttgacgctgaacctcatcgcgacgctttttaagctcttgctccacactttcccgatatctgtgactttcttctttggcctctaaaatagcctcttttttggccgtcgcagcatcttttttcgcagcagcgataattccctcggcgctattgtgcgcctgtgcaatttgtttctcataagagacttttcgaattacatagccgacaataataccgacaaccatagcgagcgcggcgataaacaagccgaaagcactcatcgtttcacctccgcatcaactattttatgttgttggttgaattaacaattaattaatagtgaacaaatgaaaatctgcacacaaagtaattttaatcgtgcttatgaatagtgtcaataattcaagttaaacaaatcttaatgtagcttctgtgacattaagataactaaataaaaactcaaatccagctgcggccaaatttgagttttattgcttacttatcgtcagtttccgttgccacgtcaagactttcctgctgtggttttttgtttttggcagtctcattgacgccatcagctgctgttgtcaatgaagcatccggctccataccataggcaactcgaactttgttagtcagctcggccattgcttcaggatgttcatccagccacttcttggcattttcacgtccctgaccaattcgttcgttaccatatgaataccaggcaccactctttttaaccaagtctttttcaacagccatatccaggacttcaccagtcttagaaatcccttgaccatacatgatatcgacttctgcttttctgaatggcggtgcaaccttgttcttaacgactttgattttggcacggttaccaataacctcagtcccgtctttcaactgttcaccacgacggatttccattcgaatcgtggaatagaatttcagtgctcggccacctggcgtcgtttccggattaccaaacataaccccgaccttttcccgaatctggttgataaaaatggcaatcgtcttagttttattgatttcaccagaaagcttgcgcagtgcctgcgacatcagacgtgcctgcagaccaacgtgagtatcacccatctcaccctcaatttcagcacgcggaaccaatgccgctactgagtcaacgatcacgatatcaaccgcgccgctggcaatcaaggcatcagcaatttccaagccttcttcaccggtatctggctgagagagcaacaggtccttgacattaacccctaatgcctgtgcgtattgtgggtctaatgcattttcagcatcaatataggctgccgtcccgccacgcttctgaacttcagcaacagcatgcagggccaccgttgttttaccggaactttctggtccatacatttcaataattcggccacgcggataaccgcctacccccagtgcttcatcaattgccagcgagccactggaaaccgtcgcaatcttggtatcagctgcgtcacccattcgcatgatggagcctttgccgaagtttttttcgattttacgcagtgcattttccagcgctgcctgtcgttgatcagccaaaatgttttcctccttatttccgaagttgtctgtaactatcttatcagtaatcatgggtaaaagacaagcaaaaagtgaacgttagttcgttttattttgcaaagcccaataggtaaacaacagtcccatctgaacgctgcgttggcgaatccattggcgcgttgccattttttgcgagagatgcagctggctggtctgagttggctgccccttgattgcaatcccgatccaaaccgttccagcaggctgaccttctaaatcatctgggccggcgaccccagtaaatgagacgccaacatcggcattcagtttcttttgacatccctcggccattgctttggcagtttgagcactgacgacgccatattggtcgattacggctttaggaacgcccaacagctgttcttttgtctgcgcggcatacgttacaaacccaccattaaagactttcgatgcgcctggaacgctgcagatcgtactttgaaacataccgcccgtcagactttccgcaccagtaatcgtccattgatgctctcgcagcagcttaacgacttgttcagccaaggtgacgtgttcgccaattccaaaacaatatcggccaacacgcttgaaaatggcttgttcagcagcagccagctttttttctgcttgagcctgcattgcgtcatgaatggttagacgaacttgaatctcaccaggctgaacgtatgaggttgccaagacgtcatcaagtttggcttcatctaatacctgctcaatctcatccatcagctgcgattctgggagtcctaaaaaatgcagattatgactgaaaatggctttatcattgccaaactgctgttttaaaagcggcaagaggctctgggttaccatcggcttgaattcacgcggtggcccgggcaaaacgacataggtgtgcccttgatggttcaagtaggcaccatcagccattccggtaggattagccaagatctgaccgccttttagataataggccattttaatgttttctggcgtcattttggtttttctgatcacaaaatcggcttgaatcttttgccactgctcatcatccaaagccaattcaacgccaattgccgcagccgtgcttgccatggtctgatcatccagcgttggtcccaagccgccacagacaaagatcagctgagcacgtgtctgtgcctgactgatggctgcctgaatccgcgttggatcatcatcagtcgttgtctgccagtgagcatcaatatccagccgccgcagctgatcagctaagaaacgggcattggtattgacaatctgtcctaaaacgatttcagttccaattgagataatttctgcttccataagcatccccctcaacttaatatatgccgattatcggcttatgcattaaaaaaagcaaaaaaagcaagttctaaagcgcagtggctctaagaacttactttaatttagccaattttatttaaatccatccgcaaaaacgccacgacccttaacaaagtagtcgattcctgagtagaccgtaaagaacaggcaaatgtacagcataatctgaccaaatggaatattccagattgcaaaaatcacattgtgcaaaagcaagaaaataatggcgataaattgagtcgtcgtcttaatcttgcccggcatcttggcagccagcaccgttccattttgttctaccagcaatagacgcaggcccgttaccgaaagctcacgccaaataataatagcagtcacccaggaaggtacgaccccttgacccgtcaagacgataaaagccgtcattaccaacagcttatcagccaatggatcggcaaacttaccgaaattggttactaaatggtcacgacgcgcaattcgaccatccagattatcagtaatcgtggccgcaataaacaggatcgccgcaatcagttcggcaactggaatcgtagcaccccaaaacgtaacgctgccccaatcaaatggcactaccattaagatcaggaaaaatggaataatgatcagcctaacgatggttaatttatttggtaaattcaacgaaacttccccctatttcactaaattaacgcgtactggatacgctcgtctgcgttgatgaggttgacgcaaccccagacgtcgtacctgacccagcagttgaagacgtgctttgcgaagtactggtcgtcacggcagatgaagaagttgaagaagctgaagacgattgcgtagtattgccaagcttaatcgtaaccgtccgcgtgtttggataagtgttgttctgcgtcagatcaaccgtggtgttgccaagcttgactgtagtagcgctggcattgccaagcgtcaagacgatcgtttgggcgttcttggcaatattgattttttccgtttggttggcgctcatcgtcttgcttaaacgctgtgagttatcaaccgttactgcattccaggcttgtccagaagtcttgatcgtcaaggtcgtgtccttggttaaggcatcaccggtaaacgtaaccgcactgctggtccgcgttgaagccgtcagtttgatgctgtcagacgtcttctttgagctggacgatgacttctttttgcttgagctggaagacttcttgcttgattcacctgaaaccttgactgagctgttgtcaatcttggtcgaagaatcacgatgacctctaacgattgccgtcagccaaattgccgccagaacaataacgacgatgacaatcgcaatcaccgttggcagatactttctggcatcgttaaccttggtaagcttgcgtttggaagttgcccgtgtctcaacggcttgagcaatatgttccgaatattcatcagtcttggctttaggcagatcgtcatcgtattcctttaacagatcctcgccgtccagaccaaccgtatcagcatactgtttgacaaatgcccgaacataaaaatcgccaggcagctcatcaaacttttcgtcttcgatggcaatcaaatagcgtttttgaatcttggtcgcctgctgcaggtcatctaaggtatatcccttggctacccgagcatcatgaagctttttaccaacttctggtcgtttttcttcgttttcactcatacctaatcctcgttcttttaaattttaaattagtccataacctaaaatagtatagcatactatcgcgacggcaaattttaagaaacgcttatttcgttggcggtacgatttgatagaccgagagccgctctggtttgacgaattgatcaatggcaattgccagctcatcataatcaatactgcgcaaaatctcaatttcatccagcagcgttgcatgatcaaaatagctgccaccgtacagcattgcaatgttttccggtgagtccagctgattgatcaagcggcccagcatcgcgtgctttacgtcttcaaactgatttttcactgttgccagctgttcaggcgcctcttttagaatctgaatcatggcatcggcaaactgctccatttgatcagtatccgtgctgaaggttgccaaatgaaagccgcgctgaatctcaaaattataattaaaagaatcgtctataacaccagtatcatacaaacgtaaaaagttggctgacgtctcatcaaacagcattgccagcaaaagattgatccgccatttataaagcagccgttccttaccgttttcaaaactttgaatgccgcgcagtccgaccattaccttaggccgctcaactgccatcgtcaatgtacgaaacggaatgacgtcgttggcggtcggatcgctgattaccgcggttcgcttaggcagcttaggcgcatcaaaatgcttgactgcctgattttgctcaacccacgctagaacctgctcaacatcaagttgtccagcaacaaacagattcatattggctggttgataaaaggtacgataggcatcgtaaagaattggtgccgtaatcttttgaatcgattcctgggtgccggcaatgtcaatatgcatcgggtcattaggatacaggttgcccagcatcccaagatataaacgccaactgggatcatcattatacatggtgatttcttgaccaatgattcccttttccttagcgacggtttgttcagtaaagtatggatcctgaacaaaatccagcagtacatctaggttttcgtggaggtgagaagtcgttgaaaacagatagcgcgtctgcgtaaagctggtaaaagcattggcatcggctcccagcttgccaaataggtcaaacgcgtcatgatcggccttttcaaacattttatgctctaaaaagtgcgccacgccatccggaaccgtcaacagctcatttttttgatcaggcacgaatgtattatcaattgagccaaattcagttgacaaaacagcataggtcttatgaaagccttccattggcagcatcgttaccaaaagaccattatccagctgcttttggtacacgttttgattgaattccgaatatttgaattgctgcattattcctcaccatccaaaaaatagactgcctgcagctgaagctttttagccaaattggcaacctgctctttagtcacctgctgcagtgattcaataacgttttctgctggcagccgattactcatacagtcaaccagccaatgctcaacaatgccgccaggagcatccagcccagtctgatactggttgatcaaggcatccttgacttcctgcatgactgttgcgctaaaatcaccctgctgaactgccttgacttgagcttcgattaattgtcgcgcctggtgatagtttttggcatcgatccccgtctgaattgccagatgactgctgaacaaacgcagctgactggatgcatagtaagctaggccggctttttctcgcacgttggcaaataacttggaatatggcgtgccgcctaagattccattcatgaccaaagcagcatagtagttttcatcacgatagaaaaccggaaagtgataagccaggttcagtttggcctgattaacgtcttggcgctcactcagctcacgaacgcgatgatgaaacggctgacgataatagatgtcgttaggcagtggcgactgacgcggtgataacggccactgtctgaaaagatcaagtacctcctgcggatccacattgccatagacaaaaatgtcaatctggtcatgagccagcatatcataataggtctcaaccaaagatgccggcgttagcttgtccagatcctccagccgaccatagctgggaatccgcatcaaagagctttggtcataataaagacggtccaattgccaggcagcgtagtactgtttattttctttaatggaagccagctcattggcaacgttttgccgctgggtcttaaaggttgctgcatcaaaagcaccatccgttattaaaggatgaaagatcatctgatacaagatatccaccagactggcaaaaatacctggctgagcaaagcgatcgtcaactgcctcagctcgtacccgcagcgtatgtgcatagccaatgcgactgacgctggcactggcatcggcgccgtatagatgattcaaggccttggcaaatgctgtctgcgttggatatgctgccgtactggtttccaaaagattggccaacagattgcgcgctgccgaattatctgccgtctgtggcgttgcaaagttgatcagaattcgattaacgtgaaaccgcgacgttggctcaacatgcagtctaacgcccggctgcagattaaaatccaccatattaccctcatttccaaaattgattaatgtttttgactgtcataattcattcttactgatagatacaatattccatattacttgattcgcccataaattacaaacgagggcccgttaagtcgcgccctcgttggttaattttatttttttactggtcccagataattgctgctgacgccaaaccacttcttattgatttgccgcagctcgccgtttttctggagtctagccaaaccttcgttaaccttcttttgcaaggtcttgtcacccttgcgcatcccaacggcaaaatagtcttgcggcatctgcggatctgagtagactcgataggccgagctgtctttttggtgcttaatgtagtagtccgcatagacctcatccattaaaatgccttgaatccgccccgcattcaaatcgataaatgcatcagggaaggtatcataaagcacggccttgtgattcttgatcttatcttttaacagtttaggatactcgtctaaagccattgctcccgttgagccattttggacgcctagactcttccccgccatatcgttgaaattattgatgtgatcttttttcttggtaaccagcacttgtttgttaagcaggtaaacacgactgaaagcaacttttttagctcgttgcgaagttactgaatatccgttccataacaaatcaatagtaccattttttaattcggtttctttcattgaccaatcgatcgtttgaaaatcaaccttaatgccatattgtttaaagactgctttagccagatcaatatcatagccaaccaacttgccatttttttcccgaaagcccattggcacgaaactgtcatccagaccaatcacaaccttgccccgccgctgaatctgtttccaggtgtcttgcgtatcagcacgctgggtaacgttttgacagccactcaacagcataaccggcaaaatcaacagcagcagccaatatttgaacttcttcaattttccggcccccattactattgctgatccaaagctttaacctgcagaatatcgtcagcgactttttgagcaaactccatatcatgcgtaaccaccagctgcgtcataccgtctttttttaagcccaaaatcagcttggcaacctcatcacgcagattaggatcaagagcagaggttggctcatcgtagcaaaggatcttaggcttcatcgccagtgcccgcgcaattgccacacgctgtttttgaccaccagaaagctgatatggatacaaatcgcctttaccatccaaacccagttcctttaagagattttcggcatcctgctgggcggcggcttttgcttttttcaagaccagcgttggtgccagcgtaacgttttcaagaaccgtcagattagggaaaaggttaaagtcttggaaaacaactccgatcacactgtcagagcgatccgttccctgtggatcaaaaggacgaccatcaatcaaaaacttaccgctgtcggctgcctctaaaccagtaatacagcgcaaaagcgttgttttacctgcaccggatggaccaacgatgcacaaaatctcaccatctttaaccgttaagtcaacgccgtctaaaatctgacgcccaccaaagctctttttaagttcttgcacttccagcatcttcatggcctccttttacttaaagtacgaatagcgcttttcaaccttgttcaggataaacgtgcagatcccgattaagattaggtagatcaagccaaccaaaagcaatggtaccaaagttacgtcccgtgccgtagcaacattgccggcccgcaacagatcgcccagaccaattacgtataccaaagatgagtccttgaccagattgatgacctcgttgccgatcgaaggaattacgatcttaacgacctgtggaatcacgatcttgcgcagcgtctgaccatagcttaagcgcagaacccgcgctgcctcatattggccttgatcaattgactgaaagccgccccgaaagatttcggcaaaataggcaccatagttgagaataaatgcaaacagcgcggcatcgtaacgctgaaaaacaatcccaataattggcaagccataaaaaacaaaaattaattgcagcagcagcggcgtaccccgcatcagccagacataaagctcaagcagccattgcagtggccgaaacttggaagtcaatcctaaactaactaagatccccaaaggcagtgaaccaagcagcgtccagaaaaacagctttaatgtcatgccagcgccttgaaacagcgatggcagaatttccataacatagtgcattgacatgataaaacctccctcaaatgcttcgataacaaaaaacgtcctcaacagtcataacaactgtcgaggacgccgcagcgtgatcccacctcggatttgcaacggcttcacagccattgcctcattaagttcaaattttccagaaaagcaaaaacgcccccgagcacatggctcagagggcgttgccgcggttccacctcatcattgcagtcagctcacgctaaactacctcagcgagttcaaatttaaactctgtgctgtaacgggcttccccggagcgacttactaaattcgatcgcccaactcgcagatgtgattcactgttgccttctggtcgcttcccatcaaccgcgactcgctaagcagacggctaaacagctactagtctgttctttgtttttgttatcgttttttaataattgtcagtatcttactatcatccaacagccttgtcaagacctcaccgtaaatttagcggcgttcgatatcagcagcccaagtaatcagcttttgcaatggaaaatacaaaaacagcagatataccagattcaaaagcaacgttggcaacagcgtatccaacaaaaaaccgcccaggccaaccttggcaattcccactgcagcataggcccaatagttaaaaagctcaaataccgtcagatcgatcaaaaagaccaggacaatcatcggaaacgatgacgtgatatatttagccagcaatttcgtcagaccaacaaccattggataaaggaacatgaacagtcccaggatccctgaataatagagatcacaaaaaatccccgcgacgaccgaaaatccaatcaacggaatctgaatgtcgccttcaaaaaaatacgagcagaccagccagacaatgaccaattgactgaccattgcatagggataatgaaagaaaaagcctgcaaatatcttgcttaaagaaccatctaaaaagagggcagcgaacagacccaaaggaaacacatatctcaaccgggataatctatacatgtcacaccgcctctaatcgtttaattccgctaccgtaacgatattgatctcgttaaagttcgtagccggtttgatgtagactttcttagccagtccataatcatccttgccgatacgtgagactttgccgacatagagtccttttggcgtaataccgcccattccgttggttacgaccttagcgccttttttaatcttagccgttgaggttacctgccccataatcagctcattggttctggcattatagcccgtaatgatcccgttgacgctcttaccatcagtgccattaatcacaattgaaaaacgattggatgactcgctggtatcactgagcagttcaactttactgttggtcttgttaacttccgccactcggccaatcaagccgccgccagaaagtaccggcatgttctttttaataccgctggtctgccccttgttgatcactaattgctgctgccatgaagaaggcgtcctggacattacagctgcactaacggttgaatagtcggtcagcgagttcttgagcttcaattctgcttttagctgcttgttttccttagccagcgtttggtcacgaaccttaacctgggccagctcagatactttctgcttcagctcgcgattttccgtgtaggcattcatcaatccggaaactgaatcagcgacgccctgtacggcattgaccggatatgccacaatgccatcggcaaagccggcgatgtcattgccaaactgctgaatcagcggcggggtcgaacgacggttgcgcatcgcaatcgagccgcccattaagccaaagcagactactagaattaccactgtaattaccaagcggcgattcgaaaaaaacttctgcatttttatcctccaatgcacccagatacatttaacgggactgggcaaaacaaatcgttttgcgaccagccccgccctgttaactgtgtatcagttattctctttactcgattgcgtgactacttgctttttttcatcacatcaatgctcttcagtgactcaccagtcccgatagcaacacagtccaatggatcattggcgataaatacaggcaccttggtagcatcggcaataacttctggcaagtgcttaagcaaggcaccgccaccagtcagcacgatcccatggtcaattacgtcagccgcaatttccggtgaggtttcttccaacgttcccttgatggcttcgataatcgcttcgacaacatcttgcaacgcgttggaaacatcaactgccgaaacttctttagtctgtggcagaccagttaccaaatcacgaccacggacttcggtagttcccatttccttagctgcctcaacagaagctgagccgatatcccacttgagcttttcagccgtacgttcaccaatcagcagattcttgttttgacgaacgaactgtgcgatcgcatcattcatcttgtcaccggccatgcgaatcgaacgacttgaaacgatgccaccaagtgaaatcgtagcaacatccgtcgtaccgccaccaatgtcaacaaccatacttccagttggatccataaccggcagaccagcaccaattgcagctgcaaaaggttcttcgatcacataggcatcacgtgcgccagccacccgcgttgcatcaattacggcacgtttttcaacttccgtaacgccactaggtacgcagaccattacgtatggtttgccgccatttttgccgagtgccttttccatatagtgcttcatcatagcaaccgtcgtatcataatcggcaatcacgccgtctttcattgggcgaatcgccacaatgcttgcaggcgtgcgtccaatcatatcacgtgcttcttcaccaaccgcgatgacctcgccgctctttttgttgcgggcaactacggatggttcacgcaaaacgatgcctttgccttcaatgtaaacaatagtattggcagtaccaagatcaatgccaatattttttgctccaattcctagcaatctgtttcttcccttcgtatacaaaagtagtcgttcattttcataatacaatagcgttgatattataccatagccgaacgttaaattaacagacattactatacaccaaacgccagagaaaaacagcattgctattcagcattcaggtttccttaaccgaattttaaaattcaattcgcaatttgatcattaaatgccgcatgagcctcttgactttcacgccagctgtaatagtcctggctgccaatcacaagacagtccaacagatgcagtcccagcagctgacagccccgttccagccgtcgcataaagctcagatcctgtctggatggctcgggatcgcctgaaggatgattgtgaaccatgatcaggccaaatgaattccagtgcagcacgtagcgaaaaatttgatccggataaagcatacattccgcttgaccgcctttaaacagacagcgtcgtgctatgatctcgttatgcacatccgtacaaagcacttcgactgactcttgcgtctgtccagccatctcatccattaaaaactggccaacctcattactggaataggcgtgacctaggatatcatgcggacaggttaaaatcagatttcccagctcaattgctgccaaaaccggtttaagacgtttgcgatcatatcccaaaaaagcatcctgttcttccatcgtcatattgcgaaaaacagctggcgtgggaaaaagttctaaaaaatgattggcaaggtctccttcttgatcaaaaaccatgttaactaatgccacatagcgctgctggcaagttttttcagtcatttgattacctcctctgccattactatatgcaagacagagcagattttatttttaatcagcaaaaaaacgccgaacctctgagataaagtataacgagccggtaatcaagattgcatcatcggctgaaacttcccttgataatctcagcaatccctcttgccagctggatgccgtttcaattggccaatgcgtcttgatatctgcagctgctttttttaaatcagcgctcggccgcttgggacccggaccggcaaaattggtcagcatcaaatgaacattgggcagactggcaatctctcccaacattaactgatattgtttatcagccaaaattgctaccaaaacatagatttccatttctttaaagtcattttgcagcgttgtcgtcaaagcttgcattccgggcagattatgagcaccgtctaaaacaaccaacggtgagtcattgacgatttctaaccgccccggccagcgtgtattggccaagccgttttgaaaagcctggacgtctatcggcacacccagtcgtttcaaataaagctgcgccatggtgagagcaacggcagcattatcaacctgatattcaccggccagtcccagctggaatcgttgacgatgaagcattagcccatcatatacaatctcgtttttcagctgatgacgatttatttttttagccgtaaactgtcgcccgttttcatataatggtgcctgtttttcttgtgcatctgctatgattgtctgccgcgcagcctgaggcaaccggccaatcactaccggtacatttggcttgatgatacccgctttttgacatgcaatctcagccagcgtatcacccaaaacatgcatatgatcgtagccaaccgtaacaatcccactgacagctggcacaatcacattagttgagtcataaaggccgccaattcccacctcgagaattacaacatctggctttttttgtgcaaaccaggtaaacataattgcagtatcaatctcaaattcggtaggaccaccctcaggcaatacttgatctagataatcaacaacgggggccaccttttgggcagcctttaccagctcatcatccgaaatcggctggccattcagtgagattcgctcattaaagcggacaataaacggcgaggtaaaagtccctaccgtcaagccacttgccattaagagcgatcgcagcattgctacggttgatcccttgccattggtgccggtaacgtgcagatagctgagcttttcttgtggattgccaagttcttttaaaaatcgccgcatccgtttcagagttggaatctttttaaacttggtccggccatgaataaatgccagagcatcatcgtagttctgaatattcgtcatgataaatcctttcatttttaagcccaattatagaacaattgttcgcaaaaatcgacttaatttgcaaaaaaacatccccaaagctccattgaactctggggatgtcctgcttacctaattaagcattctgcagcgaagcaagacgtgcttgggctgcttccagcttctgcttccattcgactgccttagcccgttcttcggctacaacagcttcaggagcattgttgacaaatttttcgttgccaagcttcttttcggaacgttgaacttccttttccagcttagcaatctctttttccatccgcgcctgttcctcttttagatcaaccagttcagccattggaatgtagacttcagcaccggtaacgataccactcatggccagttttggcgcctgcgtatcggtagcaatctgcagatcagcaggatggcagaagcgcttgatgtagtctgcattggccaaaagcatgtcagcagcagcctgatcatcagtcttgatcagcaggtcgactggcttggacattggcgcattggcttcattgcgaatgttgcgcacggccgtaatcagttcgatcagacgcttcatctgttcttctgatttttcatcagcaaattcatcatgaaccactgggtagtcagcgatcatgattgacttgccttcatgcggcatatcctgccacagcgcttcagtaacgaatggcatgattggatgcatcagtttaagcgtttgatcgagcacgtagcctaaaatgttcttggtgtcggctttttctgcttctgtaccattgttgagcttttctttggtcatttcaatgtaccagtcacagaaatcattccagataaagttgtacagacagcggcaagcttcaccaaagtcaaatgactcaaattgatcggtaacctgcttgatcgttgcgttcaaacgactcaaaatccaacggtctgccagatcccacttgtctttagccggcagttttggtgcattctgcatgtcaccaagattcatgattacataacggctggcattccagatcttgttgataaagttccaggctgcatccatcttcttgtaggagaaacgaatgtcttgacctggcgtagaacccgtaaccaggaaccagcgcaaagcatccgtaccatacttttcgatgacgtccattggatcaatcccgttacccaaagacttactcatcttacggccctgctcatcacgaatcaagccgtgcagcaagacattgcggaatggtgccttgccggtaaattccagtgattggaagatcatccgggcaacccagaagaagatgatgtcgtaaccgctgaccagcgtgttggttgggaaataacgcttaaagtcagcagaatcagtgtctggccagcccatcgttgaaaatggccacaatgccgagctaaaccaggtatcaagcacatctttgtcctgctcccagttttcggcgtcttttggtgcctccatgccaacgtacatttcaccggtttgtttgttgtaccaagccggaattcggtgaccccaccataattgacgtgagataacccagtcatgcacgttttccatccactgattaaaggtgtgctcaaaacgttctgggacaaagttgacccgatcagctgtcttttggttggccaatgctttttctgccaatggcttcatcttaacgaaccactgcgttgaaagccgagattcaacctgtacgccagtccgttcagagtgaccaacagagtgtacgattggatcaatcttcagcatatagccgtcatcttccagatccttgacgattgccttgcgcgcctcgaaacgatccatcccgcagtacttgccggcattttcattcagcgaggcgtcctcgttcatcgtgttgagttcaggcaggttgtgacgcttgccaaccaagaagtcgtttggatcatgagccggcgtaatcttaaccatcccagtaccaaattcaggcgttacgtagtcatcagcaatgatttcgatctcacggttgaccagcggcaccataacatgcttgctgaccagttccttgtagcgttcatcatttgggtttacggcaacggcctcatcgccaaacatggtttcaggacgcgtcgtagcaacttcaatgtagtctttgccattaaacgtcgtgccgtcggtaaatggatatttaacgtggtagaaggcacccttgtcatctttgtggataacctccatgtcggaaagcgccgtccgtgcctgtgggtcccagttgataatgtaggttgcccggtagatcagtcccttattgtacaaatcaacgaaaaccttgcgaaccgctttgtttaggccctcgtcaagggtaaagcgttcacgatcgtagtcaactgagattcccatcttagcccactgtttgtggatgatgtcggcatattcgtctttccagtcccatacttgttgaataaacttttcgcgacccaggtcatagcgtgaaatgccttgttcgcgcagccgtgcttcaaccttagcctgcgttgcaatgccggcgtggtccatccctggcagccacaaaacgtcatagccctgcatccgcttttgccgaataatcatatcctgcagcgtggtatcccaggcatggcccaagtgtagcttgccagtaacgttaggaggtggaataacgattgaatatggcttggctttcttatcaccacttggcttaaagaacccttcatcgatccaccactggtagcgcccttcttcaatcgaagccgggttgaacttggtggacatgttcttttctgacatggcaagttcccctttcagatttacagttattggttaatttaattggcatcaaacaaaaaaagactcgccctaataaattaggacgagtctgctcgcggtaccacctaaattgaaacccatccaaagacaggcttccactcaaacatgggatatcggccatgaaccggaactgcctacttgctttcagcaattctgctcgcgagctaccttcaatctggcaaaccgaaccttttttcagcaacaaggtctctctaaacggctttaccagatctactctctcgttcaatgcttgaatagcgtaataataaaagaaatttttgacaacgtcaagtcgattcaaataatttcttaattattcagcagccgtgcccaacttttctactgcattcaaggcagccagatagtcaggctcatgcgtcatttcaggaacgatctgtcgatagacgatctggccatcagcatcaatgaggaagattgaccgtgccaagacgccttcatcagggatcaaaagcttcattgcatagccaaatgactgttcataatcagataaaagctcagcatttgggatatcattggccgcgcaccagcccttctgttcgttaattggattggtggagaccgtaatcaagcggacgtcaggatattcagccattgccttgttgaatttgcgtgactgcagcgagcagaccgacgtattgatgtctggtacgactgagaataaagttggcttgcccagcagctcacgagtcttaacccgttgattctgagcatcaaacagcttaaagtgaggaatttccgtacctacttctggcggattgccgaccagctgcatcttctcaccattgacagtaacttccacgatgaacgctcctttcagtttcacagcgttttttaattttgtgtgggaacagtataccaaatttagcaccattcgaatagccaaatccggtgtttgaaataaaaaagctgatgcattaaaaagtcttgcatcagcttaaattttacagcaattcggcgaatacgtcttgattctgattcaagaattcgtcaccagcatgaatctcagtaatcttaatgttttccaaagcccgctgcatcaatccttcaacatccagccgtgcttcataggcccgtgcccgtttcaggtttggcttggtttttggcgatggcggcgtaaagaccgtacagcagtcttcatatggcagaatcgacaattcataggtatcgatttcttcagcgatcttgatgatttcagtcttatcaaacgacagaaccggacgcagcaccggccaggtagtcacatcattaatagcgaccatgctttccatcgtctgtgaggctacctgtccaaggctttcaccgttaaagatggccaggccatggcgtttcatggccaaagccgcggccagtctaagcattaagcggcgctggacggtcatcagatagccctcgggaatcttttccttaaccgtttcttgaatttcggtaaacggtacttgaatgaacttgatgctaccacaatattttgccagtttgctggtcagttcctttgatttagctaatgcctgttcactggtatatggcggactgtagaagtgcaccatctccaaagaaaccccacgcttcatggccaggtaggcagcaaccggtgaatcgattccgcctgaaagcatcatcatgcctttaccagccgttccaactggtagaccacctgcgcccttgatcttttcactggtcagataaattccgcttttccgaatctcaaccatcagatcaatatctggatggtgaacgtcaactgttaaaagatcaggaaattcctttagcagataggctcccagctcacgattcatctcaaacgtccccattggaaagccatggtcggcatgccgagtactgatcttaaaggtggccggttcttttacctgttctctgatcatcttagccgctgcctgcttaactgcttcaaagtcgctttcaactcgtaaagaaggagagaaagtctggatgccaaacacctgctttaagcgatccatgacctgactactgtcggcaccgtttaagtcaatatgcatccggtctctttgcggatgaatcttaacctgatcaaagccatgcaacgctttggtaacattggctcccaaacggtcaataaagttcttttggttgcgccctttagtcgaaagctcgccatagcgcaccataatttcatcatattgcattttggaactagattttcctttcaaaaactaatcgataatcttcttaaagccggcatacagctcatcaaagacgcgattgaactcatcagcctcagccaaggtgttttgatcgcccaggctgatccgtacggcactggttgcaatttcatcgggaaccttcatagccgccaaagtcccggcttcaacgtgcttctttgaagagcaggcactggtcgttgaaatatagatatcgtgatcttcaaaagcgtgcacgatcgtttcaccacggacgccaacaattgcaaacgtcagaatatgaggagcaaacgaatcatcattttgcgagataacctcaacgtgttcaaaattcttgatatgatcgtaaattcgcgtcttgattgctttttcgcgttcaacggcctgcttttcgttttgttttaccaaccgtaatgccttggccatcgcaacaaaaccagccgtattttcggtcccattgcggcggccgcgctcctgaccgccaccatcaatcagtggagccagcttgcggccggctttggcatatacaaagccggttccgcgcggtgcatggaacttatgaccagaaaagaccgcaaaatcgacccgatctgaaaagacaaggtcatcgattcccttaccgattgcctgcaccgcatcaaccataaagtgaactttaggatagtcctttaagatttcaccaatttccttgattggctgaatcgtaccaatctcattgttgacaaccattgattcaaccagaatcgtatctgggcgcagtgcttttctaacgtcttctggatcaatgcgtccctgatcatcgaccggcagataggtaatctcaaaaccaaggtcagctaagcgctccatcgaattacgcaccgcagcatgctcaacgctggtcgtaataatatgtttgccatattgacgcttttcaattgccgttcctttgatgacccagttgtcgccctctgaaccaccactggtaaaaacaatctcacttggcaaaacgtcaaacaggtccgcaatctgtttacgtgcctgctcttgaagattccaagccgtctcaccaaccttatgcagactggagggattcccccaaatcttttggcagacttgattatacgtatccaaaacttccggccagatctgcgtcgtggcactattgtcaaaataaatcatactgtgcttactcctttaatgcacgcgggaaaacagattttcctcgcaagatattgccgccgatggatcacatccgcgacgaaggttcggctcctaaaacaacgctacattataacagatcccgtttcttttaaccatgattgacacttgaaaataaaaaaacgcgtcattggcgacacgtttttggttttaagaattgcgcttaagctcggtatagtaacgctgctccattcgcttataggaacccggctcgactttttcaacggccttttccaagatttccagactacctggataattatagcgattgaattcattttgtgctttggcaatcgcatcattaatctcttcatggtcaatactgagccggttggcatattgaatcagccgttcggtcagttcggcactgtctcttaagtcatcagttttttcctgcagcgtttccagatcgtcttgcacgattaaaagctgcttggtgatgtcttccatatcaatcttaacctggctgattgcatcggctagtttaccaatttcatcgctgaccaggaagaaataatccatgtagtcttggggaattcctggcaggttcagtgactccacacgccgtttgattgtacgaatctcaactgagaatcgctgcagcgttttttttgctcgcgcctcatcagactgaagatcagcaacactatcattgatctgcttttgctgttcttcgattgccgtcaatgacttttcattatcggtctgacgagcaacaacctggctgtcaatagcttcttcgactgccagtgcttcttgatcttggtcatatgatgcctgcagctgccgcagctgttcgtcaaggccgcgtgcgttggccagttcgtcattgttaagcgtgtagttaagacttaaacgttccagttcatcaatcagctcacgattctgctgtttggcatgactcaaatgccgacctacatcgcgcatcaatggtgcaacttttggccgagcatcaagttcgcgctgcataacatcgtaaagctgctcaatatgctgcgtcagctgatcatttgccgttgccgcctcatccagtcgcaaggcattcaaatcagcatctgcttgttcgcaaagctgaccaagccgcttaatttcttgatcgatctggccatcagcaaagttatagtggtgtcgtttcagctgctcatagccattttttagttcctgcagttgggtgggaaattcagtcagcagcggcttatagatatctggaatcttttgcatcagtcgggccagttcctcggtatcctgctgcagctcgttaaggacgtcttgagccgcttcatagtcgcctttggccgtaagcgtggtgaacttagcaaaacgagcttccagatccgtcaggcgctggcgcagagccgtactgcttttgccatagcgatagctgttttcttccagttcattatgaaactgctggtattgcttttttagctcgccaattgctttttgatgttctgccttggcatcgtcaatttttttcaaaccttcttcaagatttgtctgttcactcagcagcttagcagtcgcatcctgcagcttacgcagatccggcttgactttcaatagattaaatccatgcagatcttgcgctatttgatcggccaagtcatcgacccgactggcagccgttaggaattcatcttgatattcatccttgagctgattaaaatcctttagcgagtcgccgctcagctctggatttgcgtttttggcaaaccgttcgtccaaatgagctgtcagtgcggcagctttttgattcagcagggcgtctaccgcattgagggtgcgcttttgatagacgtatacgccaataattaccaatgcagcaataactaaaattccgatcaacacttgaaacatctatatcccacctatattttgcacggtttatgctttgcgtttttcaccgtttaatcttaaaattccactaattaaaattatatcatatctgctcttgacaacttattatttatcggagggatttttattttgccaaactttaagcttatcaacacccagctggctgccttattggaaaatgaaaccaacttaattgctaatctggctaatgcctcagcactgttaaacgacagcattgatcaattgaactggaccggcttttatctttatgaccctaaagaaaacgaactggtgctgggaccatttcaagggcatccagcctgtatgcacattgcaatgaacaaaggcgtctgtggtcagtcagctgctcagcggcaggcattggcagttgatgacgtcactaagtttcctggttatatctcatgtgatgctgccgcccgttctgagcttgtaattcccttgattaaagatcagcaattgcttggcgtcttggatttggatgccccagttgaaaaaagatttgatgcaaaactgcaggccggcattcaatcttttgtcgatgaactgatcaaacatcttgactaggcatgtttttcgcgttaaagtactctttgtgtaaaataatgcagcagtgaggggcaagctcgtcaacagaccaatgccgcatggtgtttccagtaacccagctgcaagggtgaacgatccaattggcctgcacgaatgtcaagctcacaatcggattattttactccaaataattttattggaggaattctaatatgtctcgttacactggccctagctggcgtgtatctcgccgtctcggcatgtctctgtccggtaccggtaaggaactggctcgtcgcaactacgcacctggtgatcacggtaatgaccgtcgtggccgcctgtctgaatacggtatgcaactgcgcgaaaagcaaaagctgcgttacatgtacggtatgactgaacgtcaattccgtaacctgttcaagcgtgccggtaagatcaaggaaggtactcacggtaccaacttcatgatcctgttggaacgtcgtctggacaacatggtttaccgtctgggtctggctactactcgtcgtcaagctcgtcaactggttaaccacggtcacatcaccgtagatggcaagcgcgttgacattccttccttcgaagttaaggttggtcaagtcatctccgttcgcgacaagtccaagaacctggacgttatcaagaacgctgttgaagccgttgttgcacgtccttcatacgttgaattcgatgctgacaagctcgaaggtaagctggttcgtctgccagaacgtgaagacatgaacgccgacatcgacgaagcgctgattgtcgaattctacaacaagctgtaatatctaattacggtttatttcttaaaaagctctgtgatttaaaatcacggagcttttttatataccaattcaaatcaaaaaggccatgagcgactgggatagtggatcgctcatggcctttggggatttttggagtattttgagatttagagattaagatttatgtgtgatacgtagtttttagaaaacagcagctagccattagcagccatttgagttgatttttcattttcaagcccggctgtctgcttaaaggctgcaacaacgcgttctggcgtgaagccaaacttttcaataacctgttcacctggagcgctggtaccgaattcatcaacgcccattaccatgccattcaagccgacaaaacggtgccagcacattgaactgcccatttcgattgccaagcgcttatccaggcgtggcggcagcaccatttcttgatactgctttgactgccgtaagaaacgttcctgacatggcatcgaaacaacctgcacgtcaatgccttctttggctaatcgttctctagcctgcaatgccaaagagacctcagagccgctggcaatcaggattccagccgggtgattggtttgagccggtgccaggatataagctcctcgttctaccggtgcatgtttagccgctgccaaaaccggcagtccctgacgcgaggtaacgattacgctgggacgatcagtagttttgccaatgacctgccaggaagcaatcgtttcattggcatcagctggacgatagacatcgacacccggcattgagcgcagcactgccaattgctcaactggttcatgcgttggaccatcttcaccaacagccaaagaatcatgagaaaagacaaaggcagtcgggatcttcattaaagcagccagacgaacggcacccttaagatagtcgctaaagaccaagaacgtgctgccaaaggctcgggtaccaccatgcagcgtaattccattcaaggctgctgccatgccaaattcacgtacgccaaaccgcagattgcggcctaatggattatccgcagcaaaattgtcatcttttttcagcagcgttttgttagagctggccaggtccgcagccccgccccaaaacatcggattctgccgggcgatttcctgcagtgcgtcatcacataccagccgcgtggcaattttttcacctggttgatagtttaaggcatcatcactcaacttaaactcatcattcatcaattgagcagccagttgcggatactgctgctgataggaagcccatatttccaaccagcgctggtattgcttttctttggcagccaccagctcttggaagtgatcataaacagcctgcggtacggtgaaagatggctcatgccagtcaaatttttctttgaggatagccaggccatcctgaccaaccggcgtaccatgaactttgttggttccctgcttaggcgcaccgtagccaattaccgtcttaacctcaatcaaggttggcttatcggaacgtttagcccgccacaaagctgcatcgatctgagccagatcattgccatcctcaacgcgttcataattccatgaagccgccttgactcgctgttcaacattgtcatgcgtactcattgacaatggcccatccagtgaaacatcatttgagtcataaagcacgatcagtttattaagctgcagattgcctgcaatatccaaggcttcttgactgatgccttccatcaaatcaccatcacccgccaaggcgtaagtgtaatgatcaattactggcatccccggtcggttgcactgtgcagctagatgcttttctgcaatcgccataccaactgccataccaagtccttgacccaagggaccagtcgaggcatcaacgccaggcgtccatccatattcaggatggcctggtgttttggaacccatttggcgaaacgccttcaagtcatcaacagtgagatcaaaaccgtttagatgcagcagactgtagagcagcgctgagccatggcctgctgacaagacaaagcgatcgcggttgatccacttaggctgcttagggttaaaacgcatatgatattcaaacagcgtgtaagccattggcgcggcatccaaaacgatcccaggatggccgctgtgcgaggcttcaatcatttctacgcccagcattcgagcagccgtaactgatttttgatctagagttgcttgctgattactcattgaccgccgcctcctctgcaacttcatctaaaatgctgaatcccagcgtactaatatcttggtcaaaaccgcgaaccgtatccagagcaacatcttctggcgtaaactcgcgccgtgccagccatttttgcagaattgccggtggtactgtaataatatcgataccagcctgctgagcctgacgaatgttgtcgacttcacgcgtcgaggcccacagcaagtcaacgtttggatgcaaatgtgacatcgctacgctggcattgacaaaggaagttggatccgcacccgtatcagcaactcgtcccacaaatagtgaaataatcgccggcgtctgttcgtccaaagcttccaatgccaagcgcacctgttcgctggtcgttactgcggtaatgttcagcttgatgccggcatgtgccagttgacaaatcagctccgtattaggctgtccattcaagtttaaaatcggaatcttaacatagacatgtttgcctaatgaacttaagatttctgcttcctgctgcattttctgaggatcttgtgaaaaaacctcaaaagacagggaagcttccggaaactcaccgactacttgcttggcaaacgtcaagtaattagtaactcctgctcgcttcatcagtgaggggttggtcgtaaagcccgttacttcaggcagcttagccatttgacgcatgtcatcaatgacagccccgtcagcatagatggcaatcgttttttgctcagttgattgcatttctcttgctcctttgttaaatataccaatttttagttaacaattaattcatgactcgtatcatgaccgaatttaccaacgccgtcaattggattttgaaattatttttgctaatcgattagcaataccaattcaagcttgtgcactgattatcagtcaatttttgaattaattgccgtcatatcaacgataattcacatctggaccactagacgacagtaactttatattgttaagcaatcgattgcgcaaaactttatcttttttagttatatatgattttattttcatttatagtcctgagataagcatataccaattttaaagtgagcaagtcaggactgtcaaaagcctgtgaatcaaacaacaaattcacgaaaaaaattaaaaaaacagctgccaaaccgattaattcccactatctgattacagcaacaaagaaatcgctttcgtaaactgattttgagacagtttttatcattccaaattctgtcaaccggttgacatcgatagttactgggggtatctttatcgtggcaagtgaagtctatcaccaatttttaagacgtgatcttgtcaggaagaagggaattaatttggaacaagcaagctcaaaaaatgtcaccgcggtaccaaagcgcactatttcaatgccagtcagcatcgcctacttcgccctatcgatcgttatcaactcgatgggaaacgttttgacgctggttaccagttcacatattcatccacagtttttaggatccgcttattggacggcggctgaaaacaaccttggcattgccgtcctggggaataattcaatgacactgttttgggcattcatggttctgggaatgctaaccgcagccttaaacgcaattctgatgcataaatgggaatggaaacgaatttttggcaatttcatgtttatgctgccgttttcaatctttattcaatggttttccgatattttcaaccggattatgcccgatgctcattctttgccaatggtagttctgtatgttctgatcaatttcttgggcgttattttaattggagtggccatttcaatctatcagcgagtaaatctggtcctgcacccggccgatgatttattccagattctgcgttttcgttatttcaagggcaatgcaaccttatcaatgtgggcatcctatattccgccaacgattatggctctgctggctctgcctagaatggggctggcaaactttggtcttggaacgatttttgcgctgctcttccaaggcggcattactgggcttgccgatcgaattatcttccctaagctcaagcatcaagccttagatgtttagactcttcacttttattaacagcagttttgattaaaggagaaaaattatggcattcaacaaaagtttagctggctacttcgatgatctgcagcacattggcattccaaccgacgatctgcaaaaaacggttgccttttgggaaaagctcgggttcaagatgctgggcaattttgatactgacgaccaaggcaatgaggttgtctttatgcaatacgctcacctgactctagaaatctggactggtgatggtgccgttcgccaaaccggtgcaatcaaccatatctctttaaatacttctgatgccgatgccgcctttaaagcagccaaggcagccggctttaagatgaaagaagataaagttcagcacctcgacttttggcagcatggcatcaagttcttcaatattgaaggaccaaatgctgagactattgaattctgtgaaatcgtcaaggactaggatgatcttcgccattgcttaatgcagtggcgtttttttattattcaggattaatcaatgatacaataggagaaactacttacggagggttatgcatggctaacgaagaaaaaagtgcagttgatcagcggctgcaaaatgcagtctatggtacgcctaaaatcaatcccgatgagcaaagacgctatctgggaacttttcgtgagcgagtctgcctgacgatcagcgtggctcagcttggcgagcgtgactggtctgatgccctacgattggagttaaaaaaagggatcggcaagctggtctttttaaatggcaatctagatgatgagcagctgcgtccgtatatgcgagcagccgttcaagaacatgccagcttcactttaaaaacggatccggaattttcaacggctcctgaaaagctggcggtcgtagtagcggctaaaactgcagtctatcagtcgccagttgatgttgcgaaacgctatccaaatctgtcaaatccagtttctcaagtcaagtcgccagctaaacaaggcttttggcagcgactgtttcattctagataaaacaaaggaggccttgttttttgcagccattagcctatcgtatgcggccgcgcaatctaaacgaagtcgttggtcagcagcatctggttggtcctggcaagatcatcaatcgcatggttaaggccaaaatgctcagctcaatgattctgtacggtccacctggcactggcaaaacgagtatcgccagtgctatcgccggatcaaccaagtatgcctttcgcatgttaaatgccgccaccgattctaaaaaagacctgcagattgtcgccgaagaagccaaaatgagcggaaccgtgattctgctgcttgatgaaattcaccgccttgataaaaccaaacaggattttttgctgcctcatttagaaaacggtcacattatcttaatcggtgccacgactgagaatccatatctgtcgattaatccagctattcgcagtcgtactcagatttttccagtctaccccttaaccgaaaaagacatcagcctggctattgaccgcgcccttgccgaccaggagcggggcctggggaaaataccgctggagcttgccgacaatgctcgtcagcagctgattcgcgcagtcaacggcgatctgcgcagtgcgctaaacggactggagctggccgccaagtcaaccgatccagctcaagacggtaagattcatctaaccctgccgattattgaggaatgcgtccagaaaaaagcactggctgccgataaggatggcgatgcccactatgacgtcatctctgcttttcaaaaatcgattcgcggcagtgatgttgacgccgcacttcattatttggcacggctgattgccgctggtgatctgccaagcattgcccgtcgcttgaccgtaattgcctatgaggatattggtctggcaaacccgccagccgttcagcgagccatcacggcaattcaggcagctgaaaaaattggtctgcctgaagctcgcattcccttggccgataccgtaattgaactggcgctgtcgcccaagtcaaattctggtattcaagccattgatgctgctttagagcgtattgatcaaggcagcttcggcgagatccctaattggctaaaagacgcccactaccaaggtgcaaaaaaacttggccatggcgtcgactaccaatatccgcatgattttccacaagattgggttcgccagcagtatctgccagataaaatcaaaaatgatgagtattatcatccaaagccaaacggtgaatttgaaaaggccttgggaattcagtatcggcgactattgaaggcccaacgccatccaagaagttgaaaacgattgcacctatttaaaaaaaatgctaacatactaatagaggttctgtagtgtgcgtgttgtctaattcgcagtcttgccttacagtttcgttactttgggactagtgccacgacactgtaacgacatgccttctcacttggtagtcgaagctttgtcggccatggcccacctgtcttatccacaggtcaacactgaaagacaattaacggcatgaacggagccgatacatatcataataaagcgggattgaaagcattactggtttcagtcccgcttttatggtaccttggcagagaaaggagttttgatttttttgattactgttttgatgattgtttttgccgcgatcatgctgattgaaagctggtatctattaagtcaccgcaagaccggtatctttggccaggccgctactgagcgcagttttcgccactgcagcatctggggctggctgctgctgatctggggtatcgtaagtttgattgccgcattcttctctgatcatattggtttggtagcaaccgtattggtaattggctgcctggctgacatggcaatggcactggcaaccagctcgttagtgttcagaaaacactaatttcataaacatttttttgcgaaagcctttacaatgttgtaaaatataaataaacaaagaagcttaagcattaagggggtacttgatatgactcaacaataccaacacattttggttcctgtagatggatcaaaggaagctgaactggcttttaagaaagctgttgctgttgctaaacggaatggtgctgatacggaattgcgcctgttgcacgttgttgatactcgtgctttccaaaacatttccagtttcgacagctcaatggttgaacaagtaaccacgactgccaagaagacgctggatcaatacgttgactacgctaaaaaacaaggcgttgccaatgtcagctacacgattgaatacggcgcacctaagacgatcattgcccgcgaagtgccaaaggaaatgcacgctgacctgatcatgatcggtgccactggtttaaatgccgttgaacggatcttgattggctcggttactgaatttgttactcggactgcaatctgtgatgtcttagtcgttcgtaccgatttagacaaccaaccaattccagttccaaaaaagcgctaaagcataattaaaagcgttgactgaaatttcggtcaacgcttttttgtatgtatatttttaagccattgctaaggccttcattgattccttaaccagttcaggatgctgaccaaccagcgccaaactgtgagcaatctctaaatcctgtttgcccaccgcctgattggccagtgccagctgcgccttgccggcatgcagataatagcgatcaagcagaaacatcgagcgcatctgccgacagatttcaataccgcgctgcgccgcattgagtgacaactgcggctgccccagtgccagatacaagccagatatgtattcatagactacgatccactgcagctggccaccagtcagttttttttcatcaatcaagcgcattgccctttcaaccaacctcagcgctcgactttgactgccgatcttttcataggccatcgccataccaatcgtggtcatcgccagataaatattggcactagcggtcgaaaattgcgtcagaaccaattcaaagttaaagattgcttcatcaaattgatgattttgtacctgcagcatccctagcaaataatagtagcgctgcttatcaaattcattttgcagatttttaaccttgatcatctgcaaggcagtctgggcatcttcaaactgcctttctgccaacagacggccaatctgatcaaaagttgccgtcattgaaacgtcatcattttcaataatctcatttgccgaaatatccaaccgcgaacaaagtgcggtcaaaatattcattttaggaattcgattttgtttttccatcaggctaatcgttgcctgcgtacagattccttccgctaatgctgtctgtgatagtccccgtttgcgccgaatctgcttaaagatatccccacgaagcttcatctaatattccttcttaatatatgtatagtaaaaccaattaaccaatataaatatgtgtatgattattttatcataaatttatcaataattagacaattataaacagtttgccaaatataaaacctccaaaactggctggcagctctggaggttgttattaatcatcttaattgcttattttagtggtattcttttttaccgactttttcttcaccaagcgactggaaatcgtacttgatctgttcttgccgttcaaattcttccaggcccagcttaatcaggcgatcgatcaaatctgagtacttaataccagaaacttcccacatctgcggataaaggctgatgttggtgaaacctggcagcgtattcggctcactcaagtatggaacgttgttttggtcaaccaggaagtcaatccggcaaagtcccttcatgccaagtgccttgtaagctttcagtgccatatcggtaatttcctgcgttaggtcgtctggcaggattaccggcagatcaaagaccacgccactggcatcgacaaatttattttcatagtcgtagaatgggtcatcgcttggtacgcggataccgccaagcttagaagcgattggatgctcattaccaagaattgagatttcaatttcacgagggtgatcaatcccctgctcaaccaagaccttaaagtcatacttaaaggcatcatcaagagcagcctttaattcagcctcgttttcgactttatgaattccgactgaagaaccttgcttggctggcttaacgaataccagatcgccaagttcttcttggatggcatgccagtcgtactgatcgcgattttctggcgtcagcagaatgtatggcgtattacggattcccgcttgcgtaatgatcttcttggtaagatccttgtcaaacgacatggcactggcagcaattcctgaaccaatatatggcttcttcaacagacggaacagcccctggaccgtaccatcctcacctaagttaccgtgaataaccggaatgaagaaatcgatctgcttaaccgtgctcaatgcttgaattggtgcgagtggcgcatcaagatccatattggcataagcttccttgactacggcatcttctggttcgccgtcaaagatccgctgtgagtattcattgttcagcagaattccatctttggtgaacataaacaggctgacgtcatatttgttcttgtccatcgcgtcaaatacattgtgagcgctccgtttagagacatcgtgttccgaagaattgcccccgaacagcaatgctacgtgcagctttttgttcgtcatgtaaaataccacctatctaattttaaatgtacttaaaccgtttttattagaaactacagtataacactatctgtaaacgttgacaactaaatctcctgttcaatgatctcagccataaccttaggcggcagatctttgtcaaccagcagggccgtcatcaagcgctgatagttgaaaaacagatgccaatctccttcgttatcaacgtctgactgctgcttcagccaagcgcgccaatcttttaattccatcaaaaaatagtcctggtacagacgatgacgcttgatcagacagactaaatactccgcaatctcattttgctcgcccatttccagcggcgtgcgcaaccgacgatagcgttccactaaaacggtcatcataaaaatatgatcccctcttaaaagatccgtacgctctgtcatttccttaaaaatattggtcagttcaaaaaacatatgtgcccagccgcgtctgccgataaagcctctggtatctttttccaacaagactaagagtgcaatcttatcaattacctcctgcagcttttcttcagtcagaaaaaaatagccgaatcgatcagccattaaaaaagaatgcagcatgttgacggctgaagcgcgcataaaaactgcctgatttttaggctccaagacatgtgcgtataagatgtcgtcttgcaatacatagtctgtccaacgcacaatctcatcagcactgaccatctcatgtcccaataaatcattgattgcctgccttgagccttctctggccactcgatcaaccgaagccagatgataaaataaactgtttttctgtgcctggtcaagcggctctttttcaagtatctgcagctcaattgcagacatttcgttttttagatagcgtcggtcgtcagcaggcggttcatagctggttcgcttttggctgggaaccttttcgatcagttcgccaactcgctgatacagtgattgaaagatctcggcattatcaacacgctgatgcagctcaatcagttgttcttttagactggcaattgattcagtcataggcatccccctttttggtaatcatttaattttatcacaataaaaagaccttcatgatccaacatgaaggtcttccagtcttttagctagccaaagaaatcatgcatgatggtacggtaggcattaatcgtggcaaaatagctcgaccaggtcgtatactcatcaacctgatgcgcccgcgaccattcatcagcacccaacacgacaaccggcagatcagcacgatacttgacaaacacgctggcatcggtagctccattgatgatcgtcagctctggttgattggcatagctgtcgctagctgcctttaaggccagttttaccaaatcgctttgtggatcagttgcaatcggccaccaatcatttaagatattgagcgtcaattcataatccgtagtctgatttagatagtcaatcgcctgcccaagccggtgcgtaaccctttcattatcaaacgcacgcgttggtcgaagattgccgcgcagttcggcacgatcaggaatcgtattgacctgatcgcctgcttttaaaatcgtaattgaatgcttaacgctgcctaggtactgatccagcggcacgttgtcaaacaagctggcctccagttcgataaaacgagccagaccgctgacggcattgatcccgcgttcaggcatggagctgtgtgctgagcggcccttacagattacttgatagttatagcttcccgacgtggcataaacgatattgccacccgttggctcacctacgatcaaggcactcagatctttagcaacgcctttctcctccaaacgattggcgcctggggttccatattcctcgccagccgttgcaatcaaacggatcttgccatcaggctgccagccgctttccttaagctcaatcaaagcaattgcctgcgcagccaatccgcttttcatgtccgcggcgccacggccaaagagtcgatctccctgggtttcagcaccaaatggatcatgatgccagttagcacgattacccacggcgaccgtatccatatgaccagtaattcccaagacttggtcagtattgcccggcccaaactcaacgatcagattggcccgccgctcgccaaacgcatccaccttagcatccatgccatactgagcaaacagtcgtgctaagtagtcggcaacgtcaagctcattgccgtttaccgaattgatatgaatcagatcttttaaaatttttgcttgcttttccttatccattgttcaacacctcgaaaaaagaaacggccccaaaaagccgtttccataatctaatcaaattaacgattttggtggttaacggcctttgccaaaacgtcaccaaccagttgaatgataatcaccagcagcaataccagcaaggtcgccacgattgtaatgtcgttgcagaaacgatcatatccataggcaatggccgtattaccaagaccaccggcaccaaccgcaccagccatggccgtgagaccaaccagactgatcagtgaaaccgtagtcacccgcaccaattcagaacgtgcttcacgcaagtagacttcgaagatgatatcagtattagtagcgccaatcgcctgcgcagcctcgatcttaccatagttcacgctttctaacgcaacctgcacttgacgcgcataaaatgggaagaatcccaaggacaatggtaccaaagctgccgtcgtcccaatctgcgtaccaacgatcaattgcgtaaacggagcaatgaaggccaacaaaatgataaatggaatggcccggaacaatgaaacgatcttgtcagaaatactaaacagcgtcttattctccataatgccgccgggttttgcaactaccagaatcacgccgaacaacacaccgaggattccaccaaagacagctggccaaaacgtcatatacagcgtttgaccaattgaggtaccccagccactgtcgccgctccagccgagttggacgacattaggaaaatattttgcaaaaaactcagtcatgccaaatcccccgatcatcaatcttggttacttcaacgtcttgatccttaaagaactttacggctgcctctctttgatcaggcgttccctttacgatcacaaacagcatcccgattggcacgttgcctaatacctcaacgttgccatagatcatgctggcttcgacgccggttgcccggtaaagtccgataatcagtggctcagcaactgaatcgccgctgtagaccagctgatataactcttcatcatcattaagcgtccctaggttcattgagcgcagcgtatccatggccgccagtgaaccaccgacaaattgacgcgtcagttcctgctgtggccgcaagaagacttgccgcagctcgcctttttcaatgatcaccccatgctgcattaccgcaatcttgttggcaacacgcttaacggcatccatttcgtgagtaatcaagatgatcgtaagaccaagcttttcattcagatccttgagcaggtctaaaatctggttggtattgcgagggtccagcgccgaggttgcctcgtcagaaatcaaaatttccggatcattggccaatgcccgggcaatggcaacccgctgctgctcgccaccggaaagctgaactggataggcatcggccttatcctttaagccgaccagatccaagagtttcaatgacttttgttcgacctcgtcatcactgagcttgctgtgcttgagggcaaacatgacattgtcgagcaccgtcgtttcgttcagcagattgaaatgctgaaagatcattccgatgttgcgtcgcttttcctgcagttttgcgttgctgatctgctgcttgtgatcagcaaacagcacttcgccttcaaccgtgatcttgcctgcagttggcttttgcagcagattgatcgtgcgaaccagcgttgacttgccggcacccgagtagccaactaccccatagatgtcgcctttttcaacttgcagggtgacatccttaacggcttgaacagtttcgtttttgccagtctggaacgtaacgtcgatgtgttccaaatcaataatgtttgtccccatatatctcttctccttctatctgttggaaattacttcagcttaatgtcccaagctggcttttccagaccattgtattgttcgttgatgaccttcttaaccttttccgtttggtatgcctttacaacatccttgtaggcttccttgttacggtccttcttacgagcagcaatcagattgatccattgtgcagaatctttgttgactggttcagtaaagatggacttcttaattgaaagcttagcagccacagcgtagttggtgttaacgactgcggcatcgacactgtccagcgtccgtggtgcctgatcagcagcaacttctttaatcttcaggttctttgggttcttggcaattgagttgatcgttgccaaagagttcgtgttcttctttaaggtaatcagtcctgcactctgcaaaacgtacagtgcccggctttcgtttgatgcatcgtttggaacggcaatcgtagcaccgtctggcagactcttaacgctcttgtagttgttggagtagaggtgaattggcgtgatgaaggtcttgccaattgaaaccaaggatcctttgttagccttgttccatgcatccaggaaagctttgtgctggaaagcgttcagatcgatgctgccgctttgcagagccttgtttggctggttgtagtcagtaaacgtcttaagcttaatatcaacattgtatttgctcttggccgtctttttaacctgattccaaacggcctcatcctgcttagatggtgaaacgaccccgaccgttacggtttgttccttttgcttgccaaaattgccaaagctgaagatcccagcaataacgactaccaatgcaacaacgacccagattaatgtctttttcttacgcttgttcataatgatgtctcctctcaatcctcaattaaataatcccttttaataatagctttttaaaacaacagcctgccggcagccaattgtttgatcattaatcaaaacaaacaaaaaacactcatccttataaaaaggacgagtgtttcgcggtaccacctttttttgcctaattctcgcaaattaagcctcagtaggtgacttaaaaaatcaccttgcattgataacggctgcaaccccgttaccggctaaatatcgccagtaccattccaagcccatcttcgactgcttaacgaatttcctcgcaccaaccggaaactctctgagcacgcgctacaatctactctgcttttcgatatgtttaaatttgttcgttcgattaattgtttatgtagttattataatgcaattttaatttacgtcaacacttttttcataaaattcataaaaaaagctgagactggctttcaatgccggtctcagcaatcagagaaatttactcagctaaatggctgaaccttaatcagccactgaccatcgtcactgtcagcagccacccagccttccaacgctggattaacggcgacaatcacaccgtcaagcggactttttaaatcgacgatcattttctgtccttcgatcgtagccagactgtcattggttttaagctgggttcccaccaatgctacatcaataaaattcagttggcctaattcctgcagtgctgatttttttaagccaactgcgaccagatcacgggcttgatgatcaatccaccatggctgttccatcttacatcacccctaatgaaattcttgattgttgctgaacatgtaggaatgatgatgatacctcatcgacatgaccatcccaatcccaatcagatttccgatcaaagaagagccaccagcactgataaatggcaaaggaatccccgtcaatggcaaaagaccgatattcattccaatgttttcaaaaacgtggaaaaggatcatcataataaccccggttgaaatataggcatagaactcatttttggtatcaaacgttacccgaatcatcagatagatcagcagcagataaagtaaaatcagcaagacgccgccaataaagccaaagttttcaccgataaccgaaaaaatcatatcagattcacgcactgggacatagacatgcgtgtggttaaagcccgtcccggtaattccaccgctgccgaccgccttaatgctttgccagagctggtagccttggttggtcgtatcagcttgaggattcagccaggtatcaacccgatcaaactgatatgcctgaaacccgatatgttctagaatccgtcgaccagtcgtactggtaaccattgccagcgccgaaccgccaacaacgatcaaaaccgtagcaatcggggcgataattcgccaggtcacaccgccgaccaagaccatgccacagaaaatggcaaagaagaccagcgaagtcccaaagtcgttttgaaagtgcagcgagatcataaccggcatcagccacagcagcatcttaccaatcaagcgccagtccgattcaacggtatgggtactgtattgactgttatgagtcgtgatcacgcggcccatcattaatatataggccggtttcatgacttctgaaggctgaaaagtgaacggaccaatggcaaaccagctcttggcacctgtactggcatagtacgatcgactataaaagaccaggatggcaaacatcaagaagattccgagccaatagacgattggcgcgattttccagagctgttcggcgtcaaactgcatgataacgataatcatgatcgtcccaatgacataccaaaccaattgcgatactacttgacgcgtgacgctggtcggggtcttatcattgctggccgcaacatagattgaagccagtccaatcagcgccagcaaaagcacacagaagataatgccccagtcaatccgcgattcattatcattttgcgatcgttgcattaaaatttctccttattaaaactaaaaagggctcgggcttttccccaaccccttttatccaccaatcaaccttggtgaagatgatactgctgaagaatcgtttccagcccttcttcttgcgagcgaacgtaaaatgcctgttcgcctttgaggagaattgccttgaagcgttccttgtcagccacgacctcaccgatcagtcgctttccaacaaaaatctgttctaccggctggccattgcgttcaatatctttgacgctaacggcaaccgttttttctttttttgacacgttttcacccttgtctatgatgtgttcgtcggattgtaaagtgatccggcactggatcgaaaccaccgtgggcccaaggatggcagcgtaaaatcctggcactgcccattaaaactcctttaagtccaaaccgctgaacggcctccagcatatactgcgagcaggttggctcatagcgacacacacgatagggacgacgtgaagaaatgccgcgctgataacctttaatcagcatgatcactattttcctaaacattgcttaatctatttacgatttttaccgctatcagactgcatgcgttccagcagctcaccagcacccttggcaacgttgtccagtgggtcttgtgaaacgactactggtacctttaagcgatcactaaacagcttatcgataccgtgaagcattgccgtcccacctgtcagcatgatgccgcgatcgataatatcgctggcaagctctggtggtacggtttcaagtacggcaactgatgctcgaacgatctgctctaaagtgtcatgcaatgcatccgcgatttcattttcattggtttcaatctgctttggcatcccgctggcaacatcacgaccacgtacttccatcgtctgtggatcgtccactttttgtgccgttcccaatttaatcttgatgcgttcggcagtatgctcaccaataattaagccatgatgctctttgatgtattcagcaatgtcactgtttaactggtcaccagccaagcgaaccgactcgctggctacgatatcacccaaagaaagcacggcaatatcactggtaccgccccccatatcgattaccatattgccacggggcttgaagatatcaagtccagcaccgattgcagctacctttggctcatactccaggtaaaccttgccgccacccgactgttcagcagcttgaatgatggccttgcgctcaatttccgtaatattggttggcgcacagatcataatatcaggttttgacataaagcccttgacgctaagcttgctgataaagtaagaaagcatttcctgggtcatatcaaagtcggaaattaccccgtttttcagtggacgaatcgcgcgaatgttacttggcgtccgtcctaccatgcgataggcttccgaaccgactgccagaaccttattagtgcgtgtatcaatcgccactacggatggttcgtttaatacgataccctttccttgtacgtaaatcagaacattggctgttccaaggtcaattccgatatccttagccatgtttttctccttccgatttttactcaattcgaacgatattataccacaaccagtcttcaaccgctgaattgataataatctgccttacttaaattttgttaatgattttgaagccgattcaaagtcctttaactgcagactggcccccagactttgcagcttggcaggtaagtcctcaaactcatcaccaagataagcgccgttttctacgatcgttagtcctttagccgccaagccagccagggtcagcgtcagtgcactgctggcatcaaaagccttaaccttgatgccgctgagcttggccggaccatttaaaatcaattcaccggcagtttcttgaacaccagcctgcattttctgcaattgatcaagcagtctttgatccatgactgcattgctgcttttaccattagccaacagctgtagaattgcaagctcagggtacatggtgctgggaaaaagactttgtggatcagctggcagcaaaactgccgttcctaaaactcgaacgccattttgctggacgactacggtacatcccatccgttcaagctgattaatcacgccttgaacgctttgcagatgaacgttttctacaatcacatcgccattagttattgcagcagccagcatcagtgccgttgcttccagatagtcgccggcaatctcatagtcacagccatgcagaaacgtcacgccttgtacccttacgattttcgttcctgcgccatgcacccgcgcccccatcttgtttaaaagattggccagggcaatgacctcaaaatcacaggctgcattttcaattaccgtaattccatcagcaaggaccgcagccatgatcagactctgagtactcaggcagttgctatctgccagctttaaatgacttccctttaagcggcctgctttgatcgctaaagcttcatcatttaacgagacatcagctcctaagcatcttagatcggcaataatctcatctggcacctgatctttgtttaatctgacactgccagtgcgggccagcagcggaccaatcatcaatgaggcaacctttgcggaagtaattgccgttaggtcgtcagccgtaagttttgcttgagattggataataagctgatgagtcggcttattgacagtgacagccaagtccagctttcgtaagcgttcattcatcgtatcgacagtcatcgtatcagcaacgttagccagcttaagctcaccagttgatgccaaaagcgccgcaatctgtgccgtcagtgccagggcagttgaccccgcaacagcaacgctcccacgtagacgctgccctccttgaatcaggatttttttcatttggttttcctccaacattgatttattgtgccaaataaatcagattacgaattgcttttagaaccgtcaataaaaagctggcattcaagtagccaagcgcggttgccaaaagcaccatcagcaatggcagcgttttaggcggacgccgaaaccaacgttccatatgaagtccctgtagtgcataaaaggcaatccaaataaagcccaattgtattacgatcgtaatcaaagcctgcagacctgtcagttccattaaactccccccaataagcaatcattaatcatattaacatattctatgctaagccttctaactgctggtcaatgtttacaagaaattaaaaaacgccatgcctgtaatcggcatgacgttttggccaaccaaatcaacgcatctgtgaaacgttgagtcggttgattgctcggcgcaggtgaacttcagcacgcgcaagctcatttttactgtgcttttgcttagcttcttcaacccacttttcagagcgttctttggctttttcagcccgggctacgtcaatcgtcgttggcagttcagcactgtcagcaaccactgtcgcagcattttcattgaattccatgaaaccaccgttaacggcgatcacatcgtctttagcggagttgtgcttgacgcgcaaggcactgatctgcagcgctgcaaccaggggcacgtggttcgccatgatccccatttgaccgccacgcgtatccataaccagcatcgtagcgtctttgttctcatagacggtgccatcaggagtgataatggtgaccttaaaagtactatcagccatgatcatccctcctagttttcagctttttcggcatcagctttcatctgcttagctttttcaacaacatcctcgattggaccgaccagacggaaagcatcttccggcaaatcatcgtacttaccatcaaggatttccttgaagcctttgatcgtgtctttcaatggaacataacgacctggcatccccgtaaattgtgaagcaacgttgaagctttgtgacaggaagaattgaatccgccgtgcccgagcaacaatcgtcttttcttcatccgaaagttcatccatccccaagatggcgatgatgtcttgtaattcacggtaacgctgcaggacatgctgtacccgcgtagctacttcatagtgttccttaccaacgacttcaggcgtcaatgcagttgacgttgaagccaatggatcaacggctgggtagatacccatttgcgtcagccgacgttccaggttggtcgtggcatccaagtgggcaaaagtcgttgctggagcagggtcggtgtagtcatcggcaggaacataaacggcttgaatcgacgtaatggaacccttcttagtcgaagtaatccgttcctgcagctgacccatttcagtagccagcgttggctgataaccaacggcagatggaatccgtcccagcaaggctgaaacttctgaaccggcttgagtaaaccggaagatgttgtcgataaacagcagcacgtcttggccctttacgtcacggaagtattccgcgatcgtcaaaccagtcaaggcaacccgcatccgggcaccaggtggttcgttcatttgaccatagaccatggccgtcttgctcagaaccccagaagccttcatttcgaagtacatgtcattaccttcacgggtccgttcaccaacaccggtaaatacggaaatcccattgtggccttgagcaatgttgtggatcagttcttgaatcaagacggtcttgccgacaccggcaccaccgaaaagaccaatcttaccaccacgaacgtatggagcaagcagatcgataaccttgatccccgtttccaaaatttccgtagtgttgttcaaatcttcgtacttaggtgcttcacggtgaattggcatccgcttggcatctgggccgaattctggaccattgtcgattggttcaccaaggacattgaaaactcgacccagagtgtcgtcaccaactggaacgctgattgaagcgcccgtgttttcgaccttcatgccacgttgcagaccatcggtaccgtccatggcaaccgtccgtaccacaccgtcacccagttcaagggaaacttcagtagtcagcgtcgtgccatcgcctttatcgatcttcagcgcgtcattgatttctggcagcttgtcgtccaaggggaattcaacatcgacaactggaccgataacctgtacaactttaccagtagcactcatgctgtttcctcctacttactagaatgattattcttgggccgtcataccaccggtaatttcagtaatttccgtggtaatggcagcttgccgtgcccggttgtattgaagctccaaatccgaaatgatctcatcagcattgtcggaagcagagctcattgcattggcacttgaggagtgttcagacgtcttggcatccaaaatcgctccataaaccaaactttccgcgtattgcgaaacgattaccgaaacgatatcgttggcggaaggttcgaattcgaattcaggcgaaatccgcgtcttgtcagcagattcttcacttacggccggctgatcgtcggtcattgaatcttctgacactggcatcatcttttgaacccgaacgtgtgacgtaatccggttgacgtagtgattatatgacaggaaaagttcgtcaaatactccgtcattgtacatttgtaccgtggtcttaacgatcccacggacttctttgtacgttggcacgtcactaacaccagtgtactcataaacaacgttcataccgcgtttcttaaagaactcggtcccggttcgtccaatcgtcaggaaaaccgtgttgtctttattcaaatggtgttttttcatcgtttccagggtttctttgataacgttgctgttgtagcttcctaccaatccccggtcagatgtaataactaagatgccagtctgctgtactggtcgtttgtcaaacagcgacgtgaactgatctttactatcagcatccgtcgtactgtgagatttgaccatgctggacaggacttcacgaaccgtagcagcataggcctcataagccttagtatggtgctgaatctggttaagcttagccgtagaaaccatttgcatggcagaggtaatctgacgcgtgctcttggttgactgaatcttgcgtttaacagtagcaagtgaagctggcactaaatctcaccgtcctttcgactagtcatgcttagtttttggcagctttgtcgctgtcgctggtttgaaatgacgtttccttaaagtccttgattgcctggtcgataacatcgccttctggcagcttgccagtttctgcaatctggtcataaacgtcttggtggtttgcacgcatgtaggcagccagttcctgttcaaagcgacgaacgtcttgaacaggaatgttgtcaacatatccatgtgacagagcaaaaagcgttacaacctgttgagcgactggttgtggctcatgcaggccctgctttaagatttccatcgtccgttcaccacggcccagacgacgctgcgtgttttcatccagatcagaaccgaattgcgcaaaggcagccagttcgttgtaggcagaaatatccagacgcagcgtaccagcaaccttcttcatggctttgatctgagcgtcaccaccgacacgagaaaccgaagtcccggcgttgatggctggacgttgacctgcatagaaggagtcagaatccaagaagatctgaccgtcagtaatggaaataacgttggttggaatgtaggctgaaacgtcaccggcttgggtctgaataactggcagagcagtcattgaaccgccgcccatgtcgtctgaaagccgtgcagcacgttcaagcagacgtgagtgcgtgtagaaaatgtcacctgggtaggcttcacgacctggtggccgccgcagaatcagtgacagttcacggtaggcatcggcttgtttcgtcaagtcatcgtaaacgatcaagacatcttggccattgtacataaactcttcacccattgcagctccggcatatggtgccaggtaaagcattggtgcagggttggaggcactggctgaaacgacgatcgtgtagtccaaggcgccatattgacgcagcgtttcaacttgagcccgtaccgttgattccttttgaccaattgcaacatagatacaaatcatgtcttggtctttttgattgatgatcgtgtcaatggcaagtgaagtcttaccagtcttacggtcaccaatgatcaattcacgttggccacgaccaattggtaccaaggcatcaataaccttgatcccagtctgcagtggcacgctaacgctcttacgctgcataacgccaggggccttcttttccacgggacgcgtcttgttggtcttgatttcgccaagaccgtcaattggacgtcccagtgggtcaacgacccgacctaacagttctttgccgacgggaacttccataatccggcccgtccgcttaacagtatcgccttcacggattcccgtgtagtcccctaaaataacgataccaacatcgttactttcgaggttttgggccatcccgtagacaccgttgctaaattcgagcaactcaccagccatggcattttccaagccatcggcacgagcaaccccgtcaccaacataggtaaccgtcccagtttcttcaacggaaatttggtcctgatagttggcgagctgcttcttgatgagtgaactgatttcctcagttttaatgctcataaaggtctcacctctttgacaattgattatttaacaagtaaacgacgaatttgttcaatctttgaactgagactaccatccagagtttcgttgtttgctcggatgatgactccgcctaaaattgacggatcaaccgtttcgtgcaatacgatttcgttggctgacagacgcttagccagaccagccttcagttgatcgcgttgcttcgtatcgagttgcaccgctgtgattacttcggcgtggatgcgtttgttaaatgcatcgtaacgccgttcaaactcatcaataattgcgaccaaatcatccatgcggccgtaatcaaaaaccatttgaatcagattggaaacgaatggcgaagcatcctttttcaatgcatcaatcaaagattttttctcagcgagtgacagatcgacaccgctcaacagcgttgccaaactgccattttcttcgaagacttgacgcaaagcagataattcttgataagtctgatcgagttgaccgttttcttcagccagctcaaaaattgctttcgcatagcggttagcaaccgtcttcttatcaagactcatgttttaccaacccttcgatgtacgaatcgatcagtgctttttgatcgtccgcgtttaattccttgtggatgagcttggaagcaatctcaatagataagttggcaacatcgttttgcgcccctttcagagcatcacgacgtgcctgctcagcatccttttgggcttgctcttttacgacctgcgcatctttttgcgcatccgtaacgatctggtcccgttgagcttcaccagtctttttggccgtgctgataatcttggcggcttcttggtgagagttctgcaattcagtttgacgctgtgcagccagcttttctgcttcggcacgcgacttttctgcattgtcgatgtcatcggaaatcttggttgcccgcttgttcatcatatccgtaactggtttccaagcataatgcttaaccaacagcatcagaataataaatgaaacaatgtaaaacagcatgtctccgacgtataagctattggattgagccagaacaccttgcaacatctattgacacctccttgtaaattgatagctttagttattttgaactacttgttcattacaaggaagccaataacgatggccaggataggcatggcttcgatcaaaccaacaccaatgaacatcgtaccacgcagtgcaccagacatttctggttgacgagccatcccatcgatcgtgtggctaatgacaaaaccgttaccaataccggcacccagtgccgcaccaaaagcagcgatacctgcagcaattgcacccatttttatatcctccttaagatatgcttattcctcagcagaaaccttctgagaaatataaaccgtagttaatgttacaaagacataagcctgaatagccccaatgaagactgagaagccttgccaaacaatttcaagtggcagactaaccaggatcgttggaacaccgtgtgaaaaggccatctgtccaagcaacttcagcagcagttccccggcaaaaatattaccaaagagccgcagaccaagcgtcaagaagttggcaaattcctcaaccaagttaattggcagcataacagcatatggcttgaggtaagagccaaagtagtgcttcaaaccgtttttgctgatcccggcaaagtgtgccagcatgatcatgctcaacgagaaagtcagcgttacgactggatcggcagtgggacttctcacaatctcgtttccgttccatccgatttggaaaatcagacccagctggtttgagaagaagataaaggcaaacagtacgaaggccaagaagctgtagttgccaacttctgatgcaggcatttgttcccgcacgataccgtttgtaaattcaatcaaccactcaattacgttttgaccgcctttaggcttcatttgcaaatgccgtgaaagaccaaataaaacaaagaagaccaagacaaaaataatagtgcctgaaatcacgttagtcgcattgaacgtaaggccgaatagcttaaaagtataagcttcaccgcccatttatattccacctcttttctttataacaataatttggtttgtaaattggattccatctcgttgaaacaaccacgaactgtcccaagttacgatcattaatatagcattatttcattaaaatttcaaaaaaatatcagagccaaagaaagcgccaacatcagctcaatccgttacacagcaggcacttcgagttaatataatatataaaccaacctaataaattgtttataatttatatctattcattgacataaataaaaaaatgatgacatttgagataaaacgtcatcatttgtttcttttttaattggtctagttgtttttccggcgttcgctggcagcctcatcaggcaggatcagatttaaaacaatccccaagaccgctgccaccgccaatcccgaaaactgatattggcctaactttaagtaggcattaccgatcccgatcaccagaattaccgagctgatcatcaaattacgcttcttgttaaagtcgatttggtcttcgatcataacccgcagaccgctagaggcaatcacaccaaataataggaaggaaatcccaccaataacggggcctgggattgattcaatcaatgcgctcagcttgccgacaaaactgaagaagacggcaaacaaggcagcccctgccagaacgtagacgctatgaacgcgggtaattgccaggacgccaatgttttcgccataagacgtcactggcggcccgccaacaaagccggcaataatcgaagccgtcccatccccagccaaagtgtgattcaacccgggatccttaaagtagttgcgttcggtcagctcgttaagaaccatgatatgccccatgtgctcagtcatggtaacaaacgcaatcggtgccatgcttaaaatcgcgccccaataaaaatgcggctgatagttcacgaacggaacctgaaaatcgggcagactgaaccaatgtgccgcagctactggcgccaggtcaacaataccaaacaggcaagcaatcacatagccgcaaacgatccccagcagaatcggaatcaaacccaaaaagcctttgcaaaacatgttaaaagcaatcgtaaccaacaatgtcagcatggcaacggcaaaatagcgcaggtcataatgcgtaccgttcatcgtagcatctttagccgccgtgctggccaaagaaagtccgatcaccatcacgattgggccgaccacgattggcggcagcacgcgatcaatccagtccgagccaatcatcgtaacgatcagcgataccaataagtacacacagccaaccgcgatcgtaccttgagcaatccctgggtagcccgttgatttcatcaatgccatcattgggacgataaaactaaagctcgaacccatataagccggaatcttgtgacgcgtgatcagcagatacatcaaggttccaacccctgaactgaacaaagcgattcctggattcaatccaaccagaatcggcaccagcacggttgaaccaaacattgagaacatatgctgcaatgacaatccaacccactgaccaaactctggcctttcatcaacgtctaaaacgacgccatcacgatgtgccattcaaaaacacccctatgcagataaaaataatagcccttgagctccggcccaaagactaccttaaaacaacccgcaaaatggatgattattttaacgcgtccttggaaacctctctggatttcattaaaggaccgatattcaagttactagactatagcttacttgttttcagaaaaactgtcaactatcgtctttttgcgcagccccattatccaagccgtaatcggaaccgttagcaaaactccaataaaagaagtcaataccattatcatttcggcaacaaaaatcttattattcataatcgttccaaatgagtaatgtaatccagcaaaccagataaaaagcgttaaaaaaccgccaaaaaagccaaagaacaacgtattaaaagtcgttccaataatctgtccgccaattgccatgccgcttttcataatctgagcagtcgagatatcaggatgcgcatttaaaacctcagtcagtcccgcagctaccgccatcgctgcttcagcaatcgctcccagcgtacttagaatcgtcgttgtaacggccactttcagatagctgataccaattaaaatcgacatgccctccagatcttcactgtcttcgggaccaaagccctgtaccattgcccagtgctcaacgccaataatcagcagtagcagaattcccattacgatcagcgatgcgtaaaaagccgtcacggtcgtttttagatcatcctcacccataaaaatcgttactgccaaaataatggttccagtcgtcagcgttacaaacaacggcggaacgtggaaggcaatcagcacgatcgcaaaatataaaaagccaaagtttagtagcaggcttaaaaatgatgtccatccctgcttaccgccaactaaaatcatcagaatcatcaagaccagtcccaatgccgtaatcgtactcatgcttttgccttctttcctaataaaagcgctgctaatgcactggcaatcggaatcgccaaaacgatgccgattccactgatcaagctttgaacagtgcccagacacatattcattgaaaacgtgtagccccaggaattgccatttttcaaatacagcaaagatgaggtaaaggtatcggccataaaaatcagaaacaagacgttaaccaacggccccataatggattgaccgacgctgcgtccggctaagaacagctgacgcttggttgcagctggatcaagctgtttgagctcaaagatcgtcgccacgatgtcacttgactcatccattacagcacccagcgaccccagcaacgtctcggccaaaaagagcggtcgcggaacctgagtgacatactgcatcgattcataataaattccgcgttcctgtgtcagattaaaaaccagcagactgatcagcattgcggcaatcgtgccaaaaactgttgcccccaaggtagccagcattcgcctggtaaaacctagaatcatgaccagactgatgaccgtaaaaatcaatgccagcacgccaaaaatcagcagcacgtgcgcggcctgcattttcagatccagctcaatagccagcataaacagaatcgtattgacgatcacactaagcagagctaagctgccttgtcttctcatcatcaacagcagcagcaaaattaccagccagactaaaaacacaatgacggtatcgcgcttatagccggcaatggtagcatgcagctcgccatttttttcatgaacgcgcgtcaaaaaaatctcgttgccgactcgatacctctgatccattgccccggaataagaataggtattggtaaccgtaagcacttgaccgcgatatttgccattcagcattttaattctaaggtgctgcttagtctgccaatcaacgtttttaaactcatcagtctgcttaacggctttttcgttatgtacctgttcaacttttgccaatggtcgctgataaaaagcctcattatgaaaggtaaacagcagcgcacccagcccaataaccagcaagatcaaaaactgccttgcaaaaccggccgaaccttttaatttctgcattttctcagatcctttattggatttaattttaacaatcagctaccattttactatttttggcgagtttggcttcgtttaccgacagttgttaaaaaatgttaagacttttatctggcaaaataaaaaagcccagctcgtgaacaggtcacagactgaacctttaatgttagatcagactacttggtgccaaaaagacgatcaccggcatcgcctagtcctgggacgatgtagccttgttcgtttaagcgttcatccaaggctgccgtgtagatgtcaacatccggataagcggcttggattgccttaacgccttctggagcagcaaccaggcaggcaaacttgatgttcttttcttcacagccccgcttctttaaggcgccaattgcatcaactgccgaaccacccgttgccagcattgggtcgacaacgaataattgacgttccgaaacatcgcttggcagcttgacgaaatattcatgtggcttaagcgtttcttcatcacggtacatgccgataaagccgatcttggctgccggaatcaaatcggtgaatccttcaaccattcccagaccagcccgcaagattggcacaatggcaactttcttgccggccagttccttttgagtcgtcttgcagattggcgtttcgatttcaacttctttgagcggcatgttcttggaaacctcgtaagcaatcagcgttgaaatttccttgaccgtttcgcggaaaaacttagtcccaacgtttttgtcgcgaatcatcgttaatttgtgttgaaccagtggatgttcaataacttcaaacttgcccatgaatatataactctccttaaatgtttctcaactattgtaccaaaaacggacctggttgcttaggcaaaaagcaaattttatcaattatttgaccggtacctcaaaatgcttgccgccagccgatttattcagacggttcatgtaggctgcgcccagaccggttgcatccaacccctgtaccagaatggaggcaacgtctttttgatcatcaaagaatcgcaggccggcaaacaaatgtgagctggcatcgctgacgtcttcgccaagcgagtagatgacagcattatccggccagctgaatgcatccaggatctgtttttcagccattaccccaaccttagacggctgctcttcaatccaggcgttaacgctttgccaattcgtctgcggatcaacgatggctactggaacgcccggtgcataatggcgatacttcatccctggagctttaggcgtttcattggtcccaacatggtgctgatccaagtcgattgaaccgatcacagattcaatctgagctttggtaacggcacctggacgcagaattgccggctgcggcgtcgacagatccagtaccgttgactcaactcctacccgggtcggaccattatcaagaatcccgaaaatcttgccattcaaatcatgaaagacgtgctgagccgttgtcggactaggctttcctgacgtattggcggatggaccaacaattggaacgccggcttttaagattaggtccagcgttggctgacagtcagggtagcgaaaggccactgttgccagtccccccgtaaccgtttttgaaagcgagcctggcttgatctttaaaataatcgtcaatgaaccgggccaaaatgccttcatcagctgacgcgcgctgttcggaatctcagccgcgtaccgttcaaccatttcaatcgatgcaacatggacgatcaaggggttgtcgctgggccgtcctttggcaagatagacatttttgaccgcagcctcattagtagcatcggcacccaaaccgtagaccgtctcagttgggaaagccactaactgtccatctttaatggcttgagctgcttgatcaatttcattcagcttaaaaattcttgtttccaaaatcgtgcttccttcccaaacttaaaagttccatgcatgaatcatccgcatgcgatcggccatatcatgacgagtttcgatctgagcatatggcgcaacttgatgacaaaggtcttgaatgctttgctcctggtcaaatccggtttcaccaaacagctgaccatgtggcgctaagtgatcgccaatgctttcaaacagccgatgataaaagccaagcccatgctcatcggcaaacagagcaaccggcggctcatagtctaaaacggccttatccattaaagagatttctgacgttgcaatatatggtggattagtaacgatcaaatcaaacttttgatccgccagtctggcaaacatatcgctttcgatttctggcagattggttccatgcagacgctgattggcagtcgctacccgcaaggcgccagctgagatatcactaagcgtcacctgccaaagcggtctttcaagctttagcgtaatcccaatcacgccgctgccagttcccaaatccagcacacgcagcggcttatcttttggcatcgtgtccagtacccactcgaccagttcctcagtctcgctttctgggatcaagacatcgcgactgacgataaacatccgcccgtaaaacggcgccttgccaacgacatactgcggcggttcatgatcggccacccgctcgattgcccgccgaaaccgcactgcttcttcggatggcatgcgatcacgattatgcattaaaagcgttgtcgtgttccaatcatgaatcattttcaaaataaattcaggtgtctgtggatccaatccgcgttctttcaaatatccggctgcccagcgctgagcttgaaaatagttccaagactcactggttgatctattcattgcgcagctgctccaatttcttggtttgatcggcaataatcaaggcctcgataatctcatccaagtcaccagccatgatcttatccagcttgttaagcgtcaagccaatccggtggtcggtaactcggttttgcggatagttgtaggtccgaattcgttcggaacgatccccggtcccaatcgcatccttacgcttttgatcataggcattctgttctttttgctggtagtaatcgtaaacccgcgcttttaagatccgcatggctttagcccggttctgctgttgggaacgctcgtcttgcatcgctactacgataccagttggcaggtgcgtcatccgaacggcagaggaagtcttgttaatgtgctgaccaccggcaccagatgagcgataaacatcggtacgaatatctttaggatcgatgtcaatttccacgtcctcagcttcaggcattacaccgaccgtcgccgttgacgtgtgcacacgaccagccgattccgttaccggtacccgctgaactcggtgcgcgccgttttcaaacttcaacttggagtagaccttgtcaccagtgatcagcaaagagatttccttaaagccgccgacttcggtttcgtttttatcaacgacttcaactttccagccttgtttttcggcatagcgcagatacatgtcgtacagatcggctgcaaacaagctggcttcatccccaccagcagccccacgaatttccatgattatgtttttgtcatcattcgggtctttaggaatcaaaagtacttccaattccttttccagcgtagcctgacgttctttagacgaggcaatctcatctttggtcattgccgttagatcaggatcatcaatttcgcgaagcatttcttcgtcatctttaatggtttgcgttacctgtttatattcgttgtacttttcaacggtttcgcgcaggcttccttcttccttggacaatttcataaaccgagcagtatcagcaattacttctggatcactgatcagttcattgagctcatcatagcgatcggcaaccgcttgaagcttgtcaaagatttcttccatttccatgattatttctcctgtttcttattcagcagcgggtgaaagtagtgcttgcggcaaaccgggtagtacgactcgttgccgccgatttgaacctgttctccttcataaatgggatgaccgtcaagcatgcgcagattcatggttgccttatgagggcagaaccagcagatagtcttcatttcttcgatcttgtccgcatagatcaaaagatatttggagccctcaaacagctcattgcgaaagtcattcttcaagccaaacgtcatgacgggaatgttcagttcatcaactatctgcgtcagctgtaagacatgctctttggacagaaactgagcctcatcgatcaagacgcagtagatgcgctggtcaatgtttttgacgtattcatagacattggtgtctttcatgattggatgaacttttctttccagaccaattcgactggcaatcgtcccccgccctgaccgcgtatccacgccactggtcagtaaaacaaccggtttgccttgttcttcgtagttatgagctacttttaagacatcgatcgacttgccggaattcatcgcgccatacttgaagaataactgtgccacgctctttcaccttttctttgcaatagtaactaaattataccgaaaatcagacctattttaaaccgtctgacccaaggctgcaattcagtcgacacaagtataaaattttatcacaaattatcgctgctgtggaccttttagacgatttgagcatgatgactttctttttttggatgcaaagtttaaaattgatcggtactataataagttaaaaattattttgcggaaggatttttttatgtcactgaaaagctcatttgccgaatttgctggtcgctccagctattggtttttgcataccttcatgcacggcggcagctcattgccaggcaagatcactctaaagctagatcccgacattctccagtcgtttgctaaaaaatatgacctggttattgtcactgggactaatggcaagaccttgacgactgcactaagcgtccgcgtcctgcgcgaaaaatacagcgatgtcttgaccaatcccaccggctcaaacatgaagcagggaatcgttacgacgtttatcaccgcacccaagccaaagcaaaaagggctggccgttttggaagttgacgaggccaacgtagccatcgtcacctcctatatcacgccagttgcctttgtctttaccaatattttccgtgatcaaatggaccgctatggcgaaatctacacaacctatgaaaagattctcaaaggcgtgcggatggcaccaaaagccacgatcattgccaacggtgacgagcagctcttcaacacgcagaacctgccaaaccccgttatctattacggctttaaccacgagcatcacgatgacttgagagctccagccaatactgacggtctgctttgtcctaagtgtcagcacattctgcactaccacctgatcacctatgccggcttaggcgactacttctgcccacattgcggctttaagcgtcctaagcttgactacgccgttaccaaactgggaaaactgacgccaaccagctcaacgtttgaacttgacggccaggaatatcggattgaaatcggtggtctctacaacatctacaatgcactggcggcctatgcgctgggtcgcttcctaggcgtcagtcaatcgcagatcaagcatgcctttgaatccgacgaacgagtctttgggcgccaagaagagatcaatatcgatggtaaaaaaacaacgctgattttggtcaagaaccccgttggcctcaatcaggttcttgatatgatcgagactgatcccgaaccattcagctttgtctttttattaaacgccaactacgccgatgggatcgacaccagctggatctgggacggcgactttgaaaagctgactcagcatgatatcaagcagtatatgactggcggcgagcgctacaaggatatcaccacgcgactgacgatggccggagtcgacaatatatggaaagaaccggaacttgccagcgtactgaccaaaatcaaggatctgccaactgatcacgtttatgtcttagccagctatacggccgttttacagctccgcaagctgctggccgaaaaaggatacattaaaggagggatggactaatgaccaagtaccatctgaatctggcccatctttatggtgatctgctaaatacctacagcgacgttggcaacatcatcgcattgcgctattatgccaaacagatggacgccgacattgccgttaaggttatcagcattgatgaggaatttaatcctgacgagtttgacatggcactgtttggcggtggccaggactatgagcagctggttgtctcaaaagacctgcccaacaaaaaagccggaatcgaaaaatttatcaacgatggcaagccgctattggcgatctgcggcggctaccagctcctggggcactactatgttggcgcaaacggtgaaaagattcctggtctgggcgttttggatcactacacgctgagtcaggaccataaccgtttcattggtgacattaccattaaaaatgaagaaaccgggcaggaataccatggctttgaaaatcacaatggcaagacttatctaggcaagggtgagcgtccattgggcaaggtcgtttccggtcatggcaataatggcgaggatggcagtgaaggcgcaatctacaaaaacgtctactgttcttacttccacggaccaattttgacgcgcaacggtgagatcgccaaaaagatcctgttggctgccctgcatcacaaatatcccgctgccgatctcagtcaggcagaggccctggaaatcaagccgaccttctagtcaaaggaatggtgaatgaatgattaatactgatctctatgctactttgatcacgattatctttattgttgaaagcttttgggaatttcgcttatatgcctggctgcgcggcaaccaggatctggcccgtgaccctcagctaaagcagcggctggccagcaccatgcgcgttgaaagcaaatggaactggggctcttggcttttgatcattctcttgctgattgctcccgacaactgggtactgccttttggatgcctgctggttttatttgaaacactggtcatcaaacgaatggacaatcttaaaagttcaatgcaaaaccaataaaaaaacgtcacgcagcgctgcgtgacgttttttactgatccttttcatttagatacgtcgcaaacaagtgatccctggcatccaggaaggcttgattgtcggcacttggatgaacgcgattggacaagacgatcatcccttgatcagtctgtttgtccaaaaccatccacgttcccgtatagccagtatgcgaaataacaaaatgatgatcacagctgcgcgaatggaacagtttccagccaaagctgcgcaaatgttcaccattcatcggcgtctgatcataaaacagactattgatcgttgtcggttcgaccagtccgtccagattcgtttcaagcaaggcatgactgaattttaacagatcatccagcgtggaaaacatccccgcgctgccgcagtgctcacctaagacatagcctttgggatcatgcgtctgaccgcgaatcaatccccgttcttttttaatctcggttggcacgcacttggccggatccgggaaaaacgtcgtatcattcatctgcagcggttttaagatccgttccgtaattgctttttgaatcggctcacccaggattttttcagcaatccagccaacatagatcagaccaacgtcagcatagcggatctgcttatttaaattaggaccaacgcgcagagtattgagcatttctttagtcagctcagcggccggcagctcatcgcgatgcggaatatagccttcgatgctggaagtgtgcgtaagcagattgcgaatcgtagctcgatcatcattcagttctggcagccagttgacgaccggatcatcccagtccaaaagtcccgcatcctttagctgcatgatcacgggaatggtgcccacgactttggtcagtgatgccacatcatagagcatgccatcgatcagtggttctttgtttggctgcagctgagccagaccggccacgttttttaaggttgtcttgccttcaaagattgcccagctgattccaggaacgatgccatcatcgaccatggcattcaaggattgaatcgtattttgatattcgcgcatgttttgacctctttatttagactcagtctttattctaacacatccgctgtcagatcgatggctgatcgctaaccagccaagctattgagccagttgcgataaagctgaattccaggttgcctccatgaataatcgatatccagatgattttggtcaacataatagtttttcggcggctgaatagccaggcccttttgctgatcacgctgatattcattgtcgagcgtatcggcgctgtattcaggatgtccggtaatatagatcgaatgcccttcatcagcttgatagattaaaggatcaatcgtctggttggcggccagtatctttagccctgctggcaattgcttgggcagcttaactttggtatgccgagactgcggaatctcgatcgtattgagatcttttaacagcgctgaatcacagcttgcggttccttgataaacgccaaatagcttatggctcattttctgcttgggcaagccgaaatcattccaaagtcctgcttgagctgcccagcattcataaatgatcgatttaacgtgatcgtgagcccattcaacgatctgcttaaactcatcccagtagtcaacggcttcaaacggcagacattcgactggcgctcccgtaatgatcaagccgtcaaaacatcgctgacgaatctggtccagacagacatagtgctgcttgattctttcaccaccggaatgacgaaaacgatgggtagccggatacaggaacgtcaccgtgcagtcgatgccagtctcgtgcagacgctgcagaaactgccattccgtcgcttccttggttggcatcagatttaaaattaaaatctcttttggattgagaactgcctcgttgttccagcgtgacgttaacttcaataaaccgttgcgtgcattgactgccatgatgattcctccataaaaacaaaaaacgtcttcatcctgatttcccgatcagtttaggaaatcatgggacgaaggcgtttcgtggtaccacccattttcactgccatctcacaatgacagccttattcagtacggacatactgggcgagatatcggtcgcttaccggctcaggtagcctattgacccctgaacgaactccgagctcatcttcaatcattattggtcggtccgctttcacctgatcggactctctttaacgacccgttgtgatctactcttctcatcactgttctcatttttatgctttatttttaattgattattaatctaacatctttttttaaaatgtcaagcactgaatgatcagctaaatctgattacccaagaactgactgttgtaaagatcagcataaaagccctgcttagccatcaaggtttggtgattgcccgtttcaataatgcgcccatgattcataacaatgatctgctcagcattgcgaattgtcgacaaacgatgggccacgacaaaactggtccgattctgctgaatatcgttcatggcattttgaatcaaagactcggttcgagtatcgactgagctggtcgcctcatctagaatcagaatttctggattagccaaaaatgcccgggcaatcgtcagcagctgccgctgaccctgggaaatattggacgcggattcatccagcaccgtctgatagccagctggcagctcgcgaataaaactgtcggcataggctaatctggctgcttgatagacctcttcttcagttgcatcctcacgaccatacttgatgttgtcaaagatcgtgcctttaaacagccaggtatcctgcagcaccattgcaatatgcgttcttaattggctgcgggtcatcgtccgcgtatcgtgcccatcaagatagatatgaccgcccttgacgtcgtagaaacgctccaaaagattgatgatcgttgacttgccggccccagtcggcccaacgattgcgaccatatgattggttggcgctttgagattaaagtcttgaatcagcggctcgtcattatagctgaactgaacgtctttaaattcaatcttaggctgatcatgaccgggcaatggctggtcttttaaaattcgttcatccatttccggcgcgtccagcacttcaaagattcgctcagctgaggcaatcgtctgctgaatcgtactgctcagattggcaacctgagtcaaaggctgcgagaattgattggtatactgtaagaacgcctggacgttccccaatgtaatctgaccatgaatgatctgcaccgccccaatcacggcaaccagcagatagccaacgtttttgatgcagttcataaacgggaagatcagaatcgaaaagaactgcgccagccaggcagaatgatagtacttctcgtttttctgcgcgaacttggcttcttcatcttcttcatgattaaacgtccgcacgattgtctgcccagcaaaggtttcctcgacttgtgcgttgatcttgccgagctcctcttgctgcgtactgaacagtttctgcgcgcggggagcaatcatgccaacgacaccaagactcaaaggcacgatgatcagcgcaactagcgtcagttgccagctgatggacagcatcaacgccagcactccgacaaacgtaatcacactggtaatcatttgaatcaggctctgctgcagcgtggtggcaatgttatccatatcgttgaccattcgactcatcagatccccgttgctgtgcgtatcatagaacttaaccggaacaaccttcatcttggctttaacgtcacgtcgcaggttatagaccaccttttgcgaaatattggtcatgataacctgctgtgccagactgaaaaggcctgagaacaaataaagcaaaacgacgatgatggcgatgtgcttgatcttgtcaaaatcaatcggcaatgcggtcagatgctgcccagccttcatctgagcatagcccttcattattccttgataaatcgtcgtcgtggcctgtcctaagatcttaggcgagacgatcgatagaattacggaaatgatggccagcacgatcgaaaaaatcattccccaagcccatggccgcagataggaaaacaagcgaccagtcgtaccccagaaatcctgtgccttggctcccttgccgcgtggtccgccatgtggtcctctacgcatgtgcttcatctccttcctgaatctgtgaatgcagaatctgctgataggttggattgtcagccttcaactgagcatgcgttccttgtccaaccacgcgtccttcatccagtaccaaaatcaaatcggcatcggcaaccgttgagatccgctgcgccacgatcaccgtcacggcctgcttgatctgcgggtcggcttttaaggccattcgcagctgggcatcggttttaaagtctagcgctgaaaatgaatcgtcaaaaacataaacggatgcttttttaatgatcgtccgcgcaattgccaaccgctgccgctgaccacccgagaagttgctcccgttttgctcaacgaccgcatccaggccgccagcttccttgacgaaatcagctgcccgggctacttctaaagcatgccacatctgttcatcatcagcctgatcattgccaaactgcagattgctgcgaaccgtccccgtaaacagcacggctttttgctgcgttatcgagatcaagctgtgcagatcatgctggctcaagcgattgattggctgatcgttgacccggatctcgcctttttcaatctctaaaagccgtggaatcagattcaccaaagttgacttgcctgatcccgttccaccaatgattgccagcgtctgaccagccttaaccttaaaattcagatcggctagcgccagtcgttcagcgccatgatagcgaaaatcgacatgatcaaagcttaatgaggctggtttgctcaaatcgagctttagctgctgatcctttggcgcatcgtgaatgctgatcggcttttccaagacctcattaactcgaactgccgatgcctgcgcccgcggaacaaagacaaagatcatcgaaagcatcatgaagctgatcaaaatcattacggcataacttaaaaacgcgatcagatcaccaacttccatcgtcatgttcgcaatcagatgactgcccatccagatgatgctgacgttggttagactcaaaatcaaggtcattaccggaaacatcaatgagaccagcgtaaaggccttaatcccggtatcggtatagtcgcgattggcctttttaaaacgttcctgttcatagtcatcttgattaaaggcccgaatcacccgcacaccggtcaagccttctctaaaaatcagattgatgcggtcggtctttttctgaatactcttaaacaaaggcgtggccatcgacatgatgataataatgactactgctaagatcggcagactgatcagaaaaatcttggtcagtcttggttcgctccgataagccaaaaaacaggccgctaccagcatgattggcgattgaatcatcattcgcagcatctgaacgatcacgttttgaatctgcaccacgtcattggttgagcgcgtaatcaaagatgaggttcccaactctgacatctcacgctctgaaaaccgaaaaacgcgctgatagatctgagcccgcagatttttaccgactttcatcgcctgcgtggctgcaaaataaatattgccaattgccattaacagcccaatcagcgcaacacccatcatgatccatccttcatgagtaataaatgacagatcttgtttaactaccccacgattgataatttctgaggtcagcgttggaatcgtcaagtcacaaacgacctggccaaccataaataaaaccgccaagacaacggcccaccattgcagattacgtttggcaatcttaagcatgactattctcaccttctttattttttaaacattcatttttgatgttttgatcaatttttaaaatcaaccgattaagttctgctttttcctcatcactcagcgttccgaatagagttttgcagaaccattgatgacgccgatgattttcttttgccagttcagtacccgctttggtcagccgcacatgaatgacgcgcttgtcgctgacatcgcgctgccttgtgatcagaccgtctctttccattctggtcagaatctcggtcattgaacccggcttgatctgtgccagactggccaattcacgctgcgagatattctcatgtttcgacaataggaacaagacgcgtccctgaccatgaaagccacgctgtttaggcttggataccattcgaatgtccatgcccaacaaaaacagatgaccaaacagcatttcatcgctaatcgacattttatttcctccaattaaaatcgttaggtgcataacagttatgtacctaacgattttttagtttactctctttcccataatcgtcaagctttttttgagaatagaaaaagcacccgttttaacggatgctttcactgagcaaaaaaccattgccaaccgtccagcgttcatgaccattggcaatgttgatatttagttgaactcaccagtcattggatccatctgttggtattgaccggttgctggattgtatttgtagattccttttaaatgcgagacattcggatcctgccctgcaccgctgctggtccgtacgtcaacctgccagctgccatcactggttggtgaggtcatgtactggtcgccattttccggctgcagaccagcggcttggttaagtccatcaaccacctgatcattaaccgttgcagtcgcctgcgctgactcatttgaagcagctacctgactgactgccgtttgagctgctgatgtcgctggctcggctttctgaaccgctgcgtctgatgattgaacagccgcactatcaagactgctggaagttgcggctgcagctgatgaactgatactttgcgacgtttggctgctggattggctggccttactggttttggcagccgcgtgcttcttttgggcccgctgatgcgaaactgctttcgctgagctgctggaatcggctgactgattgttgccggttggagcgctgactgatgcacagccagttaagctcagcaccattgctgccatcaacaatcccgttagccaatgtttcgactgcttaatcatgtcaaccgcccctttccagattcaatttttcattactattgtaactcatttgcaacaataatgtaacattttttcgaaccggtatttataatatccgctgctgatttggcaagccatcagccaacctgctgctttcgtgtttcggatcagaccagctgcttaatggtttaatttgcattttgaaacacacgttcgtataattgattaaaagttacctgaaaggatgccattttgagatgcttgactaccataatgaaccacatggcgtttatttgatgattgacaataagtcttttttcgccagcattgaaagcgttcagcgcggaattgacccattggattccgttctgctggtcatggctgaacatgaaaataatggcagcggtctggtcgtcgccacctcgccactggccaaaaagcactttggcattcgcaacgttgaccgcggctacaaggttcccagtgatgccagacttttaaccgttccgccacgactagcgctttatcggcaaaaaaaccggcagatcaatcagattttccgtcgctatgctgatgctgatcactggtggccatactcaatcgatgaaagcatccttgatttaagcgacacctggccattttttggcgcaactcctgaaaaagcagcggcggtaattcagcgggctgtttttgaagaactcggcttacggactacggttgggattggtgaaaatccattgcaggcaaaactggccttagatctgttcgccaagcacgcgcctaattttcagggacggctttcatatcatgattttgccgctcgtatctggccacgacatgatttgaccaatatttggagcattggtaaaaaaacagctgcgaaactaaatcttttaggcattaattccgttggcgatctagctcataccgatcctcattggctcaagcatgaatttggcattgccggtactcatctttacgcgttggcttggggtattgaccgcactgatctttccgtacggctgacccctaaaaatcccagctggagcagttcacaggtcatgcctaaagatctcagccgtcaaaaagacattgagcagggcatcatcaaggttgccaacgacgtaatcgatcgactcagcaggcatcatcaaaaagccggtcgcattcgcctgggacttggctatgccaatggcgttaccgataagaatggccgcaccaactatagtcatgagattaccattgagccaactgctgaacgaaaactgttaatcgatcatctgcttggcatttttcatcaagcttggtcgggggctgccgtccgcaatattttcattgcattgagccggctcagcgatgccaatacacagcagatctcgctgttttgattgattgttgatattcagcatgaactcgctgccaactgcggggcgattaaaaattcaatgaggtaaaccatggatgattcacttgccagcgctgctcatcaaattgctgaacaggtctggccattatttaaaagactgcctaaaaccatctatcatattctggtagtcaatgatcattatgacgatcagtttaacttcttttttgagatctaccggccacattttagaacgcattcctatcctctttattcaatgtccaaccagcagctggatcagttagaaacactgctgcgtctgctgcgcgaacaagagggtctgcagatcaacattgattttcgtggttttggtaatcaacgctggccagaaagtcagcgccgcattgtctcccacccttatcaagcaccgacatttaaacaggagccgattatcaagaattcagcagtttcgcccaccatgtcagccccggttcgcctgcctaagtatcatgacgaagaagcggtcaagattgccagtgccttttttaaaaatgaatacattgactacggcatgggtaagtggcatggctttcggattgctgagcttaatgaggttgaaaacgaatttgccaccctgccaattgaagttccccaaaatcatcagagccaatttgcgattcgatcattattgaaactcagcatcgatcaagaccagcccgtacatctgcagctgcagtttggcggccgctgccatggcatcaacggcatgattttaggcaccactgagcagaccgcttttatcaagccagcgcatcagcaccaattggccttgccattaaaattaatttgccatggcgagctgctggtcaacaatgacaatgatcgtgatcagcaatccgagtcgctataatatctttttcaattaaatcttttgcagagttttccacgccctgcatcatccccaaaagcccccgccttattttgacgggggttagatttttttatgttcttgaacgcgcatcgaccttttcaaacggtaaattccaaaaattttgcgtttgagcgccaccgaagaatcgttttgcctactgctgatcagttggcgatggctaaaaagcgaaatgttaccagaaaatcatcggaaactaataaaggcagccccaattatggaactgccaaaataccgttatatcaacaacttatccgctattacctgccctattgtgaaatttttcgttaccagaaatgttaccagaattttcttgtttttgagagtatctgtttgtaaaatgaaataaaaaagtgcatcatatcaacgattgaagacgttgacagatgcacaatgttgttaggattgggtatacagggatcgaacctgtaaattatggattcagagtccactgccttaccatttggctaatacccaataagttgagttgattgcttttaacaacgattattagtatacataataacctatattgagtcaacactttttccaaaattatttttaaaactatttatcgtccagtttgttacttgaatttgactcacgaattatggttgggattaggtttcgaatgtatgatccctccagacaatccacgcaagcggcaaaatgctaaaatcagtgctgctatccgcaaaatcatataattgctagtaccagtcaccttcaccataatacccagtctaatctaagcagacaagatccagttcaaaattataaaaggacctttgattaatatttttcatttcaacaggaaaatagccgactttgtgaataaaagaccgcgctgctcgtcattaccattacttctcgctgtcgcagctgctttaagatatctatcatcccattgaaaccattcaaagtttatgactacatcatttaactacgctactgtcaattttgccgatcagcacagagcaatcgcgtaatagcaggtatttatcgaaatcgccatcaacttggactgttcaggaacgactatcagccgcttatttgccgtcgttctttagttgcatcaatcatacctagtttagcaagcaaaaaaggtcaacgtacgaaaatcgcacattgaccttttaaaattattaagttttaactttgtatcacccacacggggatcgaacccgtaactccgccttgagagggcgacgtcttaaccaatttgaccagtgggcaatagtaacgcacatgtattagtttacgttactatgatggattttgtcaatcaatatttcgaattattcataagaaagttcaattaaatataccgattcgcgtggaatatgcgacgtcgtaacccagacatcatgatatcccggaatatcaccacgcgtctgctggtagaaataatctaacagctcgccatttttggcaacgaattccggcgccaaccgattaaccattaatttactgtctggaaaataaaaatcagaatcagcgatcttcaaattatcgggaatcgtaatcgaaatcgcatttgaatagagtggcatccgtgttttgatcaattcaggatgatgattgatcttagacaaaacatagtacaaagtatcagaattgctagccatcttatcgcttccttattctctcttgtcttaccattattgtcattttagcagaaa

SEQ ID NO: 1846 - DNA, 1363 bp, Unknown
  gut microbiota DNA sequence
tcattgaaagccattgagcagtaagctgcgccacgatccgtatggatcattggctgagcgtctggttctactttgaaggcacgcttaaaggcttcgatcgctgatgcggccgtttcagtagccgaaatgttgtagctcaaaacatagcgaccatatagatccatcactacatgcacgcgcgccttccttacctgctcattaccatacacaacttcggtagtatcagtcacccaaacctcattcttactctgacgatcaaattgctcattaagtaagttgtcattgatgtattcctcgtgacgtttaatccgattatgcttcttcttacggatatttgccttgatcccgtgatttcgcatgcagttagtaacccgctttaagccggccttgaaatccaatttattttcaaaagctagttgcgtcgtcatgcctaaataacccaaggtccacttatgctttttttccaattccaaaatggctttaagtaattctgcttgttcatcatcatggatattggcctttcgataaatccacttgtagtaagcatctcgagtaatacctgcgatctcgcttaaagtgctgattggccacccgtactcttcatttagttctttgatggcttgttgtttgaagaacttttcgcctcccgattgcgaatttctattattttttttgcgaaagcgacctccatctcattccgtttcacttcggccttcaatagccgattctccgctcttaatttatctagttctgtccactcggctttgggcttagccttaccccgccgatcacgaagtgattgcgggtcattaccactcttacgatatttctgataccagccatagacttgttggtaactcacgtgatacttatctacagcccaactgtaattaacatcgtgcttgattaagtcttcaataatcgataatcgttcttcaaaagtagttttgcgtcctggcataattgaatctcgctttctcggcgtataagccttcagttttgattcattatactggataatccattgtgataattgccaatcggattttaaaccatgctttaaagcaaatttttctaaggtatccgttgaatgctcaaattccacaactaatttgcgcttaaactcaacggaataaactttattatggtgagcactttcaagtcctctcattccctggtatttgtacattctcttccatcttctgatggtgtgtgcgttgacgcaatattcctgagctaatctttcaatagattctgtttgagctttcttgataataattaatttttgctgaactgaaaatttggctcgtcttcccataattaaaaacaccctccaagtatcagacgaattttctatttcata

SEQ ID NO: 1847 - DNA, 76736 bp, Unknown
  gut microbiota DNA sequence
atacacctgttcccatgccgaacacagaagttaagcttcaacgcgccgaaagtagttgggggatcgctccctgcgaggatagggcattgccacgcatcatgctgacttagctcagttggcagagcaacgcactagtaatgcgtaggtcgaaggttcgaatcctttagtcagcataattaaaacttacaaagtttattaatccttgatatatcaacgttttacgaagatgtattagggattatttttgtttatttaagaatgttatgcacacggctgtgcacacagaaaaactgtgtgcatgaccttacatcgggaaaaggttgtatatactgatttaatgggctttacgcccattttttttgtgtgcattttggtgatttcaacatgtaaaaacgattaatgatgttacattatcatcagaacttgtttaatcagtcatttaaattaggaaattcttcagtgtcaaaaatttgctgaagttggtcagcgtcttgaatgatgtcatagtaatagccgtgttggttattccaggccatgattgcagaaagcttaccgaaagtaaaccaaatctggctgttagaactgtcggcatctgtcattaccaatttgagaatagtttttaaaactacttcctgaaattcgctgtctgctcgctggcggttgatgatctgatgccccaagtcagaagcttcatttgagattgatcgtaagaaatagaatggtgttgtattgaattcgttgatggagaaacttgattggtcaaccattgtcattattatctgttcaactaagtcatatttatcccgataatgcaggtaaaaggtgttgcgattaatcagcgccttgttaacaatgtcggttaccgtaattttactgaatgtcttctttaataggaggtcagctagtgcttgttgaatttctcgctgggtgcgtaattttcttaaatccgccactttatcaccactttctaaacactgtcgctttaattggcagtgctattttattatctatagtttattaaaattatgctgactataatttagaaagtcaataaagaaagaggagagagtatgggaaaactattaaagaaaatcggccagtgtatggccaaacacaagtgggccgcaattattatatggttagtagcattactcggcttcggaactatcgtagctaagttaggttccaactacaatgagtcactatccatctcaggaattccatcaactgaaattcaatcaaccttaaagaaggaatttcaccaggacactgatcatggaacccttcaggttgtaataaaaaccaaagataagaaaggattattgcaaccaaaaacagaacaggcaattaatagcgccgtaactaaggcaaagaagaaaccacacgtagcgtctgttactaacccttatcaggaacaaaagtttagcaaagatctgacgactacttacgcaacggtaacctatgaccagaagacaaattcggttactccagcgacaatccataagacgcaacaagctttcaaaacattagatgaccagaaaggtgttgaagtagaatacaccggaaccgtttcaattcacccgatgagggttaatgaaattgccgaactgattggtgtcgcaatcgcttttgtcttcatgatggttctctttcgttcctttatcacggctggcttaccaatcattagtgcggttaccggcttggcactgggtcttatagttatcggaattggttctaactactttgagaccgcatcagtcgcccagagtttggcgatgatccttagcctagcctgtgggattgattacgctctcttcatcatcaaccgttatcggactaatcgtgcgacacaaaatgattaccttacagctcttggtgatgccatgggaactgcaggtagttcagtactatttgcaggaatcacagtcattattgcagtatcgggcttaagtctggttggtattgacttcttgacgcaaatgggactagctgctgctgttggggtggcttttgcgatcttatcagcaatgactctgttaccagcactgatttcgttagctcatcggcatattaaaccagcaaaagaagaaccacatcaccgcaagaacaaaagtgggatagttgaacatacgattatcaagcacccgtttgtcactgcgattgccagtgtgctggttcttatagcatttgccattccgtctggtcatatgagattgggaatgccttataatggcgcattaccaactaatcagactgagcgaaaggcttatgatattctgtccgataagtttggcgagggaatcaatggtcaattaattgttgttgccaagttagacaagaatgccagtccgcaggaaaaacaacagacagtcatgaagatcaccgatcatctgtccaatatgaagtacgtcaagatggcgacaccggggatgatcagtggcggaggtaaagttggctctggtcaatccggaatgcaacaaggccagcaacctcaacctggtcaaatgaataattctcagcaacctggtagtaccacaaatgctgctcaacaatccgctaaacagaagcaaatggctggtcaaggacagcccggtcagcaagcaagtgccgctcagcaacagatggtgcttcagcagtcaggtggtaagctacccgacggaaactatgctgtcttcatggtgatccctacccatggacctgaatcagttaagactgataagttagctcacaatataaagaaatattccaagacaactgaagatgagatgaataccaaactcattctcacgggatccaacgctatcaatatcgatatcgttcaaaagctaaaccatgccattccaatatttgctggaattgttatggcactggcctttgtcttaatgatgttagttttccgttccttcattgtcccgctagttgctatggctggctttggaatgtcactcttggcatcatttggtgccttgaccgctgttatgcaagatgccgttatgcacactgttttcggtattagtaagggagcaccgattattgctttcttaccagtgattgcaattggaatcttatttggtctggcaatggactatgaagttttcctagtatcacggattcgggagatttacctgttaactggggatactactgaggcagttcgcatcggtatgcgcgaaaacgctaaggttatcattaccgctgggttaattatgatttccgtattcggtagttttgccgttactactaacccaactagcaagtcaatcggattagcactagcctttggggtcttctttgatgcctttattgtccgattgatctttgtaccagcaatgatcaagctttgtggtaagtggaactggatcttcccagggatgcggacaagcaagatcgaacaacaaaaacgtgaaaaatagaaaggataaattaatatgactgaagaatttataaaattcaataatcattggtcgtcacagaaattcagtaagaatatgttacaagacgccctcgtcaaacatgttttagggttagttaattaccggatggccgatgtcggtgaagtcttagaggtaaacgctaatttgaagaatggtgacgaacagacctggatcagcgcctgggctacgatggcaaatcgtttgcaggagcgggcgatacaatacgaacaagctaacaagctggtcagtgcaggtagtgcataccttcgtgcttcaacctattggcgagttgctttgatgtacttcggagatgttgtggatccgcgaatcagacagtattgtagacttagccagggttgctatgataagtcaatgaaactttccgggtatcccggcaaagcaattgaaattccttatgaaaatacgactctgccagggcactattttcagtcaccacacgctaacggaaagtcgccactgctgattgtcgttcctggtcgtgatacttgggctgatgatacacgttgggtaacagacgctgcaattaagcgtggcattaatgctttgacctttgatggcccaggtcagggaatgacccttcgacttcaggggttaccattccgatctgattttgaaaacgtcatgaaacctgtcttagactttgctgaggaactatctgacgtggattcatcacgaattggcgtgatgggaatgagctttggtggtttccaggttccccgggcagcagcttttgataagcgaatcaagatatgtattgctgatcctggtaatattgcttggggtaaaatgattggacagcgtttgaataagatcctagccttaccaaagagattgcgaccagcaatgttggaatacatgcttaaagactatacctggaagcatggttgctctgaaaaagaattattgccggagttagctaaatatgacaatagcgatatcattgatcaaattcaatccaaagtattggtgctgaatggggccgctgagattaatccagaggctgctaaggaattctataatcagctaacctgtccgaaggattacttgttttttgatgaggattcaacagctcaacagcacacacagatgggtggttatgctccggcgagtgaaatgattttcaactggattgaagacaacttataagtggggcgtgttaaatgaaactttgcatttttggtgcaaccggacggaccggagaagaactaattctccagtctttagaaaagaaatattcagttattgcctatgttcgtcatccagataagttaacccatcgtgaccaaataacggtggtaactggtgaattaaacgacattgataaaatgacgttggctatgaaaggttgtgatgcggttttagtggcgcttggtaatccggtttctaatagcagtggaaaattgtttgctcttgctattccaaacattattgaagcaatggataaagcaggagttaaacgcctaattagcctgtcagcattaggtgttggtgctacttatgaaaatacccgttatccatatcggatgggggctaaaggatttttaaagggaaattttgctgatcatgaggctggtgaaaagcagttaccgtcttctgatctcgattggacgactattcatcccggtccactatttaacggagaaagaagtgaaaatccgctggttagggatgcagcatctggctacaaaatgccaggagcaccgcgtactaaccgagcagacgtggctaaggtgatgttgcagattattgatgacccacagacctacatgaagcaacttatcatgtgttctaagcaagatgattaagatgattgttacgtttaatagtgttcaacactgaaataaaagtagttaaactacaaaatcctcgaccggttttggtcggggattttttttattattagaaaatctatttaattgttgaaaaaaggatcaagttctttttgggcgtttactatagcattaatgtatttatcaccggcggcgataatcgattgtcgaacgtccgcaattggcttttctgagttagttaatggctggtgtgcataccattcgggaccatgtgaaatattctcgaacacatcttcgttttcgtattcaatgattgacgtcatgaggtcgtaggctttctttccctcatggcctgtttcatttaagaagtcttgtaatagaggtggtagtgttgaattaataaaaatcgttaattgcttatccagttttttggtttccttatctttgaagaaggaatggtgttgcttttcccacttatcagatagctcatagtacagataccacttagcagattgccactcctcaccaacgtctgccacgtcaatatcctggaatttggaatgatcatattttgctgctatacgtgtatatggcaaatattcatagcaggattggtcaattaaatctttattggattcacttaataaatcaattccaatattgaaaagtgatcttaataatggatctaagtcgtttcctgtgccccaaattaactcatagactgaggaaaagtttagattatctacaacatcatgaattatttgagaatttaataagtaggggttcctacttttaattctcctattatgcataacgttagataataattgttcgttaccgttagaaatttgaaacctggttttctttaattgcttctttttttgtagaattcgcttactgataagactatagatgtgctcagtaaatgtttgaatatcgtcagacatataaccctttcttttcttttgatagtggtagaaaatatctcaaaaatatttatacagtcactacttctaccactaaaatttattctactataaagatgatcaaaaggaaagctgcagcaaacttttgatatcaatcatttaattccgtgaagctcagtaagtagtgaattgatagcctatactaactggtcaatggttagcaagggaaaacaaaggaaactactgatatcacaacctttacggcgtgctaacgccgttgccgagctccgtcaacggcatccgccaagattgccgtcagaacagctttcgtggatgatgacaaaattgattgggctggtgtagaaggcgcgtggaatcaatgattgttgatcctttacagggcaaacatattaaacgggtaaatcgaatagggataacagttaactgcccttactgctagtccttggacggttacccagaaaggatgagaagcgatgtcagatgacaataaattgggcattagtggtaacggagcacagttatctatgtattcgtttcggcacacattatgtactaagctggctaataagccgggcatgtcttatccgtgggcagccgaacgaatgggtaatagtttggccatctttatgcgggtttacgttaaagcggatcgcgatattaaccgcaaaatgatggataactggatggcataggatgcacacagaaatgcacacgattacctagagttgccgtctagtttgttgatatataagtaacgagttgactagaacctaccagcttctagtcagcactaacttaaaaagccgttagcagcaattatttgttgctaacggctttttgttttttgctacattaaacgaaggtagtactgagctgccttagttaagctaaaagtcaaaaaagcctgctaccggttttatttcggtaagcaggctttatcgtttcaattacactaaatacaactggagctgggatagtatcataatttttggttatttccattcaaaaacggggtgttggcgatcaactacgccgctttgggtttcaacatgaaaaatctgctgctgaatgttaattatggcttgactttcgataattagtgcagaaaattataatttggtcaacgacaattttgagcctataatgaaatgacagctggcactacgatgaaatcaagacaattataaaggagcttgcaaccaatgaatctggcaggaatctatcatcgtccagaaagtgaaatggcctatctatacactaaagatgtcatgcatattcgcttaaagaccgctcaagacgacatcactcaagttttgctcttgcatggtgatccatatagtctgcatagtcggccggatcttcccaaattttacaagcacccaacaccaatgaaaaaaattcactctgatggtgtgtatgattattggcaggcagctattaccgaacctaaaaagcgtctggcgtatgcttttgaattaactgatcaaaacggcagccaattgatctatgctgacaagggatttattcagccgactgatcaaaggctgctggatgatgccaatacttattttcgaatgccttattttcaaaatattgatgcctttcacgcgccaaaatgggtggaaaagacggtttggtatcagatttttccggaacgctttgccaatggtgattcgaccaacgatccgacgggcaccaagccttgggatccccaaactcatcctggtcgccaggacttttatggcggcgatctgcagggcgtgatcgatcatctggacgatttaaaaaaactgggcgttaatggactgtactttaatccgctttttaaggcgccttccaaccataagtatgatacgcaggactattatcagatcgatccgcactttggcgacgctcagctgttcaaaaaaatggtcgcgctggctcatcaaaagggaatgcgggtaatgctggatgccgtctttaatcatattggcgatcagtcgccgatgtggcaggacgttttgaaatacgggcagagttcaagatacgccgactggttccacgtcaatcagttcccagccacctataccccaactgccaactttgaatttgccaaggatgccacctatgatacgtttgactacacgccccatatgccaaagcttaatacggccaatccagcagttcagaactatcttttagacattgccaaatattgggtgcgcgagtttgatattgatgcctggcggttagacgttgccaatgagatcgatcatcatttctggcgtcggtttcataatgagatgctggcgttaaaagatgatttttatattctgggggaaatctggcattccgcgcagccatggctcaatggcgatgagtttacgggcgtgatgaactacgactatacgggatcgatcatcagctgtctgatcaaccatgagctaagcagccagggcctcgtcaatcaattaagccgtcagctgatgctttaccgtgatcagaccaatgccatgatgtttaacgtgcttgattcgcatgacacggcgcgaattatgacggtagcccatggtgatgctgctttggtcagacagacgctggcgtttactttcctgcagccggggtgtccctcgatctattatggcaccgaatacggcatgacgggcagcagcgatccagactgccgcaagccgatgaactggcacccagatgcaaaagccttggcaatgtacgattttgttcatgatctaattgagctgcggcaaaaaaactggcagctgatcgcacaggggacgctcagtttggcagctctgccggatgatcaaggcatcgtaattaatcgtcaactgcaccacaagcagctgacggcggtctttaacactggtcgcaactcattagcctgccagctggtgccgataatatcgcaaggcctgcaaaaagagcggctgcggccgaaaggattcgtgattgctattcaaggataattcggctgcggataatgaaattttggtcgttttaaggataaataaaacatcctagtctagtgttggatgattacttaacggagtagtcgttcaacactttttctatgtacagtgaggatgaagccaatgccgtggtttttgggacatgtgacgttgtaaacaaaaagccaccgcgcttggcgataactattgggtaccgaatgcggttttgactttaagccctttttgactgcgataccagccttgatgattgaatctgatctcagcaatggtttggccatttgggttttgaacgtagactggcagtcgggtcttgaactgccgctggagctgattggtttgcgtgcttaattgatcaagctgctgtttaagctgttgatcggttgaagccgccgctgaccgttttaagacgatgcgactgcttgtcacgctaactctggcgtaaagatcgtggctgagtttttttcttagcgcctgattcaattgagtaattctttcagatgagatggcagggctggattcttgatggtggtccaggattgccatcagcattgcggcaataattgccatggcaaatgctaatctgatcagtgtgcggtagttgatagtattggcatggttattgttccagcgcattttctcacctcgtgttattgactgtccttattttacgccggttgggttgctgatataacgccaaacatcgcgctttataaattaaaaattagaaaatgatgataaaaattcagaaattctgttgacaatggtggttgcgatgattattatataaacataaattaaatgcgaattagaaatcaattaaaaacgttgattaggaagagtagcttgatcagccagccaagcagaaagctgacggtagttgcgagtcagccgcgcggtcaagcgaaaatcacctatgagttgggcgtcaaaattttagtaagacgcatctggcagcacccattaccgtgccgatgaatccagtctgactgggtttgtttgaggttaagttttcagcttaacgaaaaaaggtggtggtaccacgcccatgtgacgtcctttaaatgctttgcgaaagcaggcatttaaagggcgttttttaattcgtattcaaatcagacaataaaagaggtgagtgtcatgaaagacagcgacattagcgatattaatattcaaatgcacggtacaaaacgaacaagacatgaacactcacgccggaaccattataatctgccagcgtgaggcaattaaaaatggaggaatctaattatgactgaacaacaagcaaccctgaccgacgcacaagaaaaatttgctcaagcactgtatgatgcctacaagtctggcagcccattactggaatcagaatgggaaggcgtcgttaccgatgacgatacggcctaccgcgtccaagatcgcgttacggctttgaagaaccaaaaattgggcggctacaaggtctcattaaccagtgaagaaacgcaaaagatgtttgactctgactcaccactgtatggtcaacaggttgaagaccacttcttaaagtcgccagcaacggttaagctcagtgatcgcatggcggcactggctgaagtagaactaggttttcgggctaaggaggatctgtcaccggacgactcgctggaagatctgatgaagaagacaacggtttgcggcacgcttgaggttcctgactcacgctttaaagactggttcccaagtctttccaagtataacgttatgtcagattgcgcggttggcggcctggttgtctatggtgaagaacgcgacacggataaggtctttgccacgccagaagatgcagctaaggttcatgccgagctatattttaatggcgagaagaaagatgaaggggattcctcagaagttcttggcaatccgctgaagtcgctgcaatggctggttgccaagctggctgaacaaggtaagcagtttaagaagggtcagctggtatcttccggaacgtttgtgctgccgccaaaactggctgccggcaagtgggaagccaagtttgatcatggttttggtacggttgaactgaacgttaccgattaggattatgttttccctacctgatttgatttttatagaaattgacaaaaaattagtttaagaattgtttaaaaacacaataagaattgtttaaatctattaatcgacaaaaacgtaaaaaagctgttataacgggattgggccctcgtgatagcagttttttttatttatgtaatacttgttttaaaaatagtttgcactaaaatgatgatcgaataatgataatttacatttgtaaaggagtgaaggctcatgtgtactgcagcaacctatactgctggtgaccactattttggtcggaatttggatttggaactgtcttatggtgaaaaggttacgatcacgccacgtaattttccgctgactttccgcaagatgccaacgcttgaacatcactatgccctgatcggtatggcaacaacggtcgacaactatccgctttattttgacgctactaatgaaaaaggcttgagcatggctggcttgaactacccaggcaacgccgactacaagccatacgcagaaggtaaggacaacgtatcgccatttgaattcgtatcatggattctgggccaatgcgcaacgctggctgaagctaaggttttgctggataagatcaacctggttaagatcgactttagcgaacagctgacactttcaccgctgcactggctgatggctgaaacggcctctgaaaagactttaacgattgaatgcgatcgtgatggtctgcatgtctatgacaatccagttggcgtcttgaccaacaatccgcaattcgacaagcagctgttcaacttgaacaactaccagttcttgagccctcagcagccagaaaacaagttcagccaagaccttgagctcgacaactacagccgtggcctgggaacgcggggcctgcctggcgggatggattcaatgtcgcgctttgtcaaggttgcctttaccaagcttaacgcgcctaagggagaaaccgaaaatgaaaacgtcggcaacttcttccacattctgcactcggttgaacagcaaaagaacctggatggcgtcgagaataatcaatttgaatttacgatctattcatcatgtgtcaatgccgaccgcggtatctactactacactacctacgacaacaatcagatcaatgccgttgacatgcacaaggttgacttggatggccgggaattgattgattatgatctggcaaacgaacaaaacatcaactggcaaaactaagtcttaaaaaaaccgcctggaaatatttccaagcggtttttttctgatcagcgtaattgattgcccagagcttttaaaccgtcatcattaatggctgcgtccattctgtcgatccagaccagatgaccatcaaaaagccgattgctgaggccttgcgctgctgtgcggttctgccgatcacgggcaccgcagaaaacggtcgtgggacattgaacgtgcatcagctggttggtcaggtctgcgtcatataacgactgcagcagagccagagatgattttttatcgagcggccggtctttaaaactgccttggggaagcagtcgccaccgagctgcctgccgtttcaagcgggccgttgggatttgatactgcggtttgaccagcagcagattatcaatgcggccaaacgcggtaacggcgactttaagcgcgatgacggcaccgatgccatccccaatcaacgtaaccggctgcggaacctggcgcaccagctgttcaacggcccgcgccaaggtctggtagtctaaagccgcatcgctgaattgacgataatcaatcagtcttagctgatgacgaccgactttaagctgctgccaaaatgcagatgattgttttaaatcaggcaaaacgatgaccgttcccataactagtgccaactttctatagtgttctttaagaaaaatattttaccacaaaacggcaataaaaaccggcgtgaagatcataggcgttataattgcaatatgttagattaaaagagggattcaaatgctgttttggctgttaaggcatggctggctgattttgccatttgtgttcgtctttccgctgccagccggttcgcaccagaagcgatggctgatcgttgaactgattggtttggcaggattgctgatcttattgttctggtggtggcagacggcgggaaagtcatcggtttgattggtgattttcagccatagtcaggttgatgcctgtgctttttcgcggtgagtatttcaaaatgaggtgaagattttgctgacaaaagattttaaatatccagataccaaggcccatgaatttgtaattacgcgcttaaaagaacgcggcgttgatctgcatcagctggccaagattacttttgacctgcagcagcagtttattcctgaattaacggaagctgactgctatgaggagctgctcaacgtcatgcacaaacgcgagctgctcaacaatgccatggtggcactggaactggatcgcctggcggaagaaaatcaaatcaaagaaccgctgctttcaatcatcagaaaagatgccggcgtttttggcgttgatgaggctttggcactgcagatctctgatatctatggcacgattggcgcaacgaacttcggctatctggaccgagtcaaatacggcatcatcaaaagctttgataccgatgaaaaccatatcaatacgtttattgacgatctattgggcgcgatcgtggccgcagtctgcggcaagattgcccataaatatgcctagcatgatggatcgttcgataattggccatttaacgattctggattcgatattagcagctggcggcaggagatttcactaattaaaaattcctcagcagcggcgtttaggacgattgccggtaaaaaaattaagtttttttcacgaaggtcagacctaaatcatcgatgaatgttctataattaaaaacaattctgaaattatttagggaaagagatgacgggagtggaatttatccttttgatgatcggcattggtattttggcagggatcatcagtgccgcagccggtttggcatcgctggtaacctatccttcgctgctggctatggggctaccaccggtgacggccaatgtaaccagtgccttttcgacgattgccagtggctacagctcactatttgcctcgaccaaagagctgcagggccatcaaaagcaggtaaagatcgttttgccattggttttggttggctcggtgctgggtgcctggctgttgtttgccttgcctggatcatggtttaaatatctggtgccaatctgtatcggcattggcggggtaatcctgctgtttcctcaccggcctaagcaggctcaagcaacgatgtcggccaacagtcgtatgtttggcaagtcattggtacagcgtgggttcaacatgctgtggatctttttgattggcgtctacgcgggatacttcaatgcgggtgcgggtgttttgtgtctgacgctgctttcaatcatcaaccgtcaagagagttttgccatcaacaatgccttaaaaaacgtggcaatgacagcaaccaatacgacggcctggatcgtgtttgccttggagacgccgattcgctggcactatgttttacccttgatgattggcaatgttattggtggcatcttgggcccaatcatcgtacgacacctgcctggtcgactgatgcagattctggtcgggatcggcgccttgatcttggcagtttcactaacgattcgcaatttttcataggcgttgctcagctgcagcgctttttttgaccccaagatcgtaaagaatggtaaattaagaataatcagttcaaaaggggatgcgcagatgaaaaaggatcaagcaattttgaattttgtcgatcagtggctgtcggtactgctaaaacaggatcagccgactaagacgctgttagattcagaatttgtctggcaatgtcaaaaactgcattttgatcagccaacgcttgacttggatgcggcctttccaatcgagcagccgatgacgtcgctgaccggcttgaaaaagatcatttctaaaatcaatgacaagatgatgctggggcatgcgatctatcgtcaatggcaaaattggcaggccaaactagctgactcgcaaaaagcctggctgatcgcggccctgcagcagttaaagaaactggcgctggccaatgaatccttaccatttgtgtttcatggcgtcatcgcgcatctggagctgatctctcaggctgcaccaattcaccggcaaacgtacaatggctgaagctcggtcgcaatggcaaggccgagctgcgcatcatgaatgatcagtacaagctgctgacaacgcaaaccgagaatctaaaaggtccacagctcaacgtctttttcgagaaactggccctttattttgcaaaacggcatgattttaagccgaccaacattgaaaacgaatggcagctgactttgacggcaacgaatgggcaaaaatttcagacgcgcggatattggctgaccgacgcgacgctgggtgagctggcgcaagagctgcggcagatctggaatggggatgccaagctatggctgtttgatggtctggtccacgcggaaaagatcgatcggctcacgattcgctatcatcgtcagctcaatgcctaccaagaagatggcgagccggttcagcttgattatctggaaagcatcgtaatcgaccgtgctcagcaggttttgatctatcgcaagcatctgagcgacgattgcgcaatggagcaccgttaccatattgcggatgcgatcgatgccttgctggacgtactgcagacaccggattttctggcatacgtcaatggtaatgatgacgacgtggtgtttgatccggatgaccagcgccggtatgcaattgagattcaaactgctgctggtcagacccgaatcatcaatggctcgtttgataagcaggggctgccggttgattttcccaaactggccatgataatcgaagactttttaagcttttacggtaacaatgagcttatcgatccggcactctacaatcatcaatggcggcggccgggccaatatatctattgtgacgtctgctttgaagaagatggacgcacgtattgctatcgcacggaagacgagcgtttggcagaaggcgatctggtcagggttcccgtggggcgggacaatcatttggcaattggccgaatcgaaagaatccagatcgtcgacggtcagcacgttccttatccgctgtcaaaaaccaagctgatcattggtccttatcaagctgatgaggactaggacgacagcttgatatcaacccatcagcagctgctggtgggttttaatatttgagtagttgcatcaaaattgatcaaatagcgctaaactatattttatagagaatcttttcagtcaaaaaccgctttattatgtttggaattacgtcttgaaaggaggactaatttgaaattcaacaagcagcaatgggaatggatcttttatgactgggctaattccggctatgccatgctgataacgaccgcggtttttcccatttactttaaagccgttgccttgcaaggcggcatctcttcagcggattcaacggcctattggggatatgccaatagtttcagtactttgatcattgcactgctggcgcctttgctgggagcattggccgattatccgcatgctaagcgacgctggctgaatatttttacctggctgggaatcgtgaccgccatgattttaggcagtctgcccacaaatggcacgctggcctggctatggctgatcattgtctatgtgatttccaatatggggtattctggcagcaatcttttttatgacagttttttaaccgatgtggctgatgatgagcagatggatgaagtttcttcggctgggtttggctttggctatctgggcggcgtgctctcatttgccgtttttttagtcgctgaattgacgaatggctttggtatattggatagcaatggcgtggcccgattcagtttttggctctcggccggctggtggctgctgtttgcctggccattgatgaaaaacggtcagcagcgctatggcgttccagataccgaaaatcgcattgccaacagctggcagcgcgttttgcagacgctgcggcatattaatcactatcgtcaggcattttggtttttggtggcctatttcttctttattgacggtgttgacacgatcgttaccatggctacggttatcggtgaggatctggggatcaagacgacgacgctgatgatcgtcatgctggtagtccaattgattgccgcgccgttttcaatgctgtatgcctggctggccaagaagacctcaacgcggcgggcattattgttgagtatcattgtctacatgctgatctgtctttatgccctaaagcttaagtctgccgctgatttctgggtgctggcgattttggtcggaaccagtcaaggcggtattcaggccttgagccgttcttattttggccgtttgattcccaaaagcgacagcagcgagttctttggcttttacaacattctgggcaagttttcggcaattctgggaccggttttggttggactggctacgcaatggaccggcaactcacgctggggaatcttttctttggtgattcttttcgtgatcggtctggtcatctttttgattctgccacgtctgaacgatgttaaaccagaataggtaaagttaaaaatcaaactgctggactgctgacttgcgtgaagcacgattcttcgctatactaccagtgccgtcttagctcagataggtagagcacatccatggtaaggatgaggtcggcggttcaagtccgctagacggctctatcaaacaggcaataatctacaaaggctttctgcagtttgggcagaaggcttttcttttttgatgaagccggtggtcgtttttggtaagataaaaatatagtctcgtttttgaacattgaagaaaggggaaagacatgagctttattgccactttggcgggaattcttctagccacgcagcttgtttcgcatttgttcgcgcggtggggcattcccgatgtcattgggcagatcttagtcggagtcgtggctggaccggccatgctgaattgggttcaccaaacagaaatgatcaatgagttccaagagattggcgtgatcattctgatgtttatcgctggtttggaaagcgacttgaacctgctgaagaagtaccttaagccggcagtggtcgtggccttgatggggatgattctgccggttgtggtcatgggactggcggctgatctgttcggcatgcagtggtttgagtcattgtttgtcggcgtgattttttcagctacctcagtcagcatctcggtggccgttttgcgcgagtatcagcagctcgacagcaaagagggcgcaacgattcttggtgcagcggttgccgatgatattggcggcgtgattgcgttgagcgttttgatcagcatgatgcgcggccaaggatttgatggtgagcagaacatgagtctgagtctgaccatctttttgcagctgctgttttttgtcggcacctatctgctggttaagtttttggcgccttatctgatgcatgccagtcaacgtatgctcacaattgctgcccctgcagtcgcggcaatgatcatctgtctgacgatggccgcgttggctgataaggttggcttgagcggtgccgtgggagcattctttgctggaatcgcgattggcaataccaagaccagcgaagttgtcaaccaaagcttcgtaccgcttggctatgccctgtttattccggtattttttgtaaatgtcggcttgagcatgcggctggatcattttgtcgattcattgctgtttatcatcgtcatgacgattctggcttgtctgaccaagctgcttggctgtggcggcggtgccgaaatgatgggttttgactttaacagcagctacgtgatcggcagcggcatggtcgcacgtggcgaaatggccctgattacggcacagattggctatgaagctcacctgctttctgaaaagtactattcagatgtgattacggtgatcgttttggcaacgattctggcaccgtttatcttgaaaaatgccttgcagaaggttaagcagacagcgaaaagtcaagcatgataaaaagtccccgtgcagattggcacggggactttttgaattgtcaggattctgcagtctctaaaagctgggctgcgttttgctcgatcaccgaactgacggggccagcactgatcaaagtcagctcatgcattgcacgggaggccatggtatagatcaatccaacggcacgctcagctggcagattttggtctgagacgttccaggcaatcgcagcgtcaaactccaatcctttggccagatagattggcaagacgacaatgccaactggcagcacgctgtcttggctgtcaagcagatgcacgatcgacttaaactgccggtgcagcgtttgatagacttgtttggcctgcgcgcggtccttagttaaaacggcaatcgttgcgtagcgctcatgcaaaattgcagtctgctgcaaaagcgcggtggcggcgtcggctgaatcagcagcggcaatcagtcgcggtttggcaccatgtctggtaaacgagatgatctgatcaccatctggcagtaggctcttggcaaaatcggtaatctccatggttgatcgatagctgcgcttgagttcgatcaggttgggatgcttgaaggccagggcatcgtttagctgctgtaaaagctgaccgggcagctgaagcggtttaaagagggcctgctcgctgtcgccaagaatcgtaaacctggctttggggaaggcgtgctttagatagatcagcatagccagtgagtagtcctgcatctcatcaataaagacgtattggaaagaacgattctgcccgctgccgctcatcaagtcgcgcagatacatcagcggtgccgtatgcattagagcgatgcgatgatactcaagctgctgccgatagccaaagagcatggactgccagtcgctgtttttgactgttgcgggccggctgagctgctgcagaaatttttcgtattggctgttaaagtcgatgaagtaatcgttatagatggcatcatagacgatccggagccgctttttggccagttgataggaaagataggcatactgttcatcttcgtcggcaaaatcgtcaatggttttctgaccatacagattatgcaggccaatgacgtcttgatcgttaagctccttggcgatccaatcgcttttggcaacgtcttgaatgcgactcttcagctctttgatcaaggtgtttttggttttcaacaggcggtcggcaatcgtcatggctgctggctgtgcttgatagatcgactggatatgttcagcactgaaaaacggctgctgtctaaagttcaaatcggtaaagcagattgcatctgggtgctgctggagaaattccagatatgccttgacttgatacatgcagtcggcgccttccagataattggcaatatcaaggctgatagcggggttttgcgatcgtgtctcgtagcgttcaaacaaggattcaacgttcagtccctcaaatcggcgccttaaaaaaccttccagcgttacctgacgcatgttgcgctcacccaggctgggcagcacgtcagagatataatggctgaacaaaaggttgggactgaacaagacgatctgatcggcattgagtgcggttcggctatgataaagcagataggcgattcgctgcagaatggcggaagtcttaccggatcctgccaccccttgaaccagcagcagatcacttttggtatcacgaataatatcattttgttctttttggatcgttgccacgatattttgcatgtactggtcgttttgatggcctaaagcttcctgcagcatttgatcgccgacggtttcattagtatcaaacatgttgatgatctgaccatctttaatggtaaactgccgctttttaaccagcgtcgttgactgagtgccagccggtgtctggtattggaccttgcccagcgtaccgttgtagtagattcctgagatcggcgcgcgccagtcatagacgataaaatcggtcttgtcatcgttcattaaagaagccgtcccgatgtaaagcgattctggctctttttcaccaggatccagaatgtcgatgcggccaaaataaggcgattcccgcagctgctgcagggtctgcagctgatgacgcaagatggtctcgttttcgaccgttcgcgccaccaattgccgctgctgctcaagctcagagcgggattcggcaatgtcatcaacttcatagcggttgatcgaggcgttttcgccaaagttcttttccacggcccgcgtttcctggtgggcactgtctaaggcagcctgcgtttttttgatctgggcgtcaatctgctgaatcgtccagtcaacgcgctgctgttcaagctttcgttctgagtattcgtctgccaagctgaattcctcacttttccaaaaaattagcttaactattttagcacgtccgaacatcaattgcggctaaaccgaattttaatggcaaaatcggtgtttatggcgaaagataatggtaacattaaatggatattgaaaaaattaatgatcaacaagtaaagcggaggtgaaagtggtggaaaacctcgcgattgttgacctgggatcaaattcagctcgaatggcggtaactgaaatctctccggatgggaagtttcgggaaatcaagcgcgttaaggaaaatacgcgtctttcggaaggaatgggtcatgaaaagattctccaacccgaggcaatggaacgcacaatccaggcaatcaagcactttaagcgtcagtatcaaggcctgcccaatctgcaggtccaggcgattgcaacggcagcagtgcggcaagccaagaatcgacaagaatttcttcaacgggtcaaacaagaaaccggtctgacggtccgcgttctttccggctataaagaagcatattatgactatttaggcgtggtgcgcacccttaagctcaatcattgtctgattctggatgttggcggggccagctgtgaactggttctggtccagcatcgcaaggccagagacctgatctcgttgccgattggcgcggttaacctgtctgagcagtatcatctgggcggctacgtgcgcagtgccgatctttttaaggcccaggcagccgtctgtgatcgactcaataagattccttggctgcgctatgctactcggatgccgatcgtcttgttagggggcgccaatcgaacgctggcccggatgagtcgttcgtatcggcataaaaatcgcggctcgattcatggctatcgcttaacgtcacgagtggtctacgcgacctatcgcgagcttttgagccgcaatctggcccagcgcaagaaaatgcccggattagaaccagatcgagccgacatcattattggcggtatgctgccattagtgacgcttttggagcgcaacagcgatggccgcgttattttttcggaaagcggcgtgcgggaaggaattattaccgaatacattcagcagcgcgaaaaacggagtcaaaacgatgaaaaacaatgatcttaatcatgattggatgcatggcctctaccgcttgccaaccagccagcggcagcagattatcagtgatcagttttcattagcggatgatcagcaggccttaatgaaggagaatgccagtcagcttggcagtcagctgattgaaaactatctgaccgactaccgcttgccagaaggggtggtaaccaacctggtcgtcaatcacaagacctatgccgtgccggtggttaccgaagagccttccgtcgtagcggccgcctgcaatggtgctaatcgggcagctttaagcggcggctttacggctccggcagctgaacgggcaatgctggggcaggtggttttaaaaaacgttgcagaccctgcagcactaaacaagtggctgcttgaacatgaaatcgagatcctggcggttgccaatgccgcgcatccctcaatgcaaagacgcggtggtggcgctaaacggatcagaatcagaccggcagcaccgtttgtcagcgttgatctgatcatcggcgtaggtgaggcaatgggcgccaataccgtcaatacgatggccgaggtagtcgcccattacttaaaagagcagggctatgacgtcttaacggcaatcttgagcaacgcggcctttatgagcctgcagtcggctgcttgtcgggtcagctttaagaacctggcaacggcaacgatgaatggcgaagtcgtggcacagcggattgccgaattaagccagctggcgcaggtcgatccatatcgggcggctactcacaacaaaggaatcatgaacggcattgacgcactgatgatcgccagcggcaatgattggcgagcaatcgaaagcggcgcgtatgcctatgcagcaagcagcggtcagcttaaaggactcagtacctgggaaattgacggtgatgccttattgggccggataaaactgccattgccagtgggaacggtcggcggctcaattgggcttaaccctttgaccaggctcaactttaagatcaatggtattcattccgcgggcgaattggccagggtagctgccagtctcggtttggcacagaatctggctgcactgcgggctttagcaaccagcggcattcaggctggtcatatgcagatgcagtatcgctcgctggccgttgcggtgggcgcgacggcagctgaggttccagttctggtcaagcgtctcaaaaaactgccgcaggttaatcagaatgttgccaagcaagcacttcaagaactgagaaaggactcattatgacagaagaacaaccaattaaattgaatcaagaggcccaaagcctgttggatgccgttaatgccatctatccgcagggcagcgtctttgtccagtttgaaggtgagaaatccggctggctcagacacgatcaggcccgtcagacaacgctgcctggcggtttggtaattacggtgactgatctgacggcccctgactatactgcttcacatgagctgctgcatttattgatgcttttacgcggctttccacagattttctttcagctttcattaggcagtgaagagctggacgaacaaatgatgatcatggcaaccgatctttacgatacggtcatgcatcgggtagttacggctgagcagcgcaagcacggcttgattgacgatcagatcgaagcagagtattttaaaggcatcgaacataccctgacgcctgaatccgatcgggctgacgatgagcgaacgatgcggctgctgacgattttggatgctctggtcttttatggtaccggcgatcacctggcagaatatgaagcacggctgaccaagctttatcctgtggcagccaaggcagcagtggcaatgtatgaaaaactggtcgccaagccgatcaattcgccgtttgacttgcgtcgcaacgtcgtcaagctgtttgagctgtttgatgagcagatgacggcctgggagctgcctaagctgcacaacaaggaatttgttacgctgtcgccggttttaagcgaacggcaattgcggttgagtgttcggcaggtgtttgagattttccattccgacatgaaagatcgtaagactggcaagcgggcctacatcggcgtacggcgcaatgatggacagaactcgtttacgattccggctcctgaaaacgatgcaccggctgaattcttgaaactgtatgatgagccggttgaaaaactgctgacggatctaaacgtgccatttatcgttagaaaataactaaggaagtggtttgatggatgctaaagatcaagaattgttcgatcaggcaaagcagattgtctttttgaccggcgccggcgtttcaacggcttcgggaattccggattttcgcagtgccaatggcttatatacacagaatcacaatgccgaatattatttaagccaccgctattttgaaaccgatccggatggcttttatgaattctgcaagcaaaatctgtattttcccgatgcactgcccaatccgatccatcaaaagcaggtcgccttggcacttcaagatcgagcaacgattattacccaaaatatcgacaatctttatgaagttgaatttcaaaaacaaggtgccaagccgcgacatttaattgattttcacggcaacctttaccatgtgtattgtgaaaaatgcgggcagacggtaccagtcagtgagtatttagacagtcggctgcaccagaccgatcaagggccgctccgtcctgacattgtcttatacgatgaaggcatcaagcaggatgatattctcgattccgttcacgcgatgcaaaaggccgatctggtcgtaatcgtcggtaccagcatgcgcgtctatccatttgctggactgttggaatatcgcaatccgcaggctaaggtaatggcagtcaatcaagaaaagcttgacttcccatttccatttgagatgattcaagccgatgccaccagcttttttgccgaactgcgcgcttaaaagctactgaaggcccagcctgctgctgcaagctgagcctttcttaatctcgatgcatgattccaaggcgaaaggaatggttttgtgacccagattacgcttggcctgacgacctggtcagagcatcccgcgctgattgatggtcaacggcagacaaccacgcttaatgaatatgctcagcattttccgaccgttgaaatcgatacgtttttctatgctttgcctaaatcggcaaccgtccagaaatggctgactgaggtgccgcgcgactttcagtttatcgttaaggcgcaccggctgatgactcagcatgagaacctgaccgagcaggactcgtcattagcggaggtgtttcaaaaatatcgtgatgccatcatgccattgattgctgctggtcagctgaaatgcatcctgtttcagtttccgccgttttttgatgcacagcttgatcatatcgactatctgcggcggattcgtctactaatgggaaatctgccaatcgccgttgagtttcgaaatgccagctggtaccagccagcgattctccaaccactgaccgaattttgccgcgacctgcagcttacgctggttgctgctgatgagccgcacgataccttgaccagcgtgccgttttatctgattacgaccaatcccaagctggtaatgatcagactgcatggtcgcaatcgcgagggctgggatcatccggacaaagagtggcgaaagaaacggacgctgtatcgttattcaagccgtgaactgcagggattggcgactttgattcaaaaccttgcgccggcacctcaagaaatctgtgtcatctttaacaacaactcaggcaaagatgccgcgccaaacgctttggaactgcagcgaatcttgcatcttgagtttaagggattggcaccgcatgatcccgagcagctgaatctgttttaaaatcaagaaaaaaccgctcattttatgttaaactaaagattattaaatccgtattagaaagaagggccaacatggctgaacaaaaaccaacctactacattacgacaccaatctattatccatctggcaagctgcacatcggcaattcctacaccgaagttgcctgtgacgctgaagcccgctttaagcgtctggatggctatgacgttttcttcttgacggggactgacgaacatggtctcaagattgaagaaaaggctgaaaaactggggatggaaccccaagcctacgttgacgagatggcagccggcattaaaaaactgtggaaaaaattggaaatctccaatgataagtttattcggaccacggatgactatcatgaaaaagccgtgcaaaagatttttcaaaagtttgttgaccaaggcgacatttacaaaggtgaatacgttggctggtattccgtcgatgatgaggagtattttacggaaagtcagctggctgaggtctaccgtgacgaagccggcaacgtgattggcggtaaggcaccatctggccatgaggtggaactggtcaaagaagagtcctatttctttaagatgagcaagtacgcggactggctgatgaactactacaaggaacaccctgactttatcgagcctcatacgcggatgaacgaaatgctcaagaacttcttggaacctggtctggaagatctagccgttacgcggacctcgtttaactggggtgttaaggtaccaaatgaccctaagcacgttgtatacgtctggatcgatgccctatccaactatattacggcactgggctatggcagcgatgacgacagcctgtttaagaaatactggccagccgatgtgcacatggttggtaaagaaatcgtacggttccacaccatctactggccaatcatgctgcatgcgctgggattgccattgccaaagcacgtcattggtcacggctggttgacgatgaaagatggcaagatgagcaagtctaagggcaacgtgatctatcctgaaacactggttgatcgttatggcctggatgctacgcgctactacctgctgaaggcaatgccatttggcaacgatggcgtgttcagtccagaagattttgtcgacaaggtcaactttgatctggcaaatgacctggggaacctgcttaaccggaccgttgccatgatcaacaaataccaagatggcgtcttgaagggcgaaaatgcagcggccactgactacgatcaggacctggaagccacggcagctcatgcctttgacgaatacaaggacttgatggacaagacgcactttgctgatgcattgagcgcaatctggaagctgatctcgcgtgctaataagtacattgatgaaactacgccatggctgctggctaaagatgaaaccaaaaaagatgagctttctgacgttatgacgcacctggctaagagtctgcgcatggtagctgcaatgctgcagccgattatgacgcacgcgccaaaagaaattttggatcagctcggcctgacgcaagaagatatcgccttgactgacctgtcatttgacgacttccctgctgaagttaaggtcgtggccaaggggacgccaatcttcccacgtcgcgatgtcgaagaagaagtggcctttatcaagagtcagatgagtgccaaccaaaaggccaagggtcgcaaggcaatggctgaggctgccgaaaaggctaaggcgcaagctcagctgccagaaatgaaaaaagatattcgaatcgatgtttttgataaggttgatctgcgggttgctcaaattaaggctgctgatcatgtcaaaggcgccgacaagctgcttaagttccaactggacgatggcacggctgagggtcgccagattttgtctggaatcgcgcaatggtatccagatccaagcgtcctggtcggcaagaaggtcttgatcgttgccaacctgaagcctcgtaagatgcgtggtgagttgagtcaaggcatgatcctttctgatgaggatgctgccggcaacgttcaagtcgtaacggtaccagaaaacatgcagccagggacgacggtctgctaatggctgggttaaaacctgaattaaagatctatgattcgcatacgcatctgaatgacgatgtcttttatgatgatgtaccggcctatctggcacgagctcagcattttggcgttgttgaaatgaacatgatcggctccaatgaactgcttaatcagcgggccattgagctggcacgccaatacaagggactgcatgccgtgattggctggcatccagaagatattgcccgctttaatgcaaaagcagaagaactgctcttaaaacagctaacggattcagtcgttgtgggaatcggcgaaatcggtctggactattttaacgatgagcattcaccgcatgatgagcaaaagcgggtctttgagcgtcagctggcgattgccagagacttaaggctgccggtttcgatccattgccgtgacgccttggctgatacctatcaaatcctcaaaaacgcgcacgtggaggaatttggcggggttatgcatagctttaacggcgatgtggaatggatgcagcgctttttggatctgggcatggagatctcctacagtggcgttgtgacgttcaacagcgctaaggacgttcaagcagccatgctggcaacaccgctcgatcatctgttggtcgagaccgatgctccctacctgacgccagtgccatatcgtggtcagcgaaatgagccgggctttacgcggtttacggttgaaaaaattgctgagctgcgcgaaaaatcaccagaagatgttgccagggcaacgtatgagaatgccagtcgattatttttgaatcattaatgaaaggccttatggaaaagattaaagaagtcatcgttgtcgagggcaaggatgataccaaacaaattgctaaggccgtcaacgccgacacgtttgagacaaacgggtcggcgttgtcgtcaaaagaccttagacagttagcaaaactacaagcagcacgtggcttgatcgtttttacggatcctgattttaatggcgaacggctgcgcaagattatcagtcaagccgttccaggcgtcaagcatgccttcatcagacgtgatcagggcgtgccggatgaagcacatggcagcctaggcgttgagcatgccgatccggcagttatcaaggaagctttggcacacgtttatacccaagaaaccgcgccagcaacggtgattacgactgccatgatgcgtcaggccgatttgatgggtgacaaaaatgcccgtgctcggcgcgagcggcttgggcagctgctgggaatcggctatggaaatgccaagcagatgcaaaaacggcttaatatgttccgcattagtcaagaacagtttgaaaatgccattgaaaaaatcaatcaggaggaaaaaatcgatgagcagtaatccggaaatcggcagtctgaatcggacccgagccattatgaaagaatatggcattcacgctaaaaagggctttggtcagaattttttaacagatctcaacgtcttaaaaaatatcgttaaagcagctgctattaccaaagaagacaatgtgatcgaaatcgggcctggactgggtgctttgactgagcagctggcacaggctgctggtcaggtggtggctttagaaatcgatacggatctgctgccggttttggatgaggtgctttctccgtacgacaatgttaaagtgctcaaccaagacgtgctgaaagcagatctgccggcgctgattcaagaacagttcgctgatccgagccggccgattaaagtggttgccaatctgccttactacattaccagtccaattttaatgggcctattggaaagcccggttgcctggtcggcgatctgcgttatgatgcaaaaagaggttgctcagcgtttaacggctcagccaggaaccaaggaatacggctcgctgacgctggcgattgagtatcgcatgcaggctcggattgcattcggggtttcgcgtcacgcctttgtaccagcgcctaacgtagactcggcaatcgtggttttaacgccgcgtactcaaccgttagctgctaagccatatgacgaaggaaaattcttcggtttcgtaaagaattgttttgctcatcgtcgcaagagcctgtggaacaacctcaaacccctggctggcaaggatgctgataaacaggttgttattcagaatgtgttggcagagttaagcatctcaccgcagattcgaccagagaagttaaccttggagcagtttattactttagctaatcaacttcacgcccaaaaactactttaaaaaataaattgctttttgggatgtcttgtgataaaatttgactttttaaagattcttgccgtataatgtttctttgtgaggtgagaatacatgccaacgacaattgcaggcatcaaggaaaagcttgatgcacaggtaggccaaaaagtactggtcacggcgcaggctggtcgtaaaaaggttacccagcgtcaaggcattttaagcgagacgtatccagcaatctttatcgttaagcttaacaagcgtgaaggttcttttgatcgggtttcttacagttatgccgatctcttgactaataatatttctttgacattcgaagaagctgaataactcagtaaaagcatcgtgtttaacgcggtgcttttttgtttagcagcaagggaatccttaaggctggctttagtctttgagcaatagttgcaactcggttagccacatttgtataataattaaaattacttgtcaaaaaaggggggtatgaccttgatcataactgaaaaagctcccgccaaaatcaatctggctttggataccccgatgcgttatattgatggtctgccgcgctggaatatggtgatgaactccattgatctcgcggattacgttacaattgagacgcaccagcatcagcatcgtatcaaggtttataccgacagcagctttttgcctaatgaccagcgcaatcttgcctaccaggctgcccatattcttaaaaatcgttttcacattgatgagggcgtgacgatcaagattcaaaaacgaatcccagtggcagctggcttgggcggtggctcatcagacgcagcggctgtcttacgagcacttaatcaaggctggaatctgggactttctttaagagagcttgctcagctgtcactttcgatcgattctgacgtgccctactgcgtctacagtcagaccgcccatgtaacgggacatggcgaacaggtcgaggtattaagaccgtttccgcattactgggcagtcgtggccaagcctaagatcagcgtttcgacaccaacgattctgcggcagatcaattatgaaaagctgcagcatctggatgttgattcgttggttgactgtattcaaaacggtcgctggcaggaatcgtttgcttatatgggcaatgttttggagccggtcacgatgaatgaatatcccgagattcgtcagctcaagcagcgtatggaaaagctgggggcagacgtggttcagatgagcggcacaggtccaaccgtttttgcgctttgtcataatgagtcaagagcacgccggctgcataacagcttatgcggtttctgtcgggaagtatatttagccatgcttttatagtctaagagcgtcagacgcgttgcaatgcggtttgacgctcttttattcattttgcaattataagtaatgaacaatagctgtctttacaactattagtccatttaaaaacagtcattttcaaaattttttaaaaaatgatattctcattctatgcattattctactaaaatatattcataaattgattgcataagcatatttaagaaaacgtattcattttatattaaacagtcgttaaaccgttgattttaaaggattgacaacgcttacttaacgggttatattaagaacgtagtcaagtaagaaaacaaaggagtgactgtattatgccaagtccaattcatgtaacttcggaaattggcaagctgaagacggttatgctgcaccggcctggtcgtgaaattgaaaacattacgccagattcgatgtaccgtctgctgttcgatgacattccatatctgccaatcgcgcaagaagaacacgattactttgctcaaacgctgcgcgaccaaggcattgaagttctctatttcgaaaagctggctgctgaggcactggctgaccaagacgttaaggaagaattcgttgaccgcatggttgctgaatccggctacgcagctggtttgatccacgacgttttgaaggaatacctgttggccatgaatacgcaagacatggttaacaagatcttcgaaggggttcgtcgcgaagaaatcgatctcccacacatgacgctgcaacaagctgctgaagacactgaatggccattcgtaatggacccaatgccaaacgcatactttacgcgtgacccacaagcttcaatcggtgacggtctttccatcaaccggatgacgttcccagctcgtcagcgtgaatccttaatcactgaatacatcatcaagcaccacccacggtttgcaggtcaagtcaatgtatggcgcgaccgcaaccacgaaacgcacattgaaggtggggacgaactggtattaagcgaccacgtatttgctatcggtatttcccaacggacgactgccgatgcaatcgaagacatcgctaagaacctgttcaagaagtcaaactacgacacggtcattgccatcaagattccgcacaaccacgcaatgatgcaccttgacactgtctttacgatgatcgactacgacaagtttactgttcacccagcaatcttggacgaaaacggtcatgttgacaactgggtactgcacccaggcaaagacggcgaaattacgatggaacaccacacggacatcaaggaagtgcttaagaaggccctgaacaaggacgacattgacttgatcccaactggtaacggtgacccaatcatcgctgcccgtgaacaatggaatgacggctctaacacgctggccatcgcacctggtgaagttgttacctacaaccgtaactacgtatccaacgatctgctgcgcaagcacggcattttggttcacgaggttcgttcaagcgaattgtctcggggtcgtggtggtccacgttgcatgtcctgcccaattgttcgtgaagacctctaaaagcaggcatgcggcttgaccgcattaaaacaggcgccgatcaatgagatttggtgcagattaaaagcgaaagttggatcatcgcgatatgaattcgcaacggtacgactttcgcttttttcgattaagaattaaaataatattagacaattctcaatcatttattttttaaggtgtgtaagggttcagaggtgggcgattgagtaggagtcgaagtatttttaagttatttaagcggctttaggtttgattagtttaatgatgagtgttctagtcgatctatgaatagaaacgaggggatatttatggatactcaaaagaaaggtatcggtaagggcgaactgattgccctgatcgttagttcatgtatcggtaccggtattttcgggattaccagtgacgttgcggctgcggctgctccaggcccagctcttttagcttggctgttcgttgcctttggtttcctgatgctggtgctttctttaaacaacctgtccaacaagcggcctgacctacaaggtgggatctttgcctatgctggggaaggtttcggtccgctgggtgaatttatttctggctggtcctactggctgtcagcttggctgggtaacattgcctttgctacgatgctgatgagttcaattgggactttcattccaacttttaagggcggtcaaaacgttccatcaattattgttgcaattattttctgctggctgttaacgatcctggttaacaatggtgttgaaagtgccaccttcgtcaacatgattgggacgatctgcaagattgtgccgctgatcatcttcatcatcatcatgtttgtctgcttcaagggcggcatgtttacggctgacttctggggcaaggttgcaagcaacgccactaaaggcacgacgacgggttcggtctggactcaaatgaagggtacgctgatgactctgatctgggtatttatcgggatcgaaggggcatcagtcatggctcaccgtgctaagtcgcgttctgaagccgaacaagcttcggttatcagtttcattctgctggtaatcatctacgttctgatttcaatcctgccatacggtgcgctgacgcgggctcaactggccggcatgggtcagcctgctttgggccacgttctggaaatgacggttggccactggggcgcggtattgatcaacgttggtctgatcatctcaacgatcgtttcctggctgtcttggacgatgctgccagctgaaacgacgatgctggttgccgatgacaaggcaatgccaaaagcttggggcaaggttaactccaagaacgcgccaacgacttctttgatgatcacgggcgttttacagacgatcttcctgttctcgctgctgtttacggaaaaggcttatgaatttgcctactcgctctgtgctgccgcaattttgttctcctacctgtttgttggtctctaccagatgaagttgagttccgaacgtaaggaatggggtcaatacacggtcggtctgctttctgcgctgttcatgtttgcctgcatgttcctggctggttggcaagaagttctgctggttacgatcagctttattccaggcttctgtgtctactacgctggctgcaaggaaaacaatcacaagttctctaaggctgagctgtggacgatgggcctgattctggtattgagcgttgttgccgtcgtattggtatgcaatggcacgattaccattagctagcaatttttaacggatggtcgtcattgactgaatcaagactatgtaaaagcttaaagacgaatttaaatcgtgttggaatttctccaacacgatttttttatataaaggattgcgctgacgtacaaaattaggtaagatagtcactgttgctaaatcgtaattattaccatttatttttgtgaggtgaaaagatggatcgacgcttttggaaaatcgtggctggcttgagcttggtattggcggtgatttttggcctggcagctactgactggcatccgcagcaaaaatcacagcggccgattaaagtcgttgccagcctgaatttttatggcgaagctgcccaggccgttgcgggaaaatatggccaaactgtttccgtaatcgataatgcggcggttgacccgcatgagtatcagccggcgaccgttcaagccgagcaggttgccaaagcgaatgttgtgattttaaatggtctgggctatgatcagtggatgaatgatctggttaaggctaatcaaaatggatcacaaacggtcgttaacgtcggcagacagatcgccggccaaaagaatggtgccaacgagcatgtctggtaccgaccacagacgatgaaaaaactggcgtactatctggcaaaaaaatatgccaagcttgatcctaagcataaacaatactattatcgcaatgccaaaaaatatgtcagttcattgacagcgattgatcagcagattgaaaaatgccgtcagctggctcaaaaacaaaaagttgacgtcagcgagccggtttttgattatgccttagagaatctaggctatcagatcaatgaccgtcattttgaaaaagcaattgaagatggcaacgatccatcgccaaaggatattcagcagctgcagcaggatattcaagagcatcggatcgcattctttgttaataacaaacagtcgcagagcaagacgatcgacaacctggtcgcactggctaaagaaaatcacgttccagttcttaacgttaccgaatcccagccgaatggcaaaacctatcggcaatggatgttggggcagtatcggcagctctatcgaatcctacagcgaggtgaatgatcatttctcttattacagttaaaaacctgactttagcttatggtgataagaatatcgttgacgacttaagcttttctttggcgcctggcgattttctggtcgtgattggtgataacggcgtcggcaagaccacgctggtaagatcgcttttgggacagctcaagcccaaaaaaggcgtgattgagatgcctgacaaactgaagatcggctatgttcctcagtttcgcaatctggatgaagaatatcccttatcgattaaagactttgtcgctttaaatgccggcaagagtctgcgcccatggctgaatcaaaaagaacgccagcagctgcaccatattttagagctgacggatctgacacgcattcaggatcgcttgttggggcaggcttcgggcggtgaaaagcagcgcgcctacctggcacaggcactgcttggcaatccgcggcttttgatcttggatgagtcaacagccagtctcgataatgaaatgaaatatgagcttttagacttggtagccaagctgcaaaagcagggactcagcgtcatctttattacgcatgactgggatctggctcgcagttacggcacgcgctatctaaagatgatgccggatagctatcagaccggatcgattgaagaattccgacagggggttaaaaatgtttgagttgagctttatgcgcaatgcgtttatggccggcacgtttatcgccattgtcagcgggacgattggcgtttttgtgatggcacgcagcatgtcttttctgacgcacacactgtcagaaatcgggtttgctggggcttcatttgcggtttttgcagggtggccggcattaaacgggatgcttttgttcaccatgcttagctcggtcttagtgggtcagatgagcattaaggaatctcgccgcgaagctgttatcagcgcggtctcagctctttttatcggcttagggatcttgtttttgtcgctttccagtcaaacggccagctcagccaccagcatcctgtttggcagcgtggttgggatcagcaggcaggaggtctggcagctggtgggcctgtcgcttttggtgatggtggtcgtgatgattggctaccgccagctgaagtttgattcgtttgatgctgtcggtgcgcgggttaacggcatcaacagcacactgatctcggtcgtctttttgcttttgctggcattaagcgtcagtgtggcggctcagatcgttggttcgctgctgatctttattctgctgacgctgcctgctgccagtgccaagtattttacgcatggcgtggccaagatgatcgttttagcaatcctgtttgccatgctgggaacctggctgggattgtatctgggatatttgaccaactggccggtgagtttctttattgcagtgattgaagtagtgatctatgtgactgccttgatttttcagcatttggtcaatgattagcagaaagtgttaaaataaaacacggctcaagctttgggcggtgttttttattttcggtcgcatcagccatccgctggcaatctaagtccggaatttctcttttttgcttgattaaatcggttaatccttttaggtggcgctgtcatcgtgattgtttgccgaaacagctcttaagattctgaataaaattgcggtaaaagacgaactattatgttatgatttgaaggtatcaataattattagctcaagtaaaagagggaaatcacatgaaagtcagacgcagtaatcgcttggttgatatgacgcgctatttgatggaacatccacggacgctggtttcattgaagttttttggcgaacgttacggctcggccaagtcatcaatcagtgaggatctaagcatcattcggcggacgctgcacacttggggcgtcggtcgtctggaaaccctgcctggtgccagtggcggggcccgtttgacgctgctctactctgaagaaaatgctgcgcaggtcattgatgatctggttaaggcagttgacgatgacagccggctcttaccaggtggctatgtctatctatcggatcttttgggacggccggacgtgcttcgcgaagtcggccgtttgattgcgactcaatatgttgacgatgacgttgacgtggtaatgacggtcgagacgaaaggaattccgattgctcaaagcgtagcgatgtatctgaacaagccatttgtaatcgtacgtaacagctctcacattacggaaggctcaacggtcagcgtcaattacgtctcgggttcgtcacagcggatcaaaaaaatggagctttcacggcggacgcttaaagaaggtgccaacgtaatcgtcgtggatgactttatgaagggtggcggtacgctgaacgggatgaagtcgctgattgaagaattcggtgctcatctggtcggcatgacggtctttgcagagggacaattcagtggtcagcgcttggttgacggctgcacttcattgatcaaggttcaggccgttgacgatacgaccaataaaaaaatcactgctcagccaggcagctatatggaagccgtatttggcaataaaaaggagaaataaataaaaatgacgcaacgcaatgcaattattctcgcggccggtaaaggtacgcggatgaagtccaagctttataaagtgttgcaccaagtgtgtggcaaaacgatggttgaacatgtcttaggtcagctggaagaagctaagatcgacaacatcgtgacggtggttggctatggtgccgaaaccgttgagcagacgctgggcaatcggaccaaatatgctttgcaaaaacagcagctggggactggtcatgcggttatgcagactgaatcgctgctgggtgatcaagaaggcgagacgctgatcgtcagtggggatacgcctttgtttactgccgcaaccttcaacaagatgtttgaataccatgagcagcgtcatgcggcagttaccattctgacttcagtggcacctgatccaactggctatggccgcatcgttcgcaatgacgtggggatcgttgagcggatcgttgaacaaaaagatgccacgcatgaagaacaggaaattcatgaaatcaatactggtgtctactgctttgacaatcaaaagctgttccaggcccttaagctgatcaataatgacaatgcccaaggcgagtactacttgacggatgtcatcggcattttaaagaaccatggcgaaatcgtcacggcttatcgaatggctgactttgacgaatcaatgggggtcaatgatcgcgttgccttggcgcgggccaacaagatcatgcgtaagcggatcaacacccgcttgatgaaagacggcgtcactatggttgatccagaaaccacttatatcgatgccgacgttaaggtgggccgcgacacggtaattgaaggcaacgttgtgatcaaaggcaataccacgattggcagcgactgctttatcggcgctcactcagtcatcaaggattcagttctgcatgatgacgtcaaggtctatgcctcaacgctggaagaagcggaaatgcacaccggatcagacgttggccccaacagtcatctgcgtcctcaggctgagatcggcaagggtgtccatatcggcaacttctgtgagatcaagaaagcctacattggcgaaaataccaagattggtcatttgagctatgttggcgatgctactctgggtaagaacatcaacatcggctgtggcgtggtctttgtcaactatgatggctccaagaagcatcacaccaacgttggcgatcatgcctttattggcagcaactctaacattgtggctcctgtcaatattgctgaagactcgtttgttgcggctgggtctacgattacggacagcacggaacgttttgacatggcgattgcccgagcacggcaggtcaataaaccggattatgctaagaagcttccctggtaacagttgctttttgggctttaaatcaatatgattagagtgatagaaaaagtatgcagatttcggaggaccccatgaaagaacgttatgctgaccctaaattaaaaatctttgccttaaattccaaccgcccactggctcaaaaaattgccgatgaggtaggcgtggaattaggtaagctttcggttgaccgctttagtgatggcgaaattcaaatcaatatcgaagaaagcgtccgtggcgataatgtttatgttattcaatctacttcagctcccgtaaacgataacctgatggaactgatgatcatgatcgatgccttgcgtcgggcaagtgccaatacgatcaacgtggtcttgccttactacggctatgctcggcaagaccggaaagcgcggagccgagaaccaatcacggctaagctggttgccaatatgctgcagaattccggcgtgacgcggattgttgcccttgatctgcacgctgctcagattcaaggtttctttgacattccagtcgatcatttgatgggggcaccgcttttggctgactactttatcaatgagggcgtggctgccaatgccgttgtcgtttcgccagaccatggtggggttacgcgagcacgggccctggcagagtttctcaaggcgccgattgctatcattgataagcggcggccacggccaaacgttgccaagattatgaatatcattggggacgtcaagggcaagaaatgtatcatgattgatgacatgattgatactgccggtacgatttccaaaggtgcgcaagccttgatggatgccggtgcagaagaagtctatgcttcagctacgcatgccgttttgtcgggcccagcaattgagcgcttggacaattcaccgttaaaacaggtcgtggttacggattcgatccagctgcctgacgaaaagcagattgacaagatcgtgcaggtttccgtggctccgctgattggcgcggcaatcaagcggatcaatgaaaatcgtcctgttagtcctttgttcaacaaccgttttgaacaggctaacgaagattaaatctaatcaaaaagtcgctgtctgagcggctttttttgattttgggactaaaaggcggtccatggtataatagtcgaggcaagacgaaaaaggagcaaaaaaatgaaatttaaaactttgctgaaacggctgatgctgggcacggttacggttgcagccgggattagcctggttggctgcggcagctcgaccagtacgcagtcaagcgagtcgtcatctgagtcgtcacaatcaacgaccaagacgacggcggcttccaaggcccgcgatcaagccaataatcagattatgtctggtcagtataaggaagccttaaaaacgctgctggcggtcaagaatccagattcgcagacgcgcagcatgattaaagatctgcagaaatacttagcggctcaagatgcctataatgatcaggaatatgatgaagccgtcaacgatctcagttcggtatcatcaaattccaaaccgatgcgttcggcattcatcagtatgaagaacaaggctaagcaggctcaacaggcagcttctgccagttcctctgctcaaagcagtcaggctaactccagcagctcaagtacgacggcatcatccagctcaagttccagttcggcggtcaattcggcagcagccagtcagaccggcatggacgtaatcaatgcgtttgcggctaagatgaactttaaccagtcgagctacgggattattccagaaggcaaggatggcgacgtatatacttttgaggttcgccaaaacaacgatgataataccgttgctcatttgattggtatctatcagtacaacgctgctactggcgcagttaccaaaatcaattaaccagtctaagtaagaaggcgagaaatggcatgagtgaggaaatcattgcccgtccgttgattacgatcaccaatatcatctggagctttaatcggcagacgcatgagatgcagctgcttttgatcaagcggtctgaagcaccatttaaagatgcctgggcgctgccggaaacgctgctgcggagtacggaaagtgccgatgatgccgcattgcgcttgatcaaggataaaatcgggcttgaggttcggtcaacggcaacggaacaattggcaacgtttaccgcgccgcaccgatcagtcggtgagcgggcattggcgttggcgtacatgacttttttgccggcaatgcctaagcttaagccgggatatggtgccgttgccgccgaatggtttgcttttgagaattttggtcatcattacttattgagtgatggcaggcatcggtttgatctttcaaatacctcacaggcactggcgtttgaccatgatcaaatcgttactacggctattcagcgcattcgcaacaaattggactatcagccaacggttctgcaggtattgggacctacgtttacgcttaaagaggcacgcgaggtctatgcgccattttggcagctgacggcagatcagattgataattcaaatttccgcaagacgcaccaccatctttttaaagaggttgggacagcaacgattcgcaagcgcagcggtcgaccacccaagatatattcgttggcgagcttgccaaatccgttggaaaggagtaaagttgacaacaattaaagtcaactttacttttttttacgaaaattaaagtaatttgtacttttatttaaagaggtgagacaaatggcaaatgaagcattgctgattattgactacactaatgattttgtggctgatgacggcgcgctgacttgtggccaggctgctcaggctttagacgagcacattacacaattggcagatgattttctaaaggctggcaagtgggtctatctgccgactgacgttcatcatcaaaatgacccgtaccatcctgaaagtcggctttatccaccccacaacatcaagggaacctggggacgcgagctgtacggccggcttggcaaatggtatcagaaacaccaagatgatgagcatgtcgttttgctggataagacgcattactcatcgttttgcgggacaccgcttgatctgcggctgagggaaagaaaagttgacacggtgcatttggcgggtgtctgcacggatatctgcgttctgcacacggcgattgcggcatatgatctgaactatcaaatcgtggttcacgaaaaagccgttgcgacctttgatccggctggccaggtttgggcgatgaagcattttaagaacgttttgaacgctcagatagaagattgaaagaagtttagggagaagagaaatggcaatgtctgaagaattattgactgatctgtatgaattttcaatggcgaatggctattatgcgaccctgccgcatgatcaagaagcggtttttgacgtcttttaccgtaatgttcctgataatggtagctttgtcattgcggctgggttggctcaagtcgttgaagcgctgcagaattttcattttacggatgatgacatcagctatctgcgttcattgaatctattttcgactggctttttggactatctggccaatttaaagttttcctgcacggtccgagcaattccagaggggacgccggtctttccgcgtgaaccaatgctgacggtcaaagggccattgctgcagtgtcagctgctggagacgttcgtattgaacatcttgaatcatcagtcactgattgccactaagtcgcgacggatctgtgccgctgctgaaggccgtgcagttatggagtttggcgcgcggcgggcacaaggaccagatgcctcagtctttggcgcacgggcggcggtaatcggcgggtgtaccagtacctctaactgcctggcagctaagaagtttggcctgcaggcggctgggacgatggcacacagctggattgaaagctaccctgatgagttgacggcttttcgcgcctgggcacaggtttatccagacagtgcctcactgctggtcgacacctatgatgttttgaagagtggggtgccaaatgcaatcaaggtctttagagaattacgggctgctggtcatgagccgattggcattcggattgattctggcgacttgactcaattggcaaccaaggcccggcagatgctggatgaagctggatttgaaaatgccaagattacggcttccaatgctttggatgaaacggtgattcaagcattgctaaaagaaggcgcaccgctggacaactttggtattggcgaaaagctgatcaccagctcgacttcgccagtcttgagcggggtctacaaaatggcagcgctcaaggttgatggccaatggcagccaaagattaagctcagcaacagtcgtgagaaggttacgctgccaggcgacaaaatggtctaccggctttatcgaaaagatgcgccggaccaagcctttgccgatgtgattgcgttggctgatgaaaaactgcctgaaaagctcttggctattaatgccgatccactggcaactgatgacgagattgagctgaccgattttgttgccaagccattgcagctggaagtagtcggcgctaatgccagctcgattgagaccgatgtaatgaaactgcaggcatcgatgaagcgacaattagcacagctgcctaaggctacgcagcgcttgatcaatcctgatgtctaccaggtctacttgacgccaaagctgtttgagcttcaacagcggctgattaaagagcatcatcaaaaggctcaggcttaaaaacgaaccagttgaaaaatcttaaaccgacaaaaacgacgccgcgcaaagcagtcttattgctttgacatggcgtcgtttgtttttattggtagattgatcaggcgtttaaaacgtatttttcgatggcttcggcaacgccatcatgattattgtcgctttcggtaacaacgtcggccatctgcagcgtatgtggaatcgagttggccattgccacgccggttccggcaaactcaatcatcgactcatcgttttgcgcattgccgattgccatgacgttgtcagcggtcagattcagcttatcagtcaaggcagataaggccacgcccttgctggtctgcttgttgatcagctcgaggtagaagtcctcactgcgaacgactcggaaacgatcgctgagttcttgaggcatgttggctaaagcggcatcgattttttctttttcgtcggtcatcatggccttgccaatcgtaatcgaatcgcgcatgtggttcagctgatccatgctgcggtagcgtaatggcatggataccagattggattcataaaccgtatatgggttgatatcttggttaggcgtgtagatatagtcgctggtctcaataattgatgaaacgtcctgcttgcggcagtatgattcaaaatcaatgtagtcgtcaaaatcaaccgtgtagtgagccaaaacggtaccgtcagtcgcctgggccaaagcaccgttatagcagataacgtattcgtttgcagaatcggcgagtcccagctggttgacataggctttcacgccagtcatcggacgaccggtacataaaacgatccggacgtcgcgcttagtggcttcattgattgcggcaacggtttgtggggtgatctggcgctggtcattgattaacgtaccatcgatatcgatcgcgacaagtttaatagacataaaaatacctcctggatctttaattggcaacgacttgattgtttttaatgcagtgctgaaaggcttcatagattggctcgaaaatctcgatgtcattttgttgagtcagcatctcacgcgggaagaagaagcgctgatcgccggcttctcggcctgagacgcttgccaccagcgtgctgacctgtgacagctcagtcagttcgccatttggatagatgagctcaatttgcgtttgcggctttgagtcttgcgggttgtaggtatcgtaaggcagcttatagctggagtcgacagcggtataatagtcgacgtcaaagccggccgtggtaatcaattcacgcagcttgggcagcatgaaacgggtctgctgatcatagacggcagatttgaatggccgccggttaataaagcgctgggccagatcgcttaagattttatcgcttgaattcatccaatgaataaaataagtagtcaaaacgccatcgtcaagcgttaaatagtcattcaagtcataatgaccgttaaaaaacggcatcagcagtcgcggcatgaactcgggctggtattgacttggatgctgataaagccacttggcccgcatcagcaggtgatctaagatgacctccatcgagcgtgaaactggatgaaagtaaacctgtagatacatctgcaaccgactgagaatatagtcctcaacagcgtgcataccattgatctcaaaagcaatgccacccttgaccggccgcatcatgtgcagaacgcgatcgagatcgaacttgccgtaattggtacctgtatagtacgaatcgcgctgcagatagtccatccgatcagcatcgacttgacttgatatcatctgaaccacctgtggattttgataggtgtgatcaatcacgctggcgactttttgaggaaaatcattgccgacgcggcgcagaatgcgattgatattggttgattcactggtgatgatgcgccgcgtaatctgctcgtggtcagtgtgaaagatatgttcaaacgtatgcgagtaaggcccatgtcccagatcgtgaagcagtgccgcgcaaagggctacggggcgctcttgatcgttccacaatccatcttgaggcgcttgctgcggatagttgcgctgaaaaaggttgcagatgcggcgcgtgatctcataaacgcccagacaatggccaaaacgagaatgctcggcgccatgaaaggtcattgaagaggtgccgagctgtttgatacggcgcagtctctgaaattccggcgtgtcaatcagatcaagaatgatttgattgtcaacgataatcgtaccgtggatcgggtcacgaaagactttttcgcgcggcagctgttcatctttaaatgtcatgacgaatcctttcttagaaaaagcagttggtttaattatacaaaattattatttagcccgcattggttgagaaattaaaaacaatccgcgtataatcaaattgaaaaaatcgagcaaagggggccgatgtctatcaaatccattgtacccgttaaggtcagcttaaaaacaaaaatgactcaggatggcaaaagcgatcattatcattttgaagaagacggccaattcgttacgttggaaaatggccagcattatttacgctatgtcgagcatcaaggcagccaagccacgccggttcagtttcggttagcaccggatgagattcatctggttcgcagcggcgcgcagaagacgcattttcgctttgccaatggcagcgagcatctgacgcactatcaaacggaatatggtcggatcgccctgcgtgtcgttaccaatcgcttggatgccgatttgaatctggcagccatcgccggtcatgttgagatccgctatcagctgctgatgcaggatcaattaatcggtaactatcagattcaattgcaatttggcgcgtaatatcgtattatgtagagtagactttttgagactttttgaagggatgtgcaccagtttggatttaacccatttggatttaaaggttttcgatggccaagacaagtcggaactgtccatgatcgaagtagcgcacgctattttggcttaccatggtgaagcaatggcgttcgctgatttgaccaacgaggttcagcaatatcttggtaagagcgatgaggaaattcgggaacggctttctcagttctacacggacctgaacgtcgatggcagttttatttcccttggtgacaatacttggggcctgcgtgcatggtacccatacgaatcaatcgacgaagccacggttggcgaaaacgaagaagaagaagatcgtccaaagaagaagcgtcgcaaggtcaatgccttcttggcaggggctgacgatgacgatgacgttatcgactacgacaatgatgacccagaagatgacgatctggccgacgttgatgatgaagatgacggcgacggcgaagaagaagattacgacaacccagattacgatgaagacaatccactcgccgatgacgatgaggacaccaatctggaagatcagctctcatcagaaaactttgatgatgaagatgacgttgaagacgatgatgacgaggaataaataatacatcgctcttgactaacctgtttggtctttgtattattttacttgggctcccaagtttatcttgggacttttcgttttaaaaagctccctgtttcagtgaaatggggagctttttttgtattagagaaccggacgcagttccaaaaggagagaaataatgactaaatacattttcgtaactggtggggttgtttcatcattgggcaaagggattatcgctgcatctctgggtcgattgctgaaaaaccggggtctgaaagtggccattcaaaagtttgacccatacttgaacgtggaccctgggacgatgagcccttaccagcacggtgaggttttcgttaccgatgacggtacggaaactgatttggacttgggacactacgaacggttcattgacaacaacctcaacaagtattccaacgttacgaccggtaagatctactcagaagtattgcacaaggaacggcgcggcgactatctgggacgaaccgttcaagtaattccacatattacggatgctattaaagacaagatcaagcgggccggcgaaagtacggatgctgaaatcgtgattaccgaaatcggtgggacggttggtgatattgaatcacagccattcatggaagccattcgggaaatgaaaaaggatgccggtgccgaaaacgtactctacattcatgctacgctgattccatacctgcatgccgcgggcgaaatgaagactaaaccaactcagcacagcgttcgcgaactgcgtggtctggggattcagccaaacattttggtcgtacggacggaagcaccggttactgacagcatgcgcaaaaagattgccatgttctgtgacgttgatgaaaatgccgttatcgaatcccgcgatgttaaggtattgtacgagattccgctgaaactgcaaaaacagggcatggaccaactggtagtcgatcactttggccttgacgttccagaagccgatatgcgcgactggaccaatatgattcaccatattgaaaatggtctgaccaacacggtaacgatcgccatggttggtaagtacactgatctgcaggatgcctacatttcagttaatgaagcattgcgtcatgccggctacccagtcaatgccaaggttaagatcgatcacttcaactctgaggacatcaatgacgaaaacgttgccgaaaagctgggtaagtacgatggaatcttggtaccaggtggatttggctcacgtggggttgaaggaatgattgctgccatcaagtatgctcgtgaaaacgatgtgccatacctgggaatctgccttgggatgcagacggcctgcattgaatttgcccgcgatgtgctgggctacaaagatgccaactcaactgaatttaatccaaatactgaacataacatcattgacttgatgccggatcaagaagatgttgagaacatgggcggtacgcagcggctcggctcttacccatgcaggcttaaggcaggaaccaaagcagcagctgcctatgacaacaagacgatgattcacgaacggcaccggcaccgttatgaatttaacaacgaataccgtgaagccatggaaaaagctggtctggtgatctcgggggttaatccagatcggaacctggttgaagtcgttgaactgcctaagaacaaattcttcgtagcagctcaataccacccagagttcctgtcacgaccaaaccgtcccgaaggcttgtttgccgcattcgttaaggcagctgccgaaaatcaaaaataattagtctgtatcataaaaaaacgacgcgatcagagatggtcacgtcgctttttagactagcggcacgtaagttatgaagattgtttgaaaaggttgtaatttagcggtttattaattattattaaagctgactgttttaaaaataaagaaagattcaactaaaaacaattatcaatttgtaagcgaggaaaacacaatcatgaaaaaaatgatcattcaaggaggaaaccgactttcgggcgaagttaccatcggcggagccaagaacagtaccgtggcgttgattccggcggcaattctggccgatacgcctgttcagtttgataccgtgccggatatcttggatgttcacaatctgatgattattttggagtcaatgaatgttaagtcatcattcaagcatggcgttttaaacattgatcccactcaaatcatggaagctgaactgcccagcaaggcgatcaagagtctgcgggcttcctactacttcatgggagccctgcttggccgttttcaccgagcaacggtaacttttccaggtggcgacaacattggtccgcggccaatcgaccagcatttgaaggctttcaaggctttaggcgccaacgtcagcgagtcgggcggcaccgttaagatggacgcgccaaacggactgcatggcacgcggatctttatggatatggtttcggtcggcgctacgatcaacgcggttttagcagcggtgagagcccaaggaaccacgatcatcgaaaatgccgcgcgcgaaccagaaatcgttgacctggcaaccttcttaaacaatatgggagctaagattcgtggggttgggaccgacacgattcggattaccggtgtcgatacgctgcagtcaatgaacacgcatacgatcattgccgaccggatcgaaactgggacttatctgtcattagcagctgcgatgggggatggggtcatgttaaacaacgtgattcccgagcacttggaggcttacaccagcaagctgatcgacatgggcgttgacttgcagatcgatagtgataagatctatgttcccaaaacggatcatctaaagccaatcagcgtcaagacgatgccttatcctggttttgccactgatctgcagcagccattgacgccactgctttctaaagcggctggtgaaagcacgattgttgatacgatctatccaaagcgggtcaaacacatcccagaactgcagaagatgggaatggatattgaggcacaggatggtcggatcgtggttcgccatactgaaaagctgcatggcgctgatgtcaaggctggcgagattcgtgccggggcctcattgatgattgccggattgatggctgatggcgaaacggttattcatgacgcggaccacatcctgcgcggctatgaccgagttgtttggaaactcaaccggctgaatgccaacgttaggattgaagaagaatagaaaatgacagagtagttgcaagttgaacaaagatatgttaatctgtgaaggttgattatctatgtttcaggcaatgattcatggcaaaaggagcgtaaaatttatgaaacaaggaattcatccagattaccacttggtagtttttgaagactcagcaactggctacaagtttatctccggttctacggctacttctcgcgaaaccgttaaatgggaagacggcaacgaatacccactgatccgggttgaagttacctcagattctcacccattctacacgggcaagcaaaagttcacgcaagccgatggtgccgtggacaagttcaacaagaagtacggcctcaagtaagccgcattttggcaaaaagtctcactgctggatttttccgcggtgggacttttgttttatcattataaaagtcgaggaaactaaatatgcatcgcaagttaaactggctgcgctggaccgttgccgtaatcctgtttgtcgttggactggctttgatttttaatcagcagatcaagtcggctttggttgacagctatcgaccgaccgttacgcggcaggctgtggttaaaaatcaaaagaaaaaggccagctatgattttgacagcgtccaggatcttagcctacaaagcgtcgcagcagcgcgggctaaaaaacaggatattaatgtaattggcgagattgccattcctgatattgatatggtactgccgattgccaaaggggtcgacaataccacattagccttggctgccggcacgatgcgcgaagacatgcagatggggaagggtaactatgccttggctggacacaatatggccaatggcagcaaaatcttgttctcaccgctttattaccatgccaaaaagggccagatgatctatttgaccgatatgaagcgggtctatgagtatcgaatctatcagcgcaagttcatcaaggcaaccgacgttcaagtggtcaatgacaccaaaaatgccatcgtcactttgattacctgtgatgataccggtaaaggacgtttgctgatcagagggaaactggtccgcagcgagaagttctctcaagcacctcaaaaagcgcaaaaagctctcagcagcaagtatacaacgggacgcgatcaagaataaaaagggatcagacgtggttatctacgcctgatctctttttgcttatgattgattttacgttgctggattaatgctgatcgtgcagctggcgctttacgacatccaaccaataaggaagcgcctcggccaagctgtcgtaggtatcttggaaacgatgcgtataccaggggtcgggaattgacgtaccagctttgcctggcaccacgtcaaaggcctgatgaatcttaaagcgatcctcttttggcgcgatggctttaagatgccgaatgttcatgtcgtccatgccgatgatcagatcagcagtggcgaaatctgcttgagtgatgggacgcgagatgagcccctcagtcggcagatgatacttatgcatgatcttaagcgcgcctggatgcgggccgttgccttcttcttcatagctggttgcggctgagtcgacttggacttgatcggccaggtgattttgggcgatcatttgtctaaacattgcctctgccattggggagcgacagatattgcccagacagacaaataagactttcataaaaaagctccttataaatggttttacagtttaattttataaaagattaagttttagtgcaaaacagcaaaatcattttattcgcctggcattaactgttatgattaagaaaatcaatttcctaaggaggagtattttatgatggcagcaattatcgctgtagtagtcgttattctgctgatcgtttggtacgtcagcatctataacggctttatcactacgcgcaatcaggttgaagaatcagccagccagatcgacgtgcagctgcagcggcgaaacgacttgattcccaacctggtcaacacggttaagggatacagcaaatatgaagccggaacgctggaaaaggtaacggctttgagaaatcagttagccggaatgaatatggaagacgatccgcaaaaaacaatggaagtctccaaccagctgagcggtactttgaaatcattgtttgccgtaagcgaagcctatccagatctaaaggccagtgctgaatatcaaaagctgatggaagaactgaccaatacggaaaacaagattgcctactcacgccagctttacaacagctgcgtacggcgctttaacgaaaagctgcaggcatttccttccaacctggtcggcaagattcatcactttacgcagtttgaatatctgcaagtaccagctgaggctcgagaaacgccaaaagttgaattttaaaaacggtttggggtaacgcatgctttatcaacagattaacatgaataagcggcggacggtctatgtggtctttggcttttgtctgctggttgcgctggtaggagctgcagttggctactggctggccggatcaaccgttgtcggcatcatcatggcattagtgattgccttgatctatgcctcagtcatgattgggcagtcaacggatgtcgtgatgaacatgaatcatgctcatgagattcattcggctgctgaatcgcctgagctttggcatgttgttgaagacatggcgatggtcgcacaggtaccgatgccgcgggtcttcattattgacgatcccagtcccaatgcctttgcaaccggcaacgatcctaaacattctgcagtggcggctacgactggcttgatgcagatgatgaatcgtgaggagctggaaggcgtaatgggacatgagatcactcacgttcgtaattatgacattcgcctgcagacgatcgcactggcactttcagctgcaatctcatttttggtcaacctggtcagcaatttttggtggctgggcggtggccgcagtgacgatgatgatgaccgtggtgtcaatatcttcggtatgctggcgtcattgctgctgattattttagcaccactggcggcggcgattgcgcagatggcactgtcacgcaatcgcgaatatctggctgatgctggatccgtagaactgacgcgtaatccacaagggatgatcagtgcactgcgcaagttggaacatgccgaaccgatgcagcaagctgatcccagcagcgcatctttatatatcactgatcctgaagaaaatgccaagcgtcatcgctggctggatcatcttttcgatacgcacccgccactggaggatcggattgcccgcttggaagaaatgtagggcttgatcaatagtcgaatcaaggctcaaggtttgcctgacgacaaccttgagccttttttgatccataaaaattcaatgcctttgctattgataaatttataaccctcgttttgtgatcgtaagggtgatataattaatcagttagactagtcggtacgaaagttcaaaaaaaaataaaagaggaaatttccatgaagatgagtttagccgagattgcaaaggcaattcgggtgcaaaatgatattgcaaaatggcaggacctagaagtaaccaatgtggcctttgacagccgtgctctggaagctggggcactgtttattccattaatgggtgagcaggatgggcacaaatacgttgccaatgcgtttgaaaatggcgcggtggcatcgctttgggccagtgaccacgatctgccgtcaactgatcagccattgctggtggttgatgatccgctgcaggcactgcaggaattaagtcaatactatctgcacaagatcaatccattcgtggttgccgtaactggcagcaatggcaagacgactaccaaggatatgacggcttcaatcttggcgacccaaatgaacgtaaccaaaacgcatgccaactttaataatgagattggcgtgccgattacgctgctcaacatgaacccaaatacggaagccgtagtggttgaaatggggatggatcgtccaggacaattagactttttgagcaagttgactacgcctgacattgcagtgatcacgatgatcggcgaggcgcatatcgaatttttcggtacgcgcgataagattgctgatgccaaaatggaaatcacgcatggcttaaaagaggacggtacgctggtatacaatggcgatgagccgctgcttaaagagcgtgccgccaagcttaagcaatacaccaagacatttggccgcgaactgggcaacgatctgtatgccaccagtgttacggccgcacctaatcatgttacgttccaggttaacgagtggccgggactgaattttgatctgccaatgggtggtgaatacaacgtcaacaacgctttggcagctatcatggtcggcaagctgctgcacgtcaaaccggaaaacatgcagcaggctttggctggcgttgaattaacggccaaccgtgctgaatggattcaaggtgatgctggtgaggcaatcttaagtgatgtctataattcgaatccaacggccgttaaacaggttatcaagacgctggctgcggtcaagaccaatggccggcatattgccgtattgggtgatatgcttgagctaggcgatgcttcggccaaactgcatgccagtctagctgaggccatctcgcatgatcagatcgatgccatttatctggttggtcaggaaatgaacaacttaaaagatcagctgatcaaagacggttatcctaaagaagccattcacagctatgcagctgaccagctggaagagttaacgagtgatttaaagtcggtcctaacggctgacgatgcaattctgatgaaggccagccacggtattcatctggaaaaggtactggcagaactggccagtgccaatgagaagtaatcataatcatgtctagtcatgattgaattttaaggagaatttatttaagtgaaatttggagaattagggttgtcaaacagcctgcttaaagccatcaaacgcagcggctatgaagaagccacgccaattcaagaacaaacgattccgatggttttaaatggtgatgacgtaattggtcaggcacaaaccgggaccgggaagacggctgcgtttggactgccgattcttgaacacattgatcctcagaattcggcaattcaagccctgatcatttcgccaacgcgtgaattggcgatccagacgcaagaagaactgtatcggctgggaaaagacaagcgggccaaggttcaggtcgtctatggtggagctgatattcgccgtcagatcaagagcctgaagcatcagccagagattctggttgggacgccaggccggctgcgggatcatattcggcggcatacggttgatttgagtcagatcaatacgctggttttggatgaggctgatgagatgctgaacatgggctttttagaagacattgaagccatcatcaacgaaacaccggcaacacggcagacgctgctgttcagcgcaacgatgccgccagaaatcaagcggatcggtatgcagtttatgaaagaacctaagaccgtacgcattcaagcccaagagctgacgaccgatctagtggatcaatactacgttcgggcacgcgattatgaaaagttcgacatcatgacgcgactgattgatgttcaagatcctgacttaacgatcgtatttggccggaccaagcgtcgcgtcgatgagctgtcgaagggcttaacggcacgcggctataatgcggctggtattcatggcgatctgacgcaggatcggcggaccaagatcatgaaacgctttaaggaaggcaagcttgatatcctggttgccaccgacgttgcggcacgtggacttgatatctcaggagttacgcatgtctacaactatgatattccatccgatcccgacagctacgttcaccggattggtcgaactggccgtgccgggcatcatggcgtttcgttgacgtttgttacgccaaatgagatggactatctgcatgagattgaaaagctgaccaaggtgcgcatgctgcctttgaagccgccaactgaagaagaagcgtttaaggggcagctggccagtgccgtcagtgagatcgatgaactgatcgcacagccatccacgcagcgctatgccgacgccgcgcaaaaactgctggaaacgcatgatgcccttgatctggcagcggccctgcttaatgatatgaccaaagaagctgccagccaggtaccggttaagattacgccagaacggccattgccacggcgcaagcgtcgtcagagcagttatcgtggcagcagctatcgccatggcaactcatcgcatcggagttatcgcggcggcaagcgtaccggtcagagcaagagtcgccgcagctatcgcgaagactcgcatggcaagggacgccgcggctttaacattcgccgtcgtggtggtcaggaacaatagacaatgattcaaggatttggaattgatttaacggaaattgcccgcgtgaagcgtgtcgttgaaaagacgcccagtttcgtcaagcgaatccttacgccgcctgaattggaacaattggcaaaattaggcggtcagcgtcgctatgaatacattgctggtcgctggtcgctaaaagaggcctttgctaaggcttggggaactgggatcggtcgtgaggtcggctttcaagacattgcgatcatcaataatcaaagcggtcggccaatcgtggttaaatcgccatttgaaggtcaagtgtgggcatcggtcagtcatacgaaagatctggtcatgactgagatcattttggaaaggacaagcgatcagaaaaatgattagcgcacaattgcgggatgccgctatggtagtcgatctaaaggcattaaagcataatatcaaacagcagcaggccgccttgccagccggcagtcgaatcctagctgtcgtcaaggctgatgcctatggacatggtgccgtaccggttgctcatgccgctaaggaagctggtgttgatggcttttgcgtggccatgcttgatgagggactcgagcttagaaatgccggtatcgatcagttgatgctggtattgggactgacgccggttcactatgcgccggttgcggctttaaacgatatctcgctgacggtgggcagcgtcaactggcttaaggaatatgctgaactggctaaaaatgagtcgttgccgcccctaaaggtccacttggcactggataccggtatgggacggatcggttttcgcgatgctgctgaactaaagcaggctttggcactggttaaccagccagcttttgtttttgaaggaatgtttacgcactttgccacggctgacgcggctgatgatacctattttaagcggcagctgggacgttggcatgactttttggctgcggttgatcaaaaaccgccttacgttcacatggccaattctgcagtcggcatgtggcatcgcgaaacgattgcagccaatacggttcggatggggatctcgatgtatggctgcaatccttctggtcatgagctgcctgattcgctggatctgcagccggtagcttcaatcgttgcaaagacgacttttgttaagtatctgcaggctggcgaatccatcagctatggcgcgacctataccgcacaaaacgatgaatgggtcgctacgctgccaattggctatgcggatggctatctgcgccggatgcagggctttaaggtcttagtggctgataaggaatgcgatatcttagggcggatttgcatggatcaaatgatgattcggctgcctgagtcaatgccaatcggaactgaggtcgttttgatgggaagttcaaaaggcaagacgctttcagcaaccgatctggccgatcatgcacacacgatcaattatgaaatcctgacgagtattacaccgcgattaatgcgacgctataaaaactaggcaggcgatgatgaatggggaagatacggattcagcgcggtgacgtttatcttgcggatctgtcgccagtgattggctcagaacaaggtggcgtgcggccagtactgattattcaaaatgatgtcggtaaccgctacagtccaacgacgatcgtagctgccattacggcccagctgacgaaaagcaccttaccgacgcatgttaagatcaaagcagccgaatcaggaatcgcccatgattcgatcatcttgcttgagcagctgcgaacgattgataagcagcgcttgaaaaagcatttaacgcgcttcgacgatcgaatcatgaaaaacgtcgaccatgcactgcacattagtttgaatctatcgtaaatcaaaaagatccagtcgctgttgactggatcttttttcatgctgaatctggttttaatagttgggatgcagatcttcgatttctggaacttcaaagcccttgcgattcagccgtttgacgattttgtcaaccaaagcctgatcggcactggccggcagcgtaaacagaatctgcttgttatgcgtctgggttgggtcaaggtttaatgagatgacgttggcaatgtcggtaaaacgggtaatttctttggctgccgttactaaagcaccgcgctcatcagggaccgttaccgttaagacataactgccagcattaatgttccaggcttcagccagcatgcgcaggacacggctgtgcgtcagaatgccataaaagtggttgtcctcgtccaaaacggcaatgtatggcagatcacgaatggtaaagaagacattgaaaaaggcggccttgattgagataaacttggttgagtttttcagcaggctggtaacgggcagatccatgtcgccatgtcgtgatttatgccgatagatgtgcatcttgtagatgttgccgcgaaaaatcgtccccgtcttgtctaaaaccggtacgcagcgaaaaccggtattttccaaaacagtcaatgcctctgccaaggtggcattttcaggcagcgtggttagttgatccttggttttgatcagagagttaaaaatcatgctattgcctccaattaagttgcagtctgtggattatctatcaacatgatagcacaagtcgtaatggtctaatcagcaaaaatagcgtgggcatttgctttttgattgatcgtcacttgcggtataataattgcactgatgctggacggggtacggctccgtgcggcctttttgcgtgtaaagaaaggtgattctaatgaaaatgatcgtaggattgggcaatattggctctcgttatgatgaaacgcggcataacagcggctttatggttgttgaacagatcgcgcgcgactatcagctgggggcctttagtcataccaaatacgaagctgtggccgccacggggatgattgacggtgaaaaagtaatgttggtcaagccaaccacgtttatgaatgattctggtcgtgccgtgaagccattgatggactactatcaagttgatctggctgatctggttgtcgttgctgatgatctggacatgccggttggccgcgttcgtttgaagacacatggcgcttctggcggccacaacggcttaaagagtatcattcaatgcctgggaaccaagaatttcaatcgggtcaagctgggaatcgatcatccccaaaacggcacggtggtcagtcatgtgctgggccgctttacgccacaggagcgccctgcttttgatcaggccgtggcggttgcggaaaaagccttaatcgactgggttcacggtgagacgtttgaccaattgatgaatcaatacaactaatcaaaaaggagctggcatagtgcggctgacggaatttatcgaatcgaccaaggattttaaaacgattctgacaacgattcgcgatcaaaaaaatcaattgattactggggttggctccgctaagacactgttgctggcggcgctgcatgaaaagctgacgcagccgcagctgatcattgtcgatagcctttatcatatgcagaagctggcaactgatctggagaacctgctgcctgatactgaaatctatcagtttccagttgaagaggtactggcagctgaagtagcgaccagttcgcctaactaccgactgcagcgggtattggccctcaatgcactgcagcagcagacccccgccattgtgattgcctcggtggcaggactgcgccgaaaattgattgcaccagcgcagtttgcccaggcctcgctgcagctgaaaccaggcatggaactggatccaactgagctgcgcgctaagctgggcgcaatgggctatcaatatcagcagatggtactaagacctggtgactttgccatgcggggctcgattattgatatctatgccttaaataccgagctgccgattcgaatcgatctttttgatactgaggttgattcgctgcgtacttttgatccggaatctcagcgcagtcaagaaaatcttgctgaagttacgattctgccagcaactgactttatcctgcccattacggaatttgaacgggttgcgcaggaaatgaccaaagagcaggctgacctgcaggcagtggttgtcgatcaggaacaaagacaagtgctcaatagtcattttgccgaactgatcacggcgctgaaaaaacatgagctgccggttgaaatgctggaatatgcggatctggtctatcctgaggcggcctcgcttttagactatctgccgccagctggcagtctgtatctggacgattggccacgtattaaagaaacgggtcagcgtctgaaaaaagacgaattgagctggctggacgaaaaaatacagcatcatgaacggggacaggccggttttctgggtcatgatccagagcagctggtggctgatgacgcccatgcccaggcctacctggcgctgtttaaaaaaggaatgggtgccaaacggtttgccgcactgactgatttaaagacgcgtcccatgcagcgcttctttggtcagatggcgcttttgaaaagtgagctgcagcgctggcaggctcagggcgaaacgattgtcttactggcacagagtcaagagcgtcgccagcagatggctaagacgatggctgagtttggcgtcaaggccgttgagacaaaacccgaccagctgttggagcatcagacgcagctgacggccatgacgctggcaaacgggtttgaatatccacaggccaatctggtcgctattactgaaaacgagatgtttgctcaggtcaaacagcgacgggtgcggccgcagaaactggctaacgcggaacggctcaaaagctacgccgacttaaagcccggtgactatgtcgttcatgtcaaccatgggatcgggatcttttccggcattaagacgatgacggttgatggagccaatcaagactatatggtgatcaactatcgcaatcacgcgcagatctttgtcccagtcacgcagctggatctggttcaaaaatacgtggccagtgaaggcaaggttcctcacgtcaatcggctgggcggaaccgagtgggccaaaaccaaagcacgcgtagccgccagagtcgaggatattgctgatgagctggttgatctttatgcagccagagaaacagaaaagggttatgcctttcctaaagacgattatctgcaggaaaagtttgaagccgagtttccttatcaagaaacgcctgatcagctgcgcagcatcaaagaaatcaaagccgacatggaaagcgagcgccccatggatcggctcttggtcggcgatgttggctatggcaagacggaagtagcgctgcgagcagtctttaaggcggttttaggcggcaagcaggtggcctttttggttccaaccacgattctggcccagcagcattatgatacgatgaagagccgctttgaaggctttccaattgagattgctatgatgtcgcgctttcgaacgcctaaacagcttaaagaaaccgaagcaggcctcaagaatggcaagattgacgtcgtagtcggcacgcaccggctgcttagcaaagacgttcagtttaatgatctgggactgctggtcattgatgaggagcagcgatttggcgtcaagcataaagaacggctcaaacagctaaaaaacaacattgacgtgttaacgctgacggccaccccgattccgcggacgctgcacatgtcaatgatgggtgtgcgtgatctgtcggtaattgaaacgccgcctgctgatcgatatccaattcaaacttatgtgatggaacaaaaccaagccgcgattcgtgatggaattctgcgcgagctgcagcggggcgggcaggtctattatctgcacaaccgcgtcaacgatattgaacgaaccgttgccgaattgcagaagctggttcctgaggccaggatcggctatattcatggcaagatgaccgaagcacagctggaaggcgtcttatatgactttattcaaggcgaggatgacgtcttggtaacgacttcaatcattgaaaccggcgtcgatattgccaacgtcaacacgctgtttgttgaaaatgccgatcgaatgggcctgtctcagctctatcagattcggggacggattggccgcagcaatcgcgttgcctatgcctattttatgtatcagccaaacaaggtgctgacggaacttggtgaaaagcggctggcggccattcgcgactttactgaactgggcagcggctttaagattgccatgcgtgacttggcgattcgcggcgcgggcaatcttttgggtaagcagcagcatggctttatcgattcggttggctatgatctgtatgccgagatgcttagcgaagccgtggctaaaaaacgtggccaggttaaaaagccgattgccaataccgaaattgacatcaacgtggaagcctatctgcctgatgaatacgttagcgactcacgccaaaagattgcgctatacaaacaggtgcgccaggcaaaatcagatcaggagctgcttgatctgcaaggcgatctgattgaccggtttggtgattatggcgagcccgttgagaatctgctgctggtaggtgagctaaagatgaatgccgatgcggcaatgctggaatcgatcaagcgtcagcgcgacaatcttgttttgaccttcaccaagaccggcagtcgtgccatcaagcctcctgaaatcatcaaggctctggcggcgacgcggtttaaggcaacgatgggtcagaccgatgatggccggctgaccgtcagattaatcattcagccgaagatgacgcaaaaagactggctcaagcagctgatcgtctgcgtacgcggcatcaatcaggcgcttaacgatgccgataatgatgccaagcatgatttaaaagacaatcaagaaaaaagtcatgatcaggaaaggaaatagataaatgcggttagacaaatttttaaaggtttctcgaatcatcaagcggcggacggttgccaaaaagattgccgatcagggacgaatcctggtcaacggcaagccggcaaaatcgtccagcagcgttaaagccggtgatgagctgaccattcagtttggcaacaaaaccgagaccgtccgaattgatcagattattgagactaccaaaaagagtgagacggatcagatgtataccatcattgatgaaaaatttgccgaggacttcagcaatccatttgacgattagcctttgatctgaagcgattgtgccggttaggctcgattaaccaaaaatgagtcagcaggtaatttaggattaggttggacagttgctaaaaaatcctgttatactttggacaataattacaaggtgaggaattctcaatgaaaggtcgcaatgtctacagccttgatacgccatatgctcagcagaaaacagctcagcaggcggcggataaggcctatgctcgaaaaatccacaagcgccgctttttagcgatgattggcataattggcgtttttgttctggtatttggcattcagatctggaaaaaccagcggcagcttggccgggtcaatgctcagattcaacagacgcaaacgcagctgaccaagcagaaaagcaagcaaaagcagctgaacagtcacattaaagagctgaatgatcctgaatatcttcaacagctgattcgttccaaatacaactacgctaaaaaaggcgaaacgatttataactttgctaattaagctaaaagcgctttaaaaatcgtgacagcgtttaattgacgatgtaagaaagcggttttggctttttttgttcgctttattgcgataattgttcacttgtaacaatgttgatttatgttatactcaaaactgtaaataaatgattaatttttaatgaggagggccagctagttcatggcaattgaagaaggagcaaaggtttcagggaagatctcaggtattactaatttcggggctttcgttgatctagacgataatcagacgggattggttcatatcagtcagatttctgatcgcttcatcaaagacattcacgacgttctgtcagtcggcgatacggtaactgtcaaggtaatgaagattggcagtgatggcaagatcgccttatcgatgaaggaagctcaacctaaggaagaacgtcaccaccatgaggagcgcgaaaaccatcgcgaacagggacacggcttccacgaacgacgtcatgatgaagaggctcatggtcatgcttacactcaagagcgccatgaacaccgtgaattcaaccatgcaccgcagcgcggcttttctggggctcgtcatcaccggcaaaatgacagcttcgacaatatgctggccagttttatgaaggaaagcgaatcacgcctgtcaacgctgaaacggcaaacggatggcaagcgtgggggccgtggcggtcgtcgtagctaaaatgaatcttcaacaacagattaagcggcgtctaacagggcaccgcttttttgaatcagctgctcccttggtagttgccgtttctggaggcgttgattcaatggtgctgctggacgtgatgcagcagctggttgatcctggacgattgatcgttgcccacgtcaaccatgaattgcgcaaacagagccagcaagaagaggcctttttaaaaagctactgtcaaaagcatcaattaaagctggcagtcagacactggccgatcaaagaacatccgcaaaccgggattgaggatgccgcgcggacaatgcgctatcacttttttgcccagacgatgcatgcacatcaggctgattttcttttgaccgcgcaccatgccaatgatcaagcagagacaatgctgatgaagatggtcaggggcggccagctgacggcactggctgggattgaagatgagcggccatttgctggtaaaacgctactcagaccgcttttgaccatttccaaggatcggctttatgagtatgccaatatgcatcagttaacctggtttgaggataataccaatcaggaccttgctttgacgcgcaatcgttttcgaaatctgatcgttcctgccatgatcaaagagaatccgcgttttttggcgcatatgacggcgtggcatgaacagttgagcgatctgctgacttttagtcaaaacagcttggcgcagcttctggcacagatgacgacggcaaatcagctgcagctggcaaagtatcgacagcagcctcagtccagtcgccggttgttaatgctgcaatggctgaaaaatcaggctgtctatgatttgacacaatcacagctcatgcagatcgaccagctgctaaacgatgacaaaaagtcgcagcagatcatgcaattgccaaatgaacactggctggtgaaagaatatgatgtttgttggcttaaaaacgcgactaaaaaggtcgataattcgcaaaaaaagtccgcagctgtggtagaattgggccaatggcatgaaattaacgatgaattgacgtttggggtctttagtaaggatcagctgcctaaagacgccattgtgctggccagattcaagctgcggcctgatgccttaccgcttagattaagaagctggcaaaaagacgatcggctgcgcttaaaaagtggcggccatcaaaaggttcggcgcgtcttgatcaacgacaaggtaccgcagcagcagcgccaggagcaactggttttgactacggctgctgagacggtgctgtgggtagttggccataagtttgcctggctggatgagtcaagcgacgctgctgaagaccaagaatgccaaatcattgtagttgcccaacgaaaatgctaaaaggagcagataaatgaacaacgatattgaacgcgtcttgtacagcactgaagagatcaatgctgctgaagatcgcctggctaagcagatcaatgccgactatgccgacaaaaagccgctggtggtttcagtactgactggcgcggcgcctttttcggttgatatgtttaaaaagatgacctgttacgcacagctggactttattgacgtttccagctattacggcggcaccgagtcgactgggacgatcaaattgattcatgacttgaaggctgatctggagggccaagacgtcttgatcatggaagatatcgtcgacactggccgcacgctgcgctatctggttgatctgttaggcgagcgtggtgccaacagcgtcaaggtatgtacgctgctggataagccagagggccgcaaagtcgaaatcgaggctgactatgttggttttgtcgttccaaacgagttcttggtcggctatggccttgactaccagggctactatcgaaacctgccatacgtaggaatcctgaagccttccgtatatagcaaatagttgatcaaataatggtcaatgatggtcaattatgctatcatttagtccatcaaaataaattaaacgttgccgttggataggaggttgttatgaacaacaatcgtaaaaataatggattcgctcataacgtgctcttctatgcgataatctttttgtgcattatgggaattgcctacttcttctttggaggaagcagtacggatacgcaaagcaaaaacgtttcccaaagcacttttgttaccgaattgaagaacaataaggttaagagcttccaacttcaaccagacggcggagtctacaagatcactggtacctaccgcaagccacagaaggtcagcggcagcgatgccgggttctcgatcgtcgggcaaaagagcagtaccacgaccagcttccaaagctcagtgttagacagcgacgtaacgctcagtcagctgcagaagtatgctgaaaagcacaacgttaccatcagcaccaaggccgaagaatccaacagtctgtggatgaacctgctgtttaccattttgccattgatcatcatggtatttttcttctacatgatgatggggcaagccagtcaaggcggtcgtggcggcgggatgatgaactttggcaagtctaaggccaagcccgccaatgccaaggaaaacaaggtccgtttctctgacgttgctggtgaagaagaagaaaagcaggaactggttgaagtcgttgaatttctgaagaatccaaagaaattcacgcggctgggggccaagattccatctggtgtgctgcttgaagggcctccaggtactggtaagacgctgctggccaaagccgttgcgggtgaagccggcgtaccattcttctcgatttcaggttctgatttcgttgagatgtttgtcggggttggtgccagccgggttcgtgacctgtttgaccaagccaagaaggccgcgccatcaatcatctttatcgacgaaatcgatgccgttggtcggcggcgtggctctggcatgggcggcggtcacgatgaacgtgaacagacgctgaaccagctgctggttgaaatggacggttttaatggtgatgaaggcgttatcgtaatggctgccaccaaccgggctgacgttttggacccagcactgctgcggccaggccgatttgaccggaagattctggtcggtgctcctgacgtcaagggtcgtgaagcaattctgcgcgttcatgcccgcaacaagccattgggaccagatgtcgacttaaaggaaattgccaagcagacgccgggattcgtgggtgccgatttggccaacctgctgaatgaggcggcattgctggctgcacggcgcaatgaaaacgagatttcagccgctgacgttgatgaagccgaagaccgcgtgatcgctggtccagccaagcgtgatcgggtcgtttcgccaaaagaacgcgaaaccgttgcctaccacgaagccggccacacgatcgttgggctggtcttaaacgatgcacgggtcgttcataaagtaacgatcgtaccacgtggccgcgccggcgggtatgcaatcatgctgccgcgtgaagaccagatgttgatgagcaagaaaaatgctgaagagcagattgctggtctgatgggtggccgggcagctgaagaaatcatcttccattcacagtcgtccggggcttccaatgactttgaacaggcaacgcagattgcgcgggccatggttacccaatacgggatgagcgacaagatcggtccggttgagctgcagagctctggacaggtttttgctggccaaggctatgatcaggcaggctactcagaacatacggctgccttggttgatgaagaaatcaagcgaatcttgaatgaaggtcatgaacaagcgcttcacatcatcgagacgcaccgtgaacagcataagctgattgccgaggcgttgctcaagtacgaaacgctgaacgaaaagcagattctgagtctgtacaagactgggaagatgccggaagccgatgttgaagctgctgaagacgaacagcatgccgcaacttttgaagagtccaagcgtgctttggaacgtcgcgaaactgaaaaagtagaggacgatcatgacaacgatgctgaatcggatcatgcttcacaaacgccagacagctcagcttcaaacgatcaaaatgaccaccatgacgatcatgatgatcaggcataattgccaattaacaggagcgtttttgaccaccggtcgccgctcctgttttattatggaatcaaaactagaaaaggtgaccaatgatggaaaacaatgactatttagtaaaaagcatgaccaaggatggaatgtttcgtgcgtatgcagtgcgtgctaccaacctggttgaaaaagctcatgagattcacgatacctggagtgccagctcggcagctttaggacgcacccttatcggcacgctgctattatcaacgtccagcttggatgaaaaagccggcatgacggttaagattcaaggcaatgggccagttggctacatcgtcgctgatggtacggctcacggcgaggttaagggctatatgaaaaacccgcacgtcaatctgccattgaacgatgctggcaagattgatgttgccggtgcgattggccgccaaggaacgctttcggtaacaacgatgacgccaggcgacaagacgccttatactggcgaggttgatctgatctcaggcgagctgggtgatgactttacctattatctggccaagtcggaacagattccctcggcagtcggcttgtcggtctttgttgaaaaagatgattcgattaaggcagctggtggatttatggtccaggtaatgcccggtgccagcgatgaggccattaccaaattggaaacggccattcaaggtatgccgagagtatcggatctgcttttggaaggtaagacgccagaagacatcctgcatctgctgttccctgatgaagaactcaagatgctgcagacgatgccggtatcatatgtctgccactgcaacaaaaatcgctttgcacatgccctggcaacgatcaaaccggctgatctaaaggaaatgattgaacaagatgaaggtgctgaaatcgtctgtcagttctgcggcaagaagtatcagtttgacaagcaggacttggaagtgatcttaaagcaagccaccagcagcgacaaggcatagtcaagcaaaatcccgcgctcatcagctgagcccgggattttttgcagttttggatatttttaacagccagctgccggtctctgattgacattttgaatctgaccactgaaaattaaggcaattgtcaaaagataggtgagcgatttgaaagacgatttgtttaaatggctgggtggactggcttttctgaataacgttggctatagctgcgtatggccggtgacgacgatctatatgcataatcagctgcatcagtcgttggttctggctggggtggttctactgtgctattccagtgccaacgtaatcggcagtattgcagcaggcagccgatttgatcgcgggcatacgtttggcttgaacttttttggccagctgattacgcttctggccgtaacgctgttgatctttatgcatggctggccaagctatcccattttgttatgtatttttggttttggcaatggctggattttaaccttgatcaattcaatgggtaccagagtcaaaaaatatcccagcgttaaggtcttcaatcagctttatctggctgaaaacatcggtctggtagtcggtacgggactcactggctttatctatgaacagggaattggctggctgtttgtgctgattgccgggatctatctggtcagtctgattatcgttggcattaagttcgccaaagttgagctgcatggtgagtgcccagtcaaacaagctgataccacatcggctgacttgactggcaagcgcaatcttttcgtaatcatcgttttgctgctcgggctggtggtcgtctgggtcatgtatgaacagtggatgagcaatctggcagtctatctggcacggttcggcatttcaacggggcgttatggcatgctttggacgatcaatggcattttgatcattatttttcagttgctgcttgactggattggccgctaccatgcgacgcttgatcttcaagtgattctgggatctttttttatggctggctcgtttatgctgctgcttttcgcggctcgctatgggcagtttgtcttggcgatggttgtgctgacgctgggcgagtcgcttttgattccaggtgtgcccgcatatgtcaatcgcttgtcgccggttgttcaaaaaggtcgcgggcaagggatggtcaatgcattttcatcgattggcaaggcgattgggccgctgtttggcggtttggtcattgaaagactgggctatctcaagttatttgcaatctgtacggttgctgatctgattgttggtatgatgatcggaatagtgctgctgattttacgtcgcagcctgcagacctatgattaaattagaattgctgagggtctggcttgctaatctggcaatgattaggctacaatcgttttgattgcaattttaaggaggatatttttgtggaatggcaaattggcaatgttacgattccaaatcaagtcgtagtagctcctatggctggagttaccaactctgcgttccgtgtcatctgtaaaaagtttggcgctggctacgtggtctgcgaaatgatttctgatcgcggcattatgtaccacaacaaaaagaccctgtcgatgctgaaggttgagccgatcgaacatccgatgggcattcagatttttggcggtacaaaggagactttggttcaagcagccaaattcatcgatgaaaataccgaagctgatgtaattgacatcaacatgggctgtccagtcaacaaagtcgttaacaccgatgccggagcaaaatggctgttggatccaaataaagtttatgaaatggtttcttatgtcgtcgatgccgttaaaaaaccagttacggtcaaaatgcggatcggctgggatgataagcacatttatgccgtcgaaaacgcattggcagccgaacgtgccggtgcccaggcaatcgccatgcatggtcggactcgcaaacagatgtatacaggtcacgcggattggaatatcctaaaagaagtggccaatgcattgacgattccgtttatgggtaatggcgacgttaaaacgccagaagatgccaaacggatgctggatgagacgggagcaaccgcagtcatgatcggccgggcagcaatgggtaatccatggatgcttaagcggacggctcattatctagaaacgggtgaactgcttccagaagctacgccagagcaaaaaattgcgatggccaaggagcatttggctggtttggtagaattaaaaggcgagcatgttggcgttcgtgagttccggggacaatcaaccttctacatcaagggaattccccgggcggccagaacaaaggcagcgttggttgaagcggaaacgcagcaggaaatgattgatattttcgatcgtttcttggaggaaacacaaaagcgggcggcacagcaagagatgcatcgtgctcaacgccaggcaaaaattgaggaggaagactagtgtcacaagaactggatcaaatgcgcgttcgtcgcgaaaagatggatgaactcaaagcagcaggaattgagccatttggccgtcgctaccatcgcgaccacttagctcaggatctgcatgaacaatttgatcagatagataaagacgagttgcttgaacaagaaaacatggtcagcattgccggccgaatgatgcgcaaacgcagcagcggtaaggcgggctttgcggatttcgttgatcggacgggcaaaattcaggtctacgcgcgcaaggatatggttggcgatgaacaataccatatctttaagcgggccgatcttggcgacttcatggggatcaaaggtgacgtcatcaagaccaacaccggtgaactgacgattcgtgcgcgtgagattacctttctgtctaaggctttgcggccactgccaaacaaatgggaaggggttaaggatccagaaaccatctatcgccagcgttatctggatctgattgccaacccagaaagctttaagcgtttccaccaacggacggcgattatcaaggcaattcgtaagtacatggatgaccatggctttaccgaggtcgaaacgccaattctgaatacccaggctggtggtgccaatgcacggccatttattacgcaccataatgccttaaacattgacatgtatctgcggattgccacggagctctacttgaagcggctgatcgtcgggggctttgaacgggtctatgaactgggacgggtctttcgtaatgaagggatggacctgcagcataatccagaatttacaacgattgaaacctatgccgcttactgggatctgtgggatgtcatggacgaaacggaagggatcattaaggcagcagccaaggtagtctctgatgatggcaagattacctatcaaggcactgagattgaccttggcggcgaatttaagcggattacgatgaacgatgccgttaaggaacagaccggcattgactttaaggaaatcaagaccgatgaagaagctcgtcagctggcggcagaaaagcacgttaagtatgaaaaatggtggtcaaagggtcatattctgagtgccttctttgacgaattcgttgaagacaccttgattcagccaacgtttatctatgagttccctgttgaggtatcgccactggctaagcggaaccaagaaaatcctgaaatggcagaccggtttgagctttacattgctggcggtgaaatgggcaatgcctttagcgaactgaacgatccaatcgaccagaagtatcgttttgaaatgcaggccaaggaaaaggctaatggtaacgatgaggccgaaccagttgatctggactatgttgaggctttggaatacgggatgccgccaacgggtggtctggggatcggtatcgaccgtttggtaatgcttttgacggatgccaagtcgattcgtgacgttattctcttcccaacgatgcgtccagaaaagactgctgatgaagaagaaaaataatatttagcacactaaaaacacgtcttgcagatctgcagcgtgtttttttatttatcgttggaattaataagtagatgagccgctgataaatcatagattgcaatctgaataacagttggtttctaatcactttttgttcgttaaataacgaatcatattgagttttatggagcactagttcgtaaacctaaaatagatttagaaagtttgaaaatagcgttgacgaacccttgggaaacctgtatagtatttattgttgtcaaagcgattggatggcagtcagctgtttggtcgttaatgatcagaaaaaaacttcttgacattactttgacaatttgatatattaattaagtcgctgatttgcttggttttgaaattaaataaatttcttcttgacaggcaattagagacttgataaaatagtaaatgttgtgattcgacaacatggtagacctttgaaaactgaatacagtttcgacgaacacaaatgtgcagggtcatcaatcattacgattgatgcaaaaacatttgcgaagtc

SEQ ID NO: 1848 - DNA, 3749 bp, Unknown
  gut microbiota DNA sequence
agccgcttcccatattgaaagttgcagtcttcgcgtaaatactgttaccaaagtggtaaacatcggatctcgatgctggaccagctgaaatttccccggtaatcggatcctttagcgtgtatgtaatagtaaaggaaaccgtttcattcagattattggtaactttaacgatgtagtaaataggattattggatacactatcagtccctttaccatagtacgtcaccgacagaccatcgctactgatgattggcgtgccatacgtgttagccgtcgtattcaatgcagcaaacagccgcaacgtcagcgcccgagctttagcaaccgtttgcgaagccgtcaaatcgtttgtagctgatgttgacgtggaagtgctgctttgtgcctgacttgccgttgacgtgctcaacgattcagacagactggcactggcatctgacgtactcgtggatgcagattggctggccgaaccagactcgctggctgctgactcagaacttgatgtcgatgcagaagttgaaatcgattttgaaactgctgactcagaaccagaagttgagctgctggttgacgtcgaagttgatgccaaactgtttgaagtactgatcgacgttgaaacagatgctgacattgaagtcgaagcggatgctgaactggaagttgattccgaagttgagccaacgacttgtgattccgcggtatcggtcgtctgctgaacctgcgtcgtatcagcagatgcattgccctgcaacagtgccgtcgttcccaacactgccccaaaagcagccaatcccttagcataggcatcgagcggcccgcttagcgcgtcatcatcaaatcccttttcaagcttaatttgattagttgaaacctcttcttttttgctgaatttcatcagcgaaaagaaccgagacagacaactcatccagccgcggtgagtcttataaagcttgaccttactcgcctctttggcttcagcatattcgcgattattcgcttttctcaatctaaacacctctcatgactactcttttcatcaaaatccattaattttgcatttatcgttttataactatttttagaaaattgacgaactgttttgaatataatacaagaggtggcctggtaatttctctcatttatccgatcttatacactctttggcaaggttatattaatcggttactacaacactttaatgcatagaaagacttattatatagcgatttgttgtttaatatagtttctttaaccaactaagtgtttacccgaattggccaaaatcgtttaaaatttggtcataatcaatcaaatgtcccctactaaatttaatttttcatttgatatttaattcacccatccgttaaaattagcaatcttagtcaagaaaaaacgttgcctcattggaactccatccataggcaacgttttcttcatatattgtatttacggtccaacaattgtcatgcaaaagctgaatccggatcagtgggctaaaatctgatatcaattattcataagttacataaaaatttatctgctcgccaaggtatctttcattattccaaccagctccacttaattaagcatccaaaattggaacagattgccacgatggattttctaacttaacctaccttcttcaattcaacatcgttttatgtcacttggaatttatcattatataaccatcttcacgaaaattgacataagtttaactatatgatacaaaaagtgttgattgaaatcttgaaataaactcatcttatacagctcttagcaaggttaaataaatagattattacgtcattaatgtgtacaaaataaagaattggtgtcgtattgtaacaaccgttcatttatataatttaccagttgatcaactaacgatacgattagtttattaaataaaagttccatcaagataagttgtgatttcaattaacttttcacttgatatttacacaagcatacgtttaaaataaatttcagtttagatgtatctgaaaggatgaatcgattatgaccgatattcgcattatcaatactaagaaccgcattcgcatggggatgatcaatgcgctgaaagaaaagccattgaatgaagttactacgaaagacattatcgaagcagctgaagtcagtcgtaaaactttctacacctactataatgaccaaaacgatctgctcttcgaaatcgaaaatgccatgatctcagatttggttgaaggcatgaagaaagaccgagaagcagttactcagcttgacgacactgctgaccaagttgaaattgccaagctggccgaccaagcctttgtcgagacagtcaaggcctgcgccaagcaccgcgaagttacccggatcttgctttctgccaatggtgacattaacttcctttccaaaatcaaaaaggccgtttataaagaactcttggcacgagcacctaaactggtcgcagccaatgacccatccgtacagaatcttaaaaaacagttgccagtccggattccgcttgactacctgtttgagatctacgtcggcttgatggtcaacattattcaacactggctgacttctgaagacccaatctcacagcgtcaggttcgcggaattatgggagctgctcagattctttcaccactgcagctattagccttcgctgacttgccagaagatttgaacgatattgaagactaccaattctaaacatacataaaagagcagccgcttaattgcagctgctccttttgttatcttaactgatcatcggctaaatcgttcaactaggccaaattatcgaaattaagtcaattaagcttttgaaattccttgctttaccgcattaacttccgaaactcagtgtatctaacatatactgtctaaactgtctctcgtcatttataataagaattaatgtaaggcttttacattaaacacttaagaaggtgataaggcaatagctgatgtgtattcctgtttcctttttaaaactttttcaagactattgactgattggcgacccagccgacaatgcttattcgcctgctgaagctcaatagtgtctagcttggtttcccatgatgatcgaacccagctcccaaacggtttgttcaaagtgattgattagaaatcgtcgagactcccataaatattttccctttctctaatcttttcctcaagctggccagatttcacttgttatactcccgcaattatgaagtctgcttcggttgataccatggaaatatcgacttcctataaccagttatttaactttcttccgcaactggcattaaccgaatttagttgagattcacaggctcgctttgccgatacctttcaaaacaagcgaaacgtacctttccttgttttaaatcctcatattgaaatgattggtgccacagttagtttcatttaccaatgagggcatgattggttggttaagtccgcttagacatcgatctcctcttagtctatacctttcgatttttatagtgaattaactatgagcggcttatctcttggttaaggtcgagaatcattttaatcaatcaggttccgtatccagcttgattgagcacctcgttgaaacatttctcgctttagcaatcagatgcaatcaaaaatcagtctataatagtaataaagactgccagctttcctgttgcctggcagtttttttgtttacccatttttaagctgctgaccggaaatgtcgttaatttgcttcgcctggtaaatcagcaaca

SEQ ID NO: 1849 - DNA, 8253 bp, Unknown
  gut microbiota DNA sequence
ccagtcccatgcccagcaataatggcatagccagctgatcaccagccatttcgccacacatggccgccttggtgttgttggcgtgagcggcgtcaatcacgtgcttgatcaggcgcaaaaaggcggggttcaatggctggtacaggtaggagacggcatcgttgccacggtcagccgcaaagcagtattgaatcaggtcgttggtcccgatactgaagaagtcgacctctttggccaattgatcggcgtacagggcagccagcggcacttcgatcatcatcccaatcttgatgttggcgcccaggcctggatgatccttttgcagctcatccttgcattcctggtagattgccttagcctgacgcagttcagccagcgtggcgatcattgggaacatgatctcaaccggaccgaattcggaggcccgaatcaaggcccgcaattgtgtcttgaagatgtccggccggtgcaggcagattcgaattgcccgatagcccaggaacggattcatttcttcaggcagcgacaggtagttcagcggcttgtcaccaccgatatccagcgtccgcacgacaaccggcttgcccttcatgccaacaacggccttcttgtaggcttcaaactgctcgtcttcggttgggagatggtcgctgctcatgtacaggaattcggaccggaacagaccgaccccatcggcaccctgcttaacggcatccgccacgtcatcgggagtcccaatgttggccgcgatctcaaagtgctggccgtcttttgaaacggatggggcgtccactaatttggcccattcggcacgctctttttcaaataccgtagccttcttttggtactcatcgatctcagcctggcttggatcaatgatgatgttgccgtgcagaccgtcaacgattaccatgtcgccactcttaaccgaactcgtaacgttttcggagcctaccacggctggaatccgcaatgtccgcgccatgattgccgcgtgactggtccggccgcccagatcggttgccagccccttgacgaatttggcatccatctgcgaggtatcggatggggtgatctccttggcaatgattacgaccggctcgctgatggaggcgatgtctggcagctgcttgcccaacagatgactcagtgcccgcttagcaacgtctttaacgtcagcggcccgttcttgcatgtacttgttgtcggtcatagcggccaggacgttggcaaaattagtcgtcacgtccgtcatggcttcttcggcggaaacgtgctgactttcaatttcatctttgatctgactcttcatttctgggtcggacagaatagcgatgtgcgcgtcaaagacttccagttcttcatcgctcaaacggttcttggcgttctgcttgatagcagccagttctgagatcgactgttcaaaagcatcctcaatccgttgatactctgcaaccggatcgttaatccgctttttttcaaaacttaaatcaggttctgcaagggtatatgttttagcaattccaataccgtcactggcggcaattcctttaatgatttgcgacatagtcttctcctcccatttctcaaagacgaatgtgatagcactcaactaaacaaaaagaggctgggatcccagtctcttcaaaaggattaaatttatagcaatagagggatgtctggatttagggttcaaattttaagtttcattgtttagtctgccaatacatcaccgccttatctacattttcataaactcttcagctacatgctctggtgtgaacccatacttctcaattaccttagagcccttaccactggcgccaaaccggtcgatacccataactttgccgtgcaggccagtaaactcataccagctttgacatgcgcccatttcaacagccattcgcttttcaatctgactcggcaaaattaattctttgtattgatcatcctgctctttaaataggttcatgcacggcattgatactactcgaacgtccttgcctttttctttaagaagtttttgcgcttgcaataccaatgaaacttcagaaccagctgcaatcaagataccatctggctgctctccttcttctttagatacaatatatgcacctttttcaaccggggcatcaatagtttcagccagaactggaagtttttgccgtgatgtaacaagcatcgttgggcgattagtcgtcttagcaattaatttccatgcagctaaggtttcatttgcatcagctggacgaaccaaatttaaatctggcattgcacgaaaactggaaagctgttcaattggttcatgagttggaccatcctcaccaaccgcaatcgagtcatgtgatccaataaaaatagatggacaatgcataatagctgccaaacgaactgctgcccgtagataatccgtaaatacaaagaacgtgcttccataagctcgattcccgccatgcagattcataccattaacagctgtagccataccaaattctcgaacaccaaagaacacatttctcccagttggattttccttggtaaagtcgccatcatctgcaagataggttttattagatgaggctaggtcagcagcaccgccccagaactgcggattatgctcagccacttcttgtaaaatctcagaactggcgactcgcgtagctacctcatcacctggtttgtagctggttgtaatgtcatccatattaagtttgcttgtcttaagccgagctgctttttccggatactctttttggtactcagcaaacattttttgccatgcgtcatagcttggcttctttgcttttactgcttcatcaaagcatttttgaatttcatcagtaaactcaaaaggtgcaaggttccagtcatagaaatcacgcattttcttgatgccctcttcaccaagaggagccccatgtacattatgagtgccggcaccaggagctccatagccaatcgtggtttttatttcaatcaaagatggcatatcagtcttcttagcggtattgatggcattaattatcgcatcaacatcagtattgccgttctcaactcgactataatcccaaccagcagcttctactcgtgccttgacattttctttcgtactcaaactaagagggccatccagagaaacatcatttgaatcataaagcacaatcagcttgtttaggcctttatcaccagcaatattaagcgcttcttcactcaacccctccatcaaatcaccatcaccaattaagctaaacgtatagtgatcgattacgttatagcctggtttattatagatagccgccatgtgcttttcagccaaagccattccgaccgacattgcaagtccttgagacaacggaccagtagttgcatccaccccagctgtccatccatattcaggatgtccaggcgttttagagcctaattgacggaactgctttatatcatcaattgttaacccaaatccattgaagtaaagcaaactatataataaagaggatccgtgtcccgctgacagaacaaagcggtctcggttcaaccacttctcatcattcggattaaaattcataactttttcccacaatgcatacgccattggtgcagcatcgatagctacaccggggtgtccactgttggctttctgaatcatatcaacacttaagaaccgtagtgcatcaactgctctcatttcttgtttttccatgattatcctccatttttgggtaaaaaaatagctacccagcaccaatgctggagccaagcagctatcaaaattggtattaaaagcctaatcactacttgttttcagcttgctttggtgacttcatcaatacactgactaagataacgacaacagtaaagccgataatcccacaagtcagagcaacagaaccaaatgatcctaatttaccaagcaagatccctggaattaggtaatctgtatcagcaaaagttgaagcagccatcttaagatcaccaagaaccggcaggatgtaaagtggtaaccaactaatcagtaatccgtttacagcagaaccgataaccgcaccacgacgaccaccaaatgcattaccataaatagcagctgcagcaccgcagaagaagtgaccaacaacacctgggataataaccgtagtgtgcataccaaccataatgaacattgaaatagtacccacaaggaaacttacaaagaaaccaagcagaacagcatttggagcatatgggaaaatgattggaacgtccaaagcaggttttgaatttggaactaacttcatagcaataccttggaaggctggaacaatttcagccaaaatcagacgaacaccttgcaaaacaacagcaaagccagctgcaaaagtaccagcttgaataaaggcataaataatgtaattagtaccagcactcaatttagtctcaacaaaatgtggtcctgcaacaattgcaagaacaatatatacaatccccatcagtaaagtgatagaaacagtagaatcacgcaaaaatcctaaagcttttggaaattcaatatcttcagtactgtgctttgaattgccgaagagcttgccacaccaaccagcaattgcatagccaatattgccggtatgtcccatagcaactatgtcgccaccggtaatcttccgcataaatggctgacataatgctggcgtaacagtcaacaaagtaccttcaaacaaacctccaagcagaatcgtttgccaacccgatcccatacctgcactaaccaagataacagcagcaagacatgaaacgtaaagcattgcttgaccagtcaagaagatatacttaaattttgtaaaacgagccaataaaatgttgacaatcataccaaccaacataattagagcagtaacagaaccatacttaactaaagcaatggcaaccactgcttcgttacttggtacaaccccttgtacgtgtaaagcaaacttaaacattttggcaaaaggtgttaaagcgttacttaaaattcctgcaccgcctgtaagtactaagaagccaacaaaagtcttaatcccgccttgaataacttcagtagcctttttcttctgtaaaatcagtcccaataccgcaagtaaaccaaccaacatggcaggactttgaacgatactgacaaatagattcaatattccattcatagtcatttcctccgttctatcttcaaagcggctcatttattgaataattgcttaactacatatttttaaaaactaaatcggtgagccactaaacctgtctttagctatgctcgattccttccttgtccaaaatcgcattaaccttttctttaagctcatttggatcaaccaaactgttcaagataatcagtcgatcttttggaagattacccgcagaggtttcaagggtaggatctaagaaaaagtaatcagcttggtcaggcgttgcactaccgatatcagagtgatctacttgaatatcttccttaacattttcttgctttagcagattttgaatgttcatctgaaccataaaactactgcccaagccactttggcataatgcttcaaacttcatgatattttcccccttcggctatttgaaaactcttaatatttcatcaaccgtcgttgctctcaacaatcgctgcacattttcgccattcatcaaaacctcagaaagtttttgaataactcctaagtgactgttgctgtcagtagctgccaaaacgaaccataatgtaactggatgcttttcatcagttaggttaactacatgatttgttttcattaaggctaaacctatttttttacaacttgaacttggtcgcgcatgtgctagtgcaatattgggtccaatgttgatatatgggcctttttcttcaacgacatcaatcattgaatcaacatagtcattaccaaccgtcccattatcgattaatggttgcgatgctttgcgaattgcatcttgccaggttaaatctctcccatctacaacttgaacggtctgtttatttaatagatccaacgccacttgatcacctcatttccttttgtttacggtttcataatattgaattgacaatattctcacaagtgcaataatgtaccttaaaattgtgcaaaaagtaaactagataaataaattacgtttgggggaatggtgttgatagaatttagccatgttaaacatggaaacgaaatgttgctcgagcttgtaaattcgccatcggtggtttctttaaaagctcttgaaaacaaactacatctttcgcgtcgcagtattttttatgtcatcaaccatgtcaacaaagagctagatacagagggactatacgaaatcgagaatattcgtggtatcggatatcttcttcctgatgagactcgccaacaactggttgggaaatacaaaaaagacgaaaccgtaacagatttcgctagtttttttgatagttttccgcagtttagtaaattggcaaagaatcaacgtcaacttactgaaatatttttccttatctcacgtgatacaacttcactcaatcagctgacgcacatctttaatactagtaaaaatacaatcatcaaagatctcaacgaaattgcagttactctgccaaatgagttgtttataaagaattttaaatctggcaaaagtatcgtaggggatgaaaccgtacagcgcagttgggcattcgaacatcttcagagtctactgaaattaatatcccctttctttcagccatcaagtgattctcgtatatccgaacatctgcagctcttcgaaaaagctaccggtaatatccttacagatgattcaaatagcattttaaattcatacctacaatggctactatctcgaattgaaaatcaaagctaccgccttactgcagacaaagctgaagcagaccaatcgtttagctatgactgggcaacacaacttttaaaagactatggtattgagaatcaaatggagtcacgatacatctcaaaaatcgtcaatactcaagcatttcagcacataaatctaaacagcccattaatcaaaaaaattcaaccgattaccacaaaagtcattcaaagattcaatcaaaaagctggcgttaagttgcctgctgaggtcggaagtctaaatgagaatctaaccgcccacttggcatcaacttactgtcgcgtaaaatttaacattcgataccacaatccgctattggagcgaatgaaaaccaactatcgtgaaacgtttgaacttactaaaatagcagtggctcccttcaataaatttgtaaattcaaccctttctgaagacgaaatagcacttatcaccgcctacttcagtggagcaatgcgtagttcaagtcaaactgtcctaccaccaacccccattagtgaagtattggttgtatgttccagtggaattggcacctcgcagttgctactcacacagcttagacagcgctatcccaatgttggattcgtaggaccatacaatatttttcagtacgaaaattgttccctaaaaaatatcaagctcgttctcagtacgaccagtctacctcaaaaagaatgtccagtattaaccgtcccagtcattcccaataactcagattgggaacatatcgactatcagttacaaaacgcaggatttacaacattcaatctctcaagtgatttttctcaaattaaagtctcctccattatggatattatcgcgaactatgcccgtatcgttgatccccaaagcttagagcaggctctgcgtagctacttcaaaaagccatctgctgaaagcaaagcgggactgcaagatccattgttggaaaagcacgttaaactgattcacgaaccaatggactgggaaagcgcagtaagagtctcaatgcagcccttagtagatgacagtacagtccaaccacgttacattgatcaaatcattaaactaaccaaagaacatggtgactatatggcaatcggtaaaggtatccttttagcccatgcctcctataatgcaggtgttaatcgactgggtgttaactttacgtacttcaagataccctttcgcattggcgattcaaaaaaggacatcaatttcgttgttggtttagcacctatagatcaagaaaagcatttagaactgctagctaatttattacgcagcgttcaagatgatagttggttaagcaagcttcgccacgtacagactgaacgtgagctgcaaaatctcctagttcaaggcaaactaattacacagtagatttaatcatattatgaattactaaaaaat

SEQ ID NO: 1850 - DNA, 642 bp, Unknown
  gut microbiota DNA sequence
ggccacaatggaactgagacacggtccatactcctacgggaggcagcagtagggaatcttccacaatgggcgcaagcctgatggagcaacaccgcgtgagtgaagaagggtttcggctcgtaaagctctgttgttagagaagaacgtgcgtgagagcaactgttcacgcagtgacggtatctaaccagaaagtcacggctaactacgtgccagcagccgcggtaatacgtaggtggcaagcgttatccggatttattgggcgtaaagcgagcgcaggcggtttgataagtctgatgtgaaagcctttggcttaaccaaagaagtgcatcggaaactgtcagacttgagtgcagaagaggacagtggaactccatgtgtagcggtggaatgcgtagatatatggaagaacaccagtggcgaaggcggctgtctggtctgcaactgacgctgaggctcgaaagcatgggtagcgaacaggattagataccctggtagtccatgccgtaaacgatgagtgctaggtgttggagggtttccgcccttcagtgccgcagctaacgcattaagcactccgcctggggagtacgaccgcaaggttgaaactcaaaggaattgacgggggcccgcacaagcggtggagca

SEQ ID NO: 1851 - DNA, 414 bp, Unknown
  gut microbiota DNA sequence
ctttaagagattagctaaacctcgcggtcttgcgactcgttgtaccgtccattgtagcacgtgtgtagcccaggtcataaggggcatgatgatctgacgtcgtccccaccttcctccggtttgtcaccggcagtctcactagagtgcccaactgaatgctggcaactagtaacaagggttgcgctcgttgcgggacttaacccaacatctcacgacacgagctgacgacgaccatgcaccacctgtcattgcgttcccgaaggaaacgccctatctctagggttggcgcaagatgtcaagacctggtaaggttcttcgcgtagcttcgaattaaaccacatgctccaccgcttgtgcgggcccccgtcaattcctttgagtttcaaccttgcggtcgtactccccaggcggagt

SEQ ID NO: 1852 - DNA, 20166 bp, Unknown
  gut microbiota DNA sequence
cgcaaatgtttttgcatcaatcgtaatgattgatgaccctgcacatttgtgttcgtcgaaactgtattcagttttcaaaggtctaccgttgcccgcttgcttcaagcaagcaacttaatcagtttaacaaattgtcaactacctgtcaagaacttttttgaataacttttcttgatggttagacgaaaagtcgttaatctcaagtgatcaacagctcatcgccgcgacaacgttatctaatataccgaggttacaatcaaatgtcaacgacaaattcaaactttttcaaaaaaatcaataaagcagaacggctttattcccctcctggcaaaacgttgtatgattaccgaaaattgtaatcgttatccatttttaaccatcgttagatttcatgatcacaaacttgtgcttttaaatcagctgcttcatttcctatcaaatcacctaaattaaattcttggcaaataaaaaacgcgccatcatgattgatgacacgcttagaattatttttgattttcgacaatcggctcacgatcatcaactgctactggctcatcagcagcatcgtcataagcttcgccagtcaatacctcaactggcttgaaggtcttaacgaaagcatcctcaaccgaaattggcgattgcggcttgctttgttcataaaattgagccgttgccaggtagacaactggagcataggcgcaaaagcccaacagcatgatgatcaagccggcatacataacaaagtaggttgccgtgtaattgccgtagtaggccaatccaccaaagatcacaccccataccagcatcggcaggaagctgactaccaattcaaccatgaagaatgaaagcttcttgccacccataaagcgacgactagccgtcaaagcatggcgcattgactgtcccaaaaaggctggctgctggtcgcggtacagcaatggtgcctgcgagtattccaaagtcttccagaacgtaatcaagaagttggcgatccgaactgcgatcaccagcgcctggttcttggctaccaaggctgccacgatatccaacggcagcgtccataagaagatgaacagactgctgtaaagcgtcagccgcagcagctggtttttgttcagatgcttaaagtgcttccagatcgtcgtcgcactgacttttagattaggattcttgatttgatcctggtagctgtaaaggatgctcatgttgacaaagtacatgccaaacgttaccaagaaccacaaaatcaagatacctaatgcctcaaccactgcaagcagcacttgactgatcatgccgtacataatcagcatcgtggcataccccagcatcatggcgctgcgagtgaacaacagtgccaaaagagccgtcaacgccaggtaaagcagcgtgatgccggcaatcggccaaaccgcggcgttatatttgcccttcagcgtactctttaattggttgatgaattctttgagaggcaagtgattgcgtttcattaattcaattctcctctttttacttaattatgtttaaaaatgttcttcgtgtatcttaacacatctttgagattgtaccaccgtcaacgtctatgctttacaaagtcttcacaaaatcacgaatcggtttcttaaataacaaggcttttttaactgatccaacggccaagcaccgttactgggctaaaacgggtcaattcagtacgattgccgttattaagtgcaaaagccggactgttttttgcttggtaagtcaatcactcaacgccttttattgaccgataaagaaaaaaagacccgcgagcgattcgcgagtctttaaagaacgtttaagaaattattagtacttttccttgctcaaaacgttcagcttttcatcgaagtcgtaaacaactggttggccagtagccatttccaggttcatgatgtcttcgtcagaaatgttttcgatgtacttggaaagggcacgcagcgagttaccgtgggcagcaatgataacgttcttgttgtccaacagctttggtgcgatttcgtcttgccacaatgggataacccgttccagcgtaactttcaggttttcaccaccaggaatggcgcgtgggtccaggttggcgtagcgacggtccttagctgcagagccttcgtcatcggcactcagcagtggaggcagcacgtcgtaggaacgacgccaaatgtgcacttgttcgtcaccgtacttttcagcagccttttgcttgttcttgccttgcaaagcgccgtagtgacgttcgttcagacgccaagtcttgaattcaggaatccaaagctggtcgcattcttccagtgcgtagtgcagcgtcttgatcgcacgcttcagaacagaagtgtaggcgtagtcaaattccagaccgtgttccttcagtgccttaccggcagcctttgcttgttcaacaccttctggagccaagtcaacgtctacccagccagtaaattggttggacttgttccattcactcttaccgtgacgaatcagtactaatttagccattgttcgtttgacctctttcttcttttagtgagccgtatataaaatacacaacaattcaagctatattttaaatcagatttttgctcgtgccaatagaaagcactcatttattgtcatgatgttcgcgattgttttgccaatgcatcaagatctcgccaataatcaaggccagaatcgccaaactggtcagtatgttttgcgttggcgtgccatgctcggcaatcagtcctctcaacaacgccgtgattcccagactgatcaaaaaatcggctgccagatgaccatgattctgcatcgccgcggctgccatcgccaaaaactcaaacagcagaaagaaggtaatgatcttttccaatactgggtcaaatgaggttaggtgcccggcaaaaagcggcgatagcttaaccagctgccacagttcgacaaaaacaaagccaatcagacacagcccaaagacagccattgagatttcagcaaagcattctaaaaaattaccaacgcgctttgccagacgatcgaatttttccattgtcaccgctccattgttattttttgaccttatcgtatcaaaattccaacggctgtggcagtttttttatggctttcaccgatcgactccggacagctggaattgatgacggtatttctggttaatgcgttgccgattccgtaagatgccaatgctctgtaaaacactgataaacagctgctcttttggcattcttttaattcgtcatgattttaaaaccggcttaagatcgccgcaaacccagccggcctggctaatggcagcttacggtcttgatcgcccacctgttttttagtcatcaccaaaaaaatccttggcaatctgcaggtagatctgatcagcctgcagatactccgcaactgacagactttcgtcaacctgatgcgacatttcttctcggcccggtccccattcaacgattggaaaacggtgatcatccaatatgtagcgcgaggcatccgtggcaccgtgcgaaatggcaagcggcagcgattgcccggcaacggtttgatatgactgctgcaccagggaaacgaatggatcagccggatcagtcgccattggcataaaactggctacgacctctaattcaaactgaccatccatctccgcgttcaaacgatccaccagcgtctggagccgattctgtaccgccgtattgtcaaattccggaatcgtccgcacgttgccttccagataagcgtagtcaggaatcgagttgagctggcgaccgccatgaaagaccgtgacgctgtgaatcaggctgcccagactaggacttgcctttacgtcatcaaacgcatgccgctcatattcaaaaaagcgcgccagattggccacagcattaatacccagactgggatcggaactgtgcgccaggcggccatatgatttcacacggtagtcaaacgagccgctgtgtgcgtattccaagcggttggtcgtcgcctcgcccacaatcatggcatcaacatcgcggaccagtccttgccgcgtcagttcaagcgagcccagaccgccaatttcctcgtcaaccgttgccagcaggcgaaccttgccatgtttgggcagaccggcttccttcagctcaatcaaggtgttgaccattgctgccaggccgcctttcatatcgacgctgccacggccatagatagcatcatcaattacctgaccgcagaacggattatgccgccatttgtttgaatcgccaacgtctacggtatcaagatgtcccaccaaagccagcaccgggccttcctgttcgccaacctcagcaaccagattcgtacgaccagctgccagggcaatcagatcagattcaataccatgatcgctcaatacctgtttaagatattcagcagccggctgctcatgaccattgaccgtattgatttggatcagttcctgcaaaatgttgagcttgacgctgtcttccattttttccacgtccttttactctcattttattttaatctatttttaattttaacacaaaaagccaaaaacgccaatgatcaggcagtccctcagccaatcacaaaccggtcagtcaccatcgactaaagccacgggatttccggccagcaataatcaaacaagcatcctgacttggcaacgatcttgataaaatgcgtcaaacgaagaccatccagcaatcagcttccgtttcaccctaagcatgcattgatcttttcaaagcaaacaatcgggcagcagcgatcgaatcatcagccatcaactgctcgcgatcatcagtacctcatcaacaggtcagcagtcaaatcaaaacggccggcagctcagactgagtcaccgaccgttttcgctattttaattaatctttcaaggctttgtcgccaatgtcatgacggtagaagcattccggctcatctagtttggccagatagtcataaaccttgtcttgagccttttgcagatcagcatcctcgccaatcaccatcaaaagccggccgccgtcaccatgcagctcatcaagatgtcccttaacgttggcatagtcaatggcaatgtctttagcagctgggaacgaaccaagcgcctgaccatgcaccggctttttaggatagcccttagaagctagaatcacgcccaatacggcaatgtcacgttcttcaatggcaggcatcggctgatcattgacgttggcatcgatcagctcaaccaggtccgttttcagccgtggcaagacgacctgcgtttctggatcgcccagccgcacgttatattcaatgactttcgggccatccgccgtcagcatcagaccaatgtagatgatgccatggtagttgtagcctgcctggtgcagcccgctgacggttggttcaacgacatcatcgatcatgcgttgacgttcggcatcgctaagctgcggcagcggactgtaggcacccataccacccgtgttgggacccttatcgccatcgtaggcccgcttgtgatcctgcgccattggtaaaatccggtattgatcgtcttgaactacgacaaacatggagtattccggtcccaccagacattcttccaagaccagcttttcttcgcccaactcaaacatttccgtaatcgtgtcctcggcttctggcgtcgtctgcgcaatcacgactcccttgccgccctgcagaccattggctttgatgactacgggacgggcaaagtcgtttaaccccgccaatgccgacttcagatccgtaaacgtctcatgcttggcagttggcacgtgatacttgttcataaagttcagcgcgtagtccttagagccttccagctgagcggcttcttgattggggccaaaaatcttcaagccggctttttggaatgcatccacgaccccagcacataaagcatcttcagggccaacaaacgtccaggcaattgattgatccttagcaaattgaatcagtgcctcaaaatcgtcttcggcaatatttaaaggcacgattcccgccgtcaccatgccgatattgcccggcgcacaataaaccgtgtcgacatgaggactttcgttgagcttcttggcaatggcaaattcacgaccaccggcgccgattaccagcaatttcatcttttccattttttaaacctcttttaccccaaaaagcccgcgaaaatcaatccgcggacctgcaaacgcaattagtggcggaagtgacgaacacccgtcattaccatggcaattcccatttcgttggccatgtcgatcgattcttgatcccgaaccgaaccacctggctgtacgatggccttaatgccgtgttcaccggcaaacttgacacagtcgttgaatgggaagaaggcgtcagatgccattaccgtccgatcatcaatggcatcgccggcatgcttgaccgcaatcttcaaagaatcgatccggttaggctgaccagagcccacgcccagcgtccgttcatcgttggcaaccacgatggcattggacttggtgtgcttaacggctttccaggcaaacatcatcgtcttgagctgctcttcagttggcttgacgtccgtgacgcattcccagtcatgccagtcttctttaagcgtatcctgttcctgcatcagcaccccgcccatgacggaaacgacttcatgtcgcgttggctcgtccttggctgagaagtcaaccttgagcaggcgaatgttcttcttcttggccaaaacggcataggcatcttcgtcaaagtcaggcgcaatgatgatttccaagaagatcttacgcattttttcggccgttgccagatcaaccggccgattcaaagcaataacgccgccaaaaatggagaccgggtcagcttcataggcacgatcccaggcttgttccagcgtttcgccgcggccaatgccacaagggttcatgtgcttcatagcgacaacggttggttcatcaaactcgcgtacgctgcgcagggcttcatcggcgtccttgatgttgttgtaggaaagcttcttgccgtggagctgttcggcttccaggattgagaacttcttaggaattggatcctcgtacagccaagccttttgatgactgttttcgccgtagcgcatcgtatccttcaagtcgtaggtcagcgtaagcttttcggggtcttccaaatccaggcgcttggtcaggtattgcgagatcagcgcatcgtaggccgccgtagtccggaatgccttggcccccagcatcgtccgcgtttccagcgtcgtgttgccgtgcgccttgatttcgttaagtaccgtttcgtaatcgttgatgtcagttacgatcgtcacgtcgcgatagttcttggctgctgaacgaaccatggaaggaccgccaatatcaatgttttcaatggcatcggccagcgtaacgtctggcttttcaatggtttccttgaatgggtacaggttgacgcagaccagatcgatcggcgtgatgttcagctcatgcagcgtgtccatgtgttctgcaacgtcacgacgcgccagcaggccaccatgaacatatggattcagcgtcttaacccggccatccagaatctctgggaagtgggtaacttcttcaatactgatggtcttgatgccggcttcgtccagcgtcttcttcgtcccaccagtcgaaacgatttcaaagccattttcactcaggcccttgacgaaaggcaccaggttggtcttatcagatacgctaactaatgcacgtttcattggttgtttttctcctttgcaatgcgttcagtcaaaatcttcttaacggtttctggatacagttcatgctcggtttcatgaacccgcgtctccagcgtgtcgaccgtatcatcaggataaattggcacgtggcgctgcgcaataatcgttccggcatccagatttgaatcaatgtagtggaccgtgacgccggtttccttacggtgatcggcaaaggcccgctcaatcgaatgcaggcccggatattcaggcagccaggctgggtgcagattaacgatgctgccttcatacttatcaagaatcgttggtccgataatgcgcagataaccagccaacacgataaaatcaatgtcgtattgcttcaacacggccatgattttttcttcataggcctgcttggatccgcaagacttcacggtaaaagtttcatatggaacgcccagtctttgagcgcgtttgattacgtaagcatcggggtgatcgcaaaaaagcagggcttccttgccgggaatatcgccattttgaaaatgcttggtcaacacctcaaaattggtcccgttccccgaggcaaaaattgccacgttcatgttcttgcctcttttatttaataatcagtttttcttcatcagctggtcgatcctgcagccggccgatctgccatgagtcttcgccagcctgctttaaagcatcctgaacagcagcagtattttctggcgccacggctaagatcatccccagtcccatgttaaacgtaccgtacagatcatcagcatccaagtcgcccatcttttgcagatagttgaaaatcggcagcttgggccaggtgctggcatcaaccacggcctgcagcgaatcagcaaacatccgcggcagattttctggcagtccgccaccagtgatatggctgactccgtgaatcagaccctttttgatcaacggcagtaccggcttgacataaatgcgcgtaggcgtcagcaatgcctcgccaaccgtttgaccgttcagttcggccggctgatcgctgagcttgacgtcattgtccttaaacagtacctggcgcaccagcgagtagccgttggagtgaatcccggatgaggccagcccgatcaaaacgtcgccggcttttggcaaggccgtcgtcagcatcttgtcttgatcaacgacaccggtagcatagccagccagatcgtattcatcttgactgtacatgtcaggcatctcggccgtttccccgccaaccagggctgccccggcttgacggcagccttctgccacgccagatacgatctgggccatcttgtcaggcgtgttgtgacccgttgcgatatagtccaggaaaaacagcggttccgcgccctgggccagaatatcgttgatgcacatggccacgcagtcgataccgatcgtgtcatgacgattcagcttttgggcgatcaaaagcttggtccccacgccatccgtacctgaaaccagaattggatgcgtcaagccggcaaccgcggtcagatcaaacatcccgccaaagctgccgatgccaccgacaacgccgggacgatcggttgaagcaacggcatccttaatcttttttaccatttcatagccggcattgacgttgacgccagcttcttcataacgtttccgcttcatttggagagtcgttcctttcgcgcgcgcttttcttgttcgttcaacgacttaagatagccttcttcaaaatcatacagcggcgttgggtagtcgccattaaagtaggctaccgtcagcccgccatatggtgcatcaccggcatccggaacgttaatggccttaacgacgccatcaacgctcaaaaatcctaatgagtcggcttccatcaatttacacatctcagggacggagtagtgagccgccatcagttcagctcggttggagacatcgattccataaaagcatgggaaacggaatggcggcgaagcaatccgcatgtgaaccgacttagcgccagcttctttcagcatccggacgatctgcttggaagtcgttccccgcacgatcgaatcgtcgactacgactacgttcttgccggcaacaaccccgcgtacggctgaaagcttcatcttaacgccttgttcccgcaatgcctgtgttggctggataaaggtccgagcaacgtattggtttttgatcagccccatttcataaggcagaccagctgcttccgcataaccagacgctgcggaaagcgaggagttcggcaccccaatgaccatgtcggcatcaggtgctggctgttctttggccaacagccgccccatctgcttgcgggcactgtgcaccgtcacgccatgaataatggagtcgggacgggcaaagtagatgtattccattgaacagatggccagcttggtgtcatcagtataacgatcctcatgcagaccatccttgtcgatcaccagcagctcgcctggctgaacgtcgcgaatcagcttggcgcctacgatatccaaggcacagctttcactggttacgacataggcgccatttggcatctgacccaggcaaagcggccgaataccattaggatccaaagctgcaattaaccgatccttttgcaggaataagaaggcaaagccccccttgaccatgttcagcgtcttttttaaggccggaataaagcccatgtgaatgttttgccgaatcaagtgaatcagaatctcagtgtctgaatctgattgaaaaacggcaccgttgtcttccagcttgcggcgcagcgtaacggcattggtcagctggccgttatgtgccatcgcaatgtcgccatcatgaaaatggaacagaaatggctgcacgttgttgattgagttgtggccgctggtaccgtagcgaacgtgaccaatcgcggcatccccgaccagacgctccatatcgcttggatcggcaaagacttccgaaagcaggccgcgatcccggtgctgataaaggtgctcgccgtcagttgtgacgatcccggccccctcttgtccacggtgctgcaggttgtgcagaccaaagtaggtgacccggttggcttctggcacgccaaagacgccaaaaaccccgcactcttcatttagtcctttgatttcattgcgcatggcaaagcttcctcccaaagtttttgcatttgagtcactggcaagttgagctcagcatcagccagatggatttccagccattgcgttgctgcgacctcaccagctggcatcgcgtcgtcttgcatgatttcttcaaaggccgctgcattttctggtgccacgctgaccagcatccggcccggcgtttcgctgaagaactgcttcttgtccaatgcgcggaaatcagcgtttaagcccagttcagtcttgaagaccgtttcagcagcagctacggccaaaccaccttcgcttaagtcatgggcactggcaaccagaccgctttgttcagccttcagcaggcggcccagatagtcatgaacgtgttccagatcaaagtcagccaacgtaccggcaatctcgcccgtcatcatcttctgcagctcggaaccggcgtagtcatcgccagtcttgccgaccagatacagcttgtcgcccgcatgctgaacgcgggatgggatgacgtacttgacatccttgatcagccctaccatgccgaccattggcgttgggtagatggctgagccgttgttttcattgtaaagcgaaacattaccggaaataactggcgtatcaaagacgcggcaggcctcagccattccttcgattgagtgatgcagctcccagaagatttctggatcggttggatcaccgtagttcaaacagtccgtaatggccaatggcaaagcacctgaggcaatgatgttagaagcagcttcaaccaatgcgatcttaccgccaacgtatgggtttaagtagaccaaacgaccattgccatcagtcgtcatcgaaagtgcctttttggttccgcgtacccgaataaccccagcatcagaacctgggccaaccaccgttgaagtccgtacttgtgagtcatattgacgcgtgatccatgacttgtcagcaatcgttggctgcgtgagcaattcttggtagactgctgcgacatcatcgatttcagggacccagttggcttctttttcggcatcgatcaggcgctgcggcttcttttcttctgattcaacttccaaaacgtcatccgtcaaggttgagactggaatatcgcagactacctgaccatcatggtgcaagacgtattggtggccttccgtgatccggccgatcgttacgacttccagatcatagtagtcaaagatcttcttaacgtcttcttcgtggcccttcttaacacacaaaagcatccgttcctgagactcgctcagcatgatctcataagctgacatccccggttcgcgctgtggtaccaaatcaagatccaggtccatgcctgagttaccttcagaagccatttcggcactggaggaaacgatgccggccgcacccatgtcttgaatcccgaccagccattctgcatgatcttgaatcagttccaggcaggcttccatcagcagcttttccatgaatgggtcgccgacttgaacggccgagtgctgtgactcgttgccagagccaaagtcagccgaggcaaacgttgccccgtgaatcccgtcacgaccggtcttagccccaacgtacatcacggcattgccaatcccagaggcattcccctcctgctggttcttttggtccatcaagcccacgctcatggcattaaccaacagattacccttgtagcaaggatcaaaggtcgtttcaccagcgacggttggaatccccatgcagttgccgtagtcgccaatcccgcgcacaacgccatcgactttcatccgcgtctcggcatcgcttaattcgccaaagtgcagcgagtctaaggaagcgattggccgcgcacccatactgaagatgtcgcgtaaaattccgccgaccccagtagccgcgccttggtatggctcaaccgttgatgggtggttgtgactttcggccttgaaaacgactgcctgaccgtcatcaatgtcaacgacaccagcaccttcaccaggcccttgcaaaacccggtcattcttgttggggaacagtcgcagcactggcttggactttttgtaggaacagtgctcggaccacattgccgagtaaaggcccgtttccgtgtagtttggcaaacggtgcagcagcttttcgctgatgtagtcatattctttttcagacagactccagtcgagatatggtttcttttccttaatttcttcaggggtcattacttgcttcattctaattatgcctccgtcttaacagtgccgttttccaataaagacttgaacagccgcaaaccgtccgtcgaacccaagagtgcttccacggcgcgctctgggtggggcatcatgcccaatacgttgccgcgcttgttgacgatccctgcaatgttgcgtagagagccgttgggattttcgcttgcgtagcggaacacgacttgatgattggcttccagctcatccaaggttttttcatccgcgtagtagctgccttcaccgtgtgcaattggcagagcaatgcgttcgtgagcctggtactgcgtggtaaaaagcgtgttgttgttaacgacttccaagggcaccgtttcacagacgaacttttggctgtcgtttttcttcagggcacctggcaaaaggcccgcttccgttaaaatctggaagccattgcaggtaccaaaaaccggcttgccttcattagcgagcttgatgacggcgggcataacgttggcgaaccgagcaatcgcgccggcccgcagatagtcgccataggaaaagccccctggcagcatgaccgcatcaaagccatccagactcgtggccttgtgtgaaacgtattcgacatcggcattgcagacatcgtgcagcgccgagtacaggtcgatgtcacagttcgagcctgggaattgaatgaccgcaatcttcatttatttcgcctccagcacttcaaacttgtacgtttcaatgttgaagttaaccagcagcgattccgctacttccttaaccgtgttttcaacggctgcttgatcgccttcaacctgcagatcaaagaacttgccaaccgtcaaatccttgacttcttcatgacccaactggtggatggcatttaaaacggattcggcttgggggtcaaaaacagattgcttgtaggtaacgtaaatacgaacggtagtcatttgattagtcctccttaacggcttcttgcaggcgtgcgtaaacttcatcataggtcgtggtcagatcggccaggttcttgcggaagacgtccttgtccatgtgagcgttggtcttgatgtcccacagacggcagttgtcaggtgagaattcatcagccagcaccagtgagccatccgaaagcttgccgaattccagcttgaagtcaaccagcttcatgccagccttcttaaacaatggcgtcaaaagcttgttgcagcgacgggccagttcccagcattgttgatattcttcatgcgtgcaggccttaatggcaaccgcgtcggattcattggcgaatggatcgtccaaggcatcgctcttgtagaaggtttcttcaaccggttcgtccagctccatgccatcctctaaaccaaagcgggaggcaaagtggccggcgcagacgttgcgcgtaacgaattccagcgggaacatgtggcacttcttaaccaattcttccttttcagaaaggcgcttgatgaagtgagttggaatgccgttatcaatcaggtattcaaagaccagcgttgagatgtcgttggctgcttcgccctttccgtcaaagtggtccttacgcttaccgttaagcatcgttgcctgatccaggtaaacaacccgtaaaacgtcaggatcttcggtttgccacatttgctttgctttgccggtatataacagcttttccatttttgattgccctccttataggctaaaaacgaattgatgaattggttaacggaaaattgttcgttaaatcctgctattatcgtacgcatatttttaaaaatcgtcaagcgtacaaccgaacctttttcagtttttaatcataaaataatggtttttctaagtttaacgtttaactaaagctgatttttaattttatagttcgtgttttaatcgattccaagtcaaacaaaaaagcaccgatcatttcaatcgatgctttggtttaatgataattaatcgtccaagccaacccgcttgaagatgtcgtcaacatgacgcaggtgccagtggtagtcaaaggcatcatccagatcttctttagtcagctgcttttgaatggttgggtcagcttccagcagtggccggaatggtacttgttcggcccagcatttagccgtgtatggctgaatcagatcgtaggcattttcccgcgtcataccggacttgaccagcttgagcagcactcggccagagtagatcaggcccagcgtcttgtccatgttcttcttcatggtttcagggaagacgtccagatttgccaaaatccggccaaaccggtgcagcatgtagtccaacagtgccgtcgtgtctggcagaatcatccgttcagcactggaatgcgaaatgtcgcgttcatgccacagggccacgttttcataggccgtaacgacatggccgcgcaatacccgcgcacagccgcagatgttttcggagccgattggattgcgcttgtgcggcattgctgaagaacccttttgacccttggcaaagtgttcttcaacttcatggatttccgtccgctgcagggaacgaatctcagtcgccatttcttccaggctggtcccgatcaaagccaaagcggcgatgtattcagcatgcagatcccgtggcagtacttggctggaaacttcttgggcccgcagaccgagcttttcgcagacgtattgttcaacccgcggatcaacttcagcaaacgttcccacggccccagagatcttgccagcttcaacgccagctgccgcgtgttcgaagcgttcgtagttgcgcttcatttcagagtaccagcgggcaaccttgaggccaaaagtcgttggctcagcgtgaatcccgtgtgtccggcccatgcagaccgtgtacttgtattcattggccatctttttcaggatttccatgaagtccttgatgtcttgacgcagaatctcgttaacctgcttaagctggtagccttgcgccgtatcaacgacatcagtactggtcaggccatagtgcacccatttgcgttcgggacccagcgacttggaaacgtcacgtgtaaaggcaatcacgtcatggtgcgtaacggcttcgatttcttggatgccttcaacggtgaacttggcattctgcttaattttttcaacgtcttcggctggaatcttgcccagcttgctccaggcttcatcagccgcgatttctacggccagccaacattggtagcgggtttcatcgctccacagcttcttcatttctggacgggtataacgatcaatcattaatcttttctcctattcatcgtcccaaacatgggaatctttaatttgctttaacgttgcttcaatatcatcggtcaaaatggtaacatgccccatcttgcggttgtggcggctctcagccttgccgtaatcgtgaaaatgccattgcggatattcatgaatcaagcgccgcgtgccggccacgtgctgccccaagacattgaccatcacgactggactcatcaatttgatcttaggcagcggccagttgcagattgcccgattgtgaaccgcgaactgcgaaaagttgcaggcctcgatcgtgtagtggccagagttgtgcggccggggtgccagttcgttaacgtagagctgaccatctgcaccgacaaacatttcgacgcccaagatgcctttgagatcaatcgcttcggcaatcttttcggccatctgctgagcgcgctgctgccattcaaccggcatgcgggcgggcacgatgctcagatgcaggatttcatgggcatgaatgttttcactgactggaaagacggtaatatcgccatcggtattgcgcgctaccataactgagcattccatcttaaatggcacccagccttccaagatgtcatcaccatactgcagcacttcttcagtgatcgggtcatccaggtcctgggcactttttaaaaccatctgtccatgaccatcatagccgccttcacaagtctttaagacacagggatagccaagtttttccacggccgcgttcagatcagcccgatttttaactgctgcaaatggcgccgtctgcaggcccgcatcgcgtaaaaacgttttttcgcgaatccgattcttagtcgtgtacaaaagattggtcccctgaggaatggcgacctgatcagcaacgtcttttaaggcctgcagatcaacgttttcaaactcataggtcaaaacgtcagcccgccgcgccagttccttgatcgccgccacgtcggcatagggtgctacgatctgatcatcggctgcctgagcggctggacactgtggcgtggggtccaaaatgataaccttcattccagctgctttggcagaaaaagccatcatctgccccaactggccaccgccaataataccgatcgtcttgccttgttcaatgtaggcttctggatgcttagtcaagttcggcattgctggccaccgccttgtcatgcatttctttacggaaagccacgatcttgtcctgcagcgtttggtcattgatgcctaaaatctgaatggccaataaagcagcgttcttggccccggcattgccgatcgccgtcgtagctaccggaatccctgctggcatctgcacgatggaaagcagcgagtccatgccgcccaacgccttggtctgccccggaatcccaatcaccggcaatggcgtgttggccgcgatcatccctggcagatgagcggccccgccggcacaggcaataatgaccttaacgccattttctgccgcgtgctgggcaaaatcgaacatttcatttggcattcggtgcgctgaaataacctgcttatcgtacttgacgccaaactgatccaaaatatcacatgcttgcttaactgttggccaatcggacttgctgcccatgaccacgctgatttcactgctcacaatggcacctcctaaaaactgtctctagcatagcaaaagttttcggcaaaaacaagatttttcacgaactagaagaaataagggaattataatgttcgcctttatcataataatcccaacgcaaaaaagggcgcctgccgcgcccttttctttagtaatcttagaacaaaccggtaatgttgccttcaccgtcaatgtgcatgttaacggcagccggcttcttacccagaccaggcatcgtcatcacgctgccagacagtgctacgacaaagcccgcgcccagcttaggaacgaattcgcgaatgtggaacgtaaagtcggttggcgcacccagttccgtttgatcatcggtaaatgagtactgcgtcttggcaatgcagaccggcatgttctcccagcccatttcatggaacttcttgagctgtttttgagccttcttggagaattcaacgtccttagccccatagatggtcttggcaatcgtgttgaccttgtcttcaattgagtcaccctcaacactgtagagctcatggaattcacttggctgatcggccagtttaacgacttccttagccagatcaaccgtaccttcgccgcctttagcccaggcatcagccagaaccacattgacgcctaattcgtggcagttgtcttcaatggtcttgatctcggcttccgtgtcaaaggtaaagtggttgatggccacgacaaccggcagaccatagcgctgcatgttcttgatgtggcggttcaggttggccagccccttcttcagtgccggcagctgttcatctttcagatcagccagagctgcgccaccgttgtattccagcgcccgcaccgtagccacgattaccagcgcgtcaggcgtcttgcccaataccggccgcttgatgtccaagaacttctcggcccccagatcagcaccgaagcctgcttcagttaccgtgtagtctgccagctgcaaagccgtcttggtagccagaaccgagttgcagccgtgagcaatgttggcaaatgggcccccatgaacgatggccggcgtgtgagccagcgtctgaaccaggtttggctttagggcatccttaagcagaatcgtaatggcatcgctaaagccaagctcgccaaccgtaactggcttttggtcgtaggtgtagcccaccacgatcttggaaatccgctgcttcaagtcggccagatctttagaaagacaaaggatggccatcaattcagaagccgccgtaatgtcaaagccggtttcacgcggtaccccttgcattacgccgcccagaccggttaccacgtgccgcagcacccggtcgttaacgtcagccacccgcttccagataatgcggcgtgggtccaggttcagttcgttgtcccgcatgatgtagttatcgatcaaagctgccagcgtgttgttggcactggtcagggcatgcaggtcacccgtaaagtgcaggttgatgtcttccattggcacgacttggctgtaaccgccgccagttgcgccacctttgattccaaagactgggcccatggatggttcccgcattgcgattacggtttggtggcccagcaggttcagagcatcccccaagccgaccagcaccgttgacttgccctcaccagcaggggttgggttgattgaggtcaccagaatcagcttatgctttttgtcaggagcttctttgaccggcagatcgatcttggccttgtacttgccatatggttcgatctcatcggcacttaagcccagtttttcagcaatcttggtaataggttccatttcggcagcgttggcaatttctagatcagtcattgatgcggttcctccatttcgtgaaaagcgaacattttagcgtgttattagctaaacaaacttcaaattaagtacattcataacaataacgactttattatgatttgtaaaccgtaaattgtcaaacttaataaaaaagctccatcctgaatgaatggaacttttctactattatataacataattaaagcgcttttaagtcgattcgccaagataggcccgcttaacctgaggatcgttcaacagttctttgccggtgccactcaactgaatctcacctgaagcaatcacgtacccccgatcggcaatcgcaagcgcttggtgagcattttgctcaattaacagaatcgtagtgccctgtgcattgattttttgaatgatttcgaaaactttttggatatagattggcgccagccccat

SEQ ID NO: 1853 - DNA, 335 bp, Unknown
  gut microbiota DNA sequence
tagccgattgccaacagcagcgaggcaatgttgaccggaatcttgcgccggcccaatttgtctgagatcgcgcctgaagtcaaagagccaatcaaggcaacgaccatcgtgactaccgacatgatggagatcgtcgccgccgcggccgtcttgctttggccaatgtagctttccagaatgtagagctggtagtttaagatcatgtagtagctgaagatcagcagcgtccgtccggtgaaggccagccaaaagtcacgcgcgttgtgcattggaggacggaatgaggccaagaattccttaaagccgccctcgactggtggcaggtctttggaaga

SEQ ID NO: 1854 - DNA, 27539 bp, Unknown
  gut microbiota DNA sequence
atcttgacggctgaaagatcactgacttagtgaagaaaatccgttcctaaacgatcaccagctctgaatttacctacttcgcgccgatttttagccaaaagcaggtaattgcatattcccccaccttaatcaaaaaaaggatccgctaagctagcggatcctttttgataaattatattagttagtcttctttatcttcgtcttcagctggaacttccagacgcagctcttccaactgttgttcactgacgcgagctggcgccgccgtcaatggttcaacggccttcgaattcttagggaaggcaatcacgtcacgaatgctgtcagcctgcgacaggaacattacccagcgatccagaccaattgccagaccaccctctggaggcatccccagttccaaagccttgatcaaaaatccgaagcgtgcttgagccttttctttgctgtagcccagggccttaaagaccttttcttgaatttctgggtcgtgaatacggatggagcccccaccgatttcttgaccgttcaaaacgatgtcatagctttgcgcgtgcgcctgatgtgggtcttcgccatcttccagatagtgcagatcctcagggttaagcatcgtgaatgggtggtgagccgcgatccacttaccaaagccttcatcatattcaaacattggccagttgacgatccagacgtagttccattggttagggtcttttaagccgagttcttcagcaaagtggtttcgcaggtagcctaatgaatcgcagaccacgtggaacgaaccggcaacgattaagatcaagtcgccttccttggcatcaagcgccgcgtttaattcagcagcttggtcgtttaagaacttggcaacgggaccattgtagccatccgcgccaaccttgacccaggccagccccttggcattatagcgcttgatgtagtcttcctgcttactgatgtctttacgggagtatttgtcagctccaccaggtacgacaatagcccggacatagttgccagctgccaccgtactgctgaacaccttaaacgagctgtccttcaccagatcactgatatcatgaatcagcatttcaaaacgcgtatccggcttgtcggtaccgtacttgtccatcgcctcttgccattccatacgtgggaaaggcgtcttaacgtcaatgtccaagacttctttcatgacgtctttgatcaggccttctgtcatcgcttgaatgtcttctggcgtggcaaagctcatttcagtatcgatctgcgtaaattctggctgccgatcgccccgcaaatcctcatcacggaagcatttggcaatctggtagtacttgtcgaccccagctgccatcaacagctgcttaaacaactgtggcgattgcggcaatgcatagaagctgcctgggtagacccgtgaaggcacgatgtagtcacgcgccccttctggagtagagcgcgtcagttctggcgtttcaacgtctaagaagccgttcttttcaaagtagcggtgaacgacatgcgtaaccttgctccgcagcatcaagcgcttcatcatctcaggacggcgcagatcaaggtagcggtatttcagacgcagttcttcagaagcatcaacgtcatccacgatttcaaacggcattggcttggacttggccaaaatgctggcttctttaacttcaatctcgatcttgcccgtcttcatgtcagggttgacttccttacgagcccgcaccagaccatgcgcttcaataacgtattggttccgtacctggttggcgatctcaaatgctgctggatcaatcttttcatcaaaaaccagctgcacgatgccagagcgatcccacaagtcgataaagatcagaccacccagattgcgtcgcttggcaacccagccttttacgacgacttcttggccaatctgctgttcgctggtctcaccagcataattggtacgcttcattttttattacccctttgtctgttcttgataaacggctttaaaatcggcaaaaacgcggtccagcggtaaagtagtctcttcaccggtggccattactttaaagtgaaccgtgccgctttccagttctttttggccaatcgtcaaaacgactttggcattttccttggccgccgtcttaaactgcgcttttggcttacggttcaagtagtcgcgttcggcaacaaagccggcatcccgcgctgcttcaaccagtttaaagctggcagtgttggttgtctcgccaatacccacgacataaacgtctaagtcaggatccgcttttttaagcagtccttcttcgttaagcaaaagcatcagccgttctaagccaatcccaaagccaacccctggcgtatcgggaccaccaagctcttcaaccagtccactgtagcggccgccgccacagatcgtcgtatagccttgaccaagcgactttgcctgaaccataacctcaaagatcgtgtggttgtagtaatccagtccccgcaccatggttgggtcaaccgtgtagtcaatgtctaactcatccagcatttccttgaccagatcaaagtgcttttgggcatcatcagtcaaatagtccagaatcgatggcgcatcgtcaacaaactgcttgtcgcgtggatccttgctgtctaagacccgcaatggattcttttccagacgttcttgagagtcttcgctcagttcatcgtagtgcggctttaagtagtcgatcagtgcttgacggtaggtatcgcgcgtttcttgatcgccaagcgtgttgatggctacgcgcagacccgttaaccccagctgcttgaacaggcgcagcgccatggtcataacttcaacgtcaacggctggattgtcgctgccgaatgcttcaaccccgatctggtggaactcacgctgccgaccagactgcggccgctcatagcgaaacattggtcccatgtagtagaccttgtaaggcttgttgtattcagggccgtacagcttgttttcaacataggcccggaccacgccggccgtaccttctgggcgcagtgccacgtgacgatcgcccttgtctttaaagtcatacatttctttggtaacgacatcagaagtctcaccagccgagcgggcaaaaatattgtagttttcaaaaattggcgtgcgaatttcacggtagccatagcgcgcaaagatttcacgagccagcttctcaacggcttcccactgagcggattcgcccggcaagatatcagccgtgccttttgggcgttgatagcgcattgtatctctcctccattgatcaatcagtcgatttaaaaaagcacccctgctgctgcaagggtgcttgaatgcacggtaccaccttgggtttactcttgggtaacgtagcttcgacggggtcatgaccctgcctccaaagcgtcactcggcagccaatcgacagggcttgcaccaattccccgctcgctgaaagctatggcagaccgaacattctttttcatcggcatctctaaatttaattacctacttagcctactaggcttgagctgtttagtcaataggccagccccgaattagtcttgattttccaattgatgctttctaaacttatcttaatgattcatgataaaggagcaaaaatcttgaagtttcatcgtcctgccaaagctgtcctggttgcgatcagcatggcattaattgcaattgtcatggtggtcgcgctgacgttttcgcggacgaccaccattgaaaccagtgggctcaacgtccgtaccggtcctgggcttgactatgctacgatcggcaccgttaaaaaaggccagcgcgtaacgattctcaaaacacgcaactcatggtacaagattcggctcagcgatcagcgttttggctgggttgccagctggctggttcatcccaaaaacaatctcaagcacgtctcaagcctttccgaagctacgatcgtaattgaccctggccatggtggttctgactctggtgccgaatataaaaacagtaccagcaagcgctacatggaaaagacctatacgctgcagctcgccaatcgcgttgcgcaggaattgcggctgcggggcgcgcacgtaatcatgacgcgcgactcggaccgttacgttggcctcaaaccacgaccagcccttgccgaaagcatgcatgccgatgcctttatcagcttccatttcgattcttcgccggctcgcaacgaagcctcgggatttacgacctattattaccataagggcgcgtccaaaaagctggccaaggcactgaacaagcagctgaacaacctgccattgaccaatcgcggcattgaatttggcgactttctggtcattcgcgataacacccgtccagccgtgctttgcgaaatgggctatatcaattcaactaaagactttaatcaaatcaaaaacgccagctatcagcaaaagatcgcccgcgatattgccaagggattaaataactactttaaaaactagacagaaaggatgttggtcttatgtctgcatatcagcttaatcaaaaatggctcagccaattgccgtttcgccagattgaggattggcgaccggttgctggtggcgacatcaatgccgcctatcagatcaaggctgatcaaagaacctattttttaaaggtccagccgcatcatccggccagctatttcaatcacgaaaaacgcggtctggaagcaatcggcgcgctcgtcaaaaccccgacaccgcttgctcaaggacagattcaaggcgatgcctacctggtgcttgaatggctggaaagcggcagcggctcacaggctgatctggggcgggcagttgccagaatgcacgcccagcatgccaagcagtttggcttttatgaaaatcacaccaccagagcgctggttaaaaacaatgcgtggaatgacagctggcgcgacttttatctcaagcagcggctggatcccgaaattgccgttgctaagaaaaacgggcgctggaatgactggcgcgagactcactatcaaagaatgcgccaagccttcagtgactattatgatcagcaccaggtcatccccagtcttttgcatggcgatctctgggcaggcaactacatgtttgataataccggtcagccggttttgatcgatccggatgccgtctatggcgatcgtgagtttgatctggctatgaccacgatttttggcggctttgagcctgcgttctaccaagcctatcagcaggagtatccattggcaaaaggcgtcaatgagcgactgccatggtatcagttctactatctgtgcatgcatctgatcttgtttggcgaaacgtacggcccagcagtcgacggcattttggaacgctactgataaattgatcaatgtgtagattttctagtcccgatcgattcaagtatgatttgcaaagcgatgttgtttttaactgggcgctttaattgtttttaacgttaagctgacggtaacggccgatcaccatgatactctactgtttagcaaccagctattaaacaacctaattaaaaagcgagtaacggtctaaccgctgctcgctttttaaaaactatttttcataaagaatcgtaaccggaccgtcgttttccagctcaactttcatatcagcgccaaaacgaccggtttcaacatgcacgccggcttgacgcagtttttcgttgaaacggtcatataaaggcgcggcaatttccggcttagcagcttttgaaaaaccaggccgattgccatgtttgacgtcagcatacagggtaaactgtgaaatcgacaaaatctcgccattgacatcagccagtgctcggttcagcttgccgtttccatcttcaaaaacacgcaggttgacgattttgtgtaccatccagtccaactgctcatcagtatcttccggtgccaggccgaccaacagtaggtagcctttttgaatctggccgaccgtttcaccatcgattctaacggcagcatgattgactcgttgcaatacgacacgcatttgatcacctcttaacgaattacccgtttgacgacatagacatctggaatgtttttcagactgtccaagatcagctgcagatgctgactgttgcgcacgccaatcgtagcagaaatcgtggccatcttgttgtggtcgaccttgccattgaccgacgttaaaaagcgcgtgttgttgttgatcgagcgcagcacgtcattcaacaggccattacgattgtagccctcaacttcaatatcggcattgtagttggtcttatcaccggctggattagcccaaaagaccgagaccagccgctcgccgttcttttcagctgccttgacgttaggacagtcggcacggtgaacggagaccccacggcccttagtaatgtagccaacgatctcatcgccgggtacgggactgcagcaatggctgagccgcgtcaaaagattatcaacgccttcaacgaccacgccttctgaactcttggcaaacttgcgttgattattaacattcttgttttcaaaagtctggtgatcttccaaaacggctttctgggcggcccgttgcttgtcatcagcctcttttttacgaatgtcggccgtaaagcgattgcgcaccccaattggcggcacgtcaccaaaaccaaccgcggcaaacatgtcatcagccgtcttgtagtgcatttgatcagcaatctggttgttcttttccgtggtcatcagctcattaggatcatagccagcatcgcgcagctgactggcaataatctgacggccgctttccacgtttttgtcgtgatcatgggctctgaagaactgacgaatcttgttgcgggcccgccgcgtaaagaccagatccaaccagtcgcgacttggccccgccgaactggatgaagttaaaatgtcgacgatatcaccgtttttgatctcatagttcaaaggtacgatgcgaccattaaccttggcaccagtcgtatgattaccgacttccgtatgaatctggtaggccatgtccagcggccccgcgccctttggcatttcaataacatcgcctttgggagtgaacgcgtagaccttgtcggcaaaaacgtcgctttgaatgccctgcaaaaattcatcggtgccttgcgattcgctctgcagctccagaatttccttgaccacgttgagttttttggagtcctgcgtctgcttgatgccattggtcttgccttctttataggcccagtgtgcggcaaccccgtattcggcaacctcatgcatatcgtgagttcgaatctgaatctccagcagccggccttctggaccaatcaccgtggtatgcagcgactgatagccgtttgctttcggcatggcaatatagtctttaaaacggcccggcattggcttccagttggtatgaaccgcgcccaaaacggcatagcagtccttgattgagtcaaccacgacccgaatcgccaacaggtcataaatctgctcaaactgtttatgctgtgtgaccatcttgcggtagaccgagtagatgtgcttcgggcggccataaatctcgacgttgggtcccaattccagatcgctgatggcttttttaacgtcgacaatggcgcggttgatgtattcgactcgctgatcccgccgcgaattcatcagatgcacgatgcggtagtactgctgcggattaagatagcgcagcgacagatcctccagctcccatttgatggtgctgatccccagtcggtcggcaatcggcgcgtagatttccagcgtttcattggcaatccgccgctgcttgtcgggacgcagatgctgcagcgtccgcatattgtgcaggcggtctgccaatttaacgatcatcacgcggatatccttgctcattgccagcaaaagcttacggtgcgtttcggccatctgttctttgttggacttgtaatgaatcttagagatcttggtgtcgccatccacgatcatggcaatcgtcggtccgaaaagctcccgaatatcatccaaagtggccccagtatcttcaacgatatcatgcatatagcccgcgcatacagtttctggatccatatgcagattggccaggatgccggcaacttgaatcggatggatgatataggcctcgcccgacttgcgatgctggtcagcgtgcgcaaccgcggcaaaatggtaggcgcgctcaaccatttcaacatgctcttcattcatgtatgaagaaacgatctttttaacgtcttcatgcgttagttcattgttttttgacatcctgcatcaacttgctttctttagattgatttttgacggcatcttgagtcatggccttagccagatattcgatgcctaaatagaccagtgcgaaatagtaagtgtagcgtgatacttgaaaaagtcggacgccgatcagatagccgattggaaagaccagcagctgccaggagcgatcctgctgcttggcgactcttctgccggcccagacaacgtaacagaaattaaccaacagcaaaagccaaataatgatctgaacgcgcgataccagatgctgctttaaaaacagcgggttgatcaccaaagatagcaccagatcgctgattaaaagccggcgatcggtcgtccgccaaaattgctgcaacttctccattaaattctcctcactcatgccaaattgattgacatttattgtaacacaatgcttggcaatgcgcttaacgagccagttccaactgataggaaaccgcggccagcagatatagcggtgccgtttccgtacgcagaatccgcggtcccaagccagccggcacgatgccttgatccttcatctggtcaacttcggctgcactgagtccgccttctggaccaaagactgctaacagcttttggcctggctgcagctgcttgagcgttttagccagattagcctcctcaccctgcttggctgattcttcccaagccacaatcttaaagtcggccggctcgttttttaagacgtcactgagtttgccgccataaacgacttctggctggcgattgcgatgcgactgctcggccgcggcattggcaattttttgcaggcgctcgatttttttggcctgcttttgtggattccaacggctgatggaacgctgcgccgcaaaaaagacaattcggctggctcccatttcagtagccttctgcacgatcagttccggcttttccttggtcttgggcagcccgcaagccaaaattacttccaccggtaattcggcatcagtccccagatcgctttgcagctcgacggtggctggattcagactgacaagccgggccaggtagactttttgatcattaagcgcaacttccagctcatcattctgctccgcgcgcaaaacgtcaaccagatgatgggcaatgtcttttggtaagacgagccgttgatcttcaggcaccggttcattgataaaatagcgttgcatatgggcctcctattattctgccggcgttggcttatgggcgataatgccataccagtccttaatccgcatcgtctcatcgatcttgaagccgccatcacgcaagccttgagccacttcatcaaatttgtcgttgataattccagaagtcagaaaatgaccgcctggcttgagattttcataagcctgtgggatcagcggcaaaataatctcagccaaaatattggcaacgatcagatcagcatcttgatcatgaatgccatccaaaagactgtttacgccaatctcaacgtctttagcagccggattgagcgccagattctttttagcagagcggacagccacctcatcaatgtcataggccttaatcttaccaacgcccagcagtttagcagcgatactgagcacgcctgatccggtaccgacgtccagcatgctttcaccgccgcgcaccgtcagctccagggcctgcagcatcaattgcgtggttggatgcgttcccgtaccaaatgccatccccgggtctaaaatcaaaagcttttcatccgggctcggctgatagtcctcccattccggcacaaccgtcaaagtccgcgtgactcgaactggatgatagtacttttcccaagcggttttccagtcctgattttcgattgcttcgcttttaaccgtggcaggcattggatccagaccgaatgcctgcagttttaaaacccgctgcttgatgccgggcaaaagctctggaacaaaaacattgctgggataatatcccgtaaccgcggctcccgtttggcggtgaggaatcgagatgggatcaataatctcatcgccatagcggccaggtttcaatttggcaaaatccgcggcatcctcaatctgaattcccgccgcgccggtatcggtcaaaatatagctgaccgcgtcaaccgcctctgtactggtttcgacggttactgccgtccaatcattcatcttttttcctcctttgtatggcaaaaaagcgccctaaaaggcaaggacgcttcagttgtgcttattgattttgcggatcgtcatgcttgactgcctgcttggcaatctttttctgctcttctttttccatgtgctgctgcagatacaagatcagatccgtttccgtcttaaagattcgcggatgatgctgatgatgcagccgaacatcaatctcattgatctttaagcgacccgtccatgtatgggagtagcgaacgatcactcggttattgagcttgtgccgcccaaaacggaaaatataaacgtgttccggtgtcatcatcggtcgaatatattcacgtttgtaatccagatcattgtcgcgcatgaattttttagttcgatttaagatggcaatccctcccctacaatagattggaaaaaatttccttaactagtactaaccattttatcatatttagcttaactttgaacgtttcaagcctaacaaaaatcaaacaattaaagtaacagtctatcataagttggaaaataataacagaatatttttttgctttttaaattatcgaaatctcggaaattttcaagcagcattatggacagtttttttcgtttcggaattcctttgttgatctggtttgcgcagggtggatcatcaaatctaaacctgcgtttccagcagctgctgcttgtcaactgctatcacctatcttatttatcagattagattaagaaagcataaataccaggcctttttggtgctttggccgctgttgaaatggtaaaatcagtcatcatcaattatcgatggaggaaaacacgatggaactgctgttaacgctggtcggtctgtggctgctttggaaactgttcaagctttcattgcatctgctgttttggatcgctatcattgccgtcgccgctttctttgtcaaaacgttgattctgccagctattttgctgatcggcggcattatcggctggggcgttttacgcggctaacgcaattttagctgaaatcagtcataaaatgatcaaaaacacaacttttttatcatttgcctggctttatttacgcattattaacaaatttcaaatcagaatgctataatgagtcttgcaatatgcaatactactttaagggagactttacttatgtctaagaatcatcaaaaagttgtcctcgtcggcgacggcgcggtaggttcaagctacgcatttgcgatggcacaacaaggcctggctgaagaattcgcgatcgttgacattatcaagaagcgtacggaaggtgacgctcttgaccttgaagacgctaccccattcacggctccaaaggctatctactctgctgactacgacacctgcaaggatgctgacctggtagttatcactgccggtgctccacaaaagccaggtgaaactcgtctgcaactggttgacaagaacctgaagatcatcaagtctgttgttgaaccaatcgttaagtctggcttcaacggtatcttcctggttgctgctaacccagttgacatcctgacctacgctgttcaaaagctgtctggcttcccacgcaacaaggtcgttggttccggtacttctctggactccgctcgtctgcgggttgctctggctaagaagttcgatgttagtccagttggcgtttctgccaacatcatggctgaacacggtgactccgaatttgctgcctactcatctgctacgatcggcggcaagccactgctggacctggccaaggaaaagggcgtttctgacgaagaactgctgaagattgaagatgacgttcgtaacaaggcttacgaaatcatcaaccgcaaaggcgctacctactacggtgttgctacggccctgactcggatttcccgcgccatcctgcgtgacgaaaatgccgttctgccagttggtgcccctgttgatggcgaatacggtctgaagggtatctacattggtacgccagccgttgttaacgcttctggtgtcgctcaagttctggaagttcctctgaacgaacgcgaatccaaggctatggctgactctgccaagaccctgcaagaagttgccgaaaacggtatggctaagctgatgggcgaaaactaatccgttctggtattgaatgcgagaaaagctgctggttatccagcggcttttttttgtactaaaaaaagcccgcacagtggcgagcttaaaaattggtatcttggctcaatgctttagtgctgagaagccccactggtagcatcagtgtctgctggttcgggagcgtcctctgatgcgccggtcgtggtgtcggcaagcggctgattgtcggcttcatcttccacactggctgctgaagctcctgagaaggcgtcaatttcttcgccatgtgcttccttagcggcctttaagaaatagctgaatggcttcaaggcttgggcctggtacttttcaacgtattcgtcaaccagttttggatcctgggtctctttgtctaagaacatgtggttggtcgaaagcggcatctcatgggtgagcttaacgtcaattactactggcagatccgtctgctgagcctcaaccatggccgcttcgaattcagctttggtgcgaaccgtaaaggccatagcacccatccctttggcaacggttgcccagtcagtttctggcagatcaacgcctgacagtggctggtgcgagtcatcaagctgttctgccacaatgtagcccagacattcattgctgaagaccacgttgatgatgtgcatgtggtacttaacctgagtcaggatttcttccatcagcatcgcaaagccgccatcaccagaaagactgtagacatcgcgatctgggtagttgaccttagctgagatggcagctggcaggccatagcccatcgttgcgtactgaccagaagtacaccacttttgatcgtcgtgaatcatcagtagccgctcaaagttgatgtttacgttgccgacatcaactccaaagacggccttgctggaagccatttgattgatcacgtcaaagatcggctctggacgaactggcatctcttcgctgtcattaaagctgttttgccagtccagccagttctgcttgtcggccagtgccgcatcataaaaggcagatggtgctttttcatctgcaacgtcggccagcgctgccaaagccgttttagcatcacacagcagcggcacgtcgatgtgatgacgcttgcccatcttctctggatcagtatcgatttgaataaccttggcatccggattaaacaggaagatactgaacggaacgtcggtaccaacccaaacgatcaaatcagtactaaaaccaatctcggcaccaggtttcggcgcaacccgaccagccgagcccagataggcgggatacttttcatccaaaattcccttggccaaaactgaggaaaccagcggcatcttgtacttttccgaaacgcgctttaattccgcagcggcatccttggccccaatcccaaagtagatcattggcgccttggcatccttgatcagcttgccggccttagccaacagatcctggtcaacgacatagtgtgctttaacgtggttggcaacgttaggaacaaaggtgtcaggaatcttggcccaaccaaagtcttttggaatcgtaaccgtagctggaccatgatgcttgtaggcctgccgaatcgcttcatcaatcatgcggggcagactttccgccgtcatggccgtcttgttccaaaccgaaacgtcctcaaatgccggttcctcatccattgcttggaaaaagtccagattcatacgcgttgaaggaacctgagcaatgattgccaaaaccggaacatggtcatgcttggcatcgtacagcccattgagcaggtgaatggcacccgggccggcagagccaaagcagaccccgattttgcccgttaatttggcatcagcggttgctgccaaagcccccgcttcttcatgccgcacctggatgaattccaattctttacgttggttgtagattgcgttcatcgtggagtcaaaagaaccaccaggataaccgtagatgtgcttaacgccccattgccgaattacttttaagactgcatcggagccactgatcatttttgccatcttaatcttccttccatactttaaaaatcatcccgcctgtacttaacagccggtctcaattgacgttttatctcaggccactctctacttcagccctcataggttatgatagcgtttttatgcataattacaagtagatttcaatgaacatttttcacaataaataacaagtcccttgatatcagcatttatatcaatcaaaatttttatttttttctttgataaaagtaaaatttgactttgatttttaacatttttaaaacagtcattatcaaattataagatgatgtcatgattcaataatagtaatcgtattttattttaaattaaaaatacatttaaaattgaatcgactatttatcacaaacatcataatgcttgctcactattttataagtgctttatgcatatttatcggcataattttgctgcaaacattagcaaaggaaaagccggctgccaatcgcaaccgacttattacatcattgattcaatatccatctaaagctgaattacaccattgatttataaacgcgtgagaaactcgtgggaaaaagctaaaaaaatcggtctagttttagccacgcctaaaacacaaatgccgtcatagctactttttcttttcgtcgatttcctcatcagtcttcaaaactgccatgaaggcttcttgtggaacctcaacgcgaccaactgccttcatccgcttcttaccacgtttctgcttgtccaaaagcttagcccgtcgatcaggatccccagtgtgaatccgtgccgtaacgtccttgcggtaagccttgatattggtccgtgcgatgatcttggaaccaatggcggcttgaattggaatttcaaagttttgccgcggaataatcttcttgagcttggtcgtgatttcgcgtccccgttcttcggcaaagtcgcggtgcgcaatgaagcttaaggcatcaaccttgtcaccgttaagcaggatgtcgatcttaaccaggtcactgacgcgatagtcatcaatctcataatcaagcgaggcataaccatgcgtggaactcttcagcttatcaaagaagtcaaagatgatttcggacaacggaatatgatagattacattgacccgcgtctcgctcagatattccatcgtgtcaaactcgccccgcttacgttggcaaagctccataaccgggccgacataatcgtttggcaccatgattgacgctttaacgtaaggctctttaatatccttgatagaagacgtatctggcatttcagcggggttttccacttccttcatcgtgccgtcatgcagatcgacatgataggttacggaaggcgccgtggtaatcagatccagattgaattctcgttccagacgctcttgaacgacatccatatgcaaaagtcccaagaagccgcagcggaacccaaagcccaacgcttgtgaggattctggctcaaacgtcaaagccgcgtcattaagctgcagtttttccaaggcatcccgcagatcgttgaacttggcgttgtcggttggataaagccccgcgtaaaccattggcgtcatttgacgatagccggctaatggcttgtcagttgggtgcttggcatcagtaaccgtatcaccaacccgcgtatccttaatgtctttaatggccgcggtaatatagccaacgtcaccagccatcagaaagtcgcgggccagtggcttaggcgagttgatcccgacttcagcgacttcatattcagtaccagagttcatcagtttgatgcggtcacccttcttgacggtcccttcaaagacacggacactcaagaccacgccgcgatagtcatcgtacttggaatcaaaaatcagtgcctttagcggagccgtcagatcaccagttggcgccggtacttcggcaacgattttttccagcaccttttcaacgcccagaccggttttagcactgacgtcacaggcatcactacagtccagaccaatttcttcttcgatctgctttttcgttcccgcaacgtcagcggaaggcagatcgattttattgatgactggcaggatctccaagtcgttgtccaatgccagataaacgttggccagcgtctgcgcttcaaccccctgcgtcgcgtcaacaaccagaatagctccttcacaggctgccaaagagcgtgaaacctcataggaaaagtcgacgtgccctggcgtatcgatcaaatggaaaatatagtcttctccgtctttggcatggtaggtcagcgccacggcatttaatttgatggtaatgccacgctcccgttccaatggcatgtcatcaaggatctgggccttcatttcccgcttagagatcgaatccgtcatttccaggatccggtccgccagcgtggatttcccatggtcaatatgggcgacaatcgaaaagttccgaatgtgcttttggcgttctttcatttcttcaagattcattgattttttgtgctcactttctgcgttaaatgtctatctaccagtatatcaaatcccgttggcaactcaaactggggcgatgcaaatatcgaaaaaagagcaattcgccgcgcactgcaacgtcttgctctttaaatctttaggcttatttttcttcaaagtgatccttgagcttatcaaagaaaccgcccttgtagccggcaacatgttcgccactggcttcagcaaaggccagcattgcttctttttgtcgcttgttaagattcttaggcgtcttaacgtggaccgtcacatgctcgtcgccgttgccattgccattgatgtgcggtacccctttaccgcgcagccggaatgaggtttctgattccgtaccagccggaatctttaagtcaacatcgccatgcacggtcttgaccttgatcttatcacccaatgcggcttgggcaaatgagatatcctgatcaacatagatcgtggaaccatcccgcttaaagtcgcggcttggcgttaccgtaaagacaatgtacagatcgccgtatgggccgccattggttcctgcttcaccctggttctgcagacgcatctgctggccatcatcgattccggccggcaccttgaccttgagcttgtgcttttcttgaatatgacctgagccgtggcacttgtcacattgatcttctggcttgatttccttaccggtaccatgacaggttgggcagacggtctgtgactgcatcatccccatcatcgtttgccgccgctgcattacaactccggaaccgccacaggtatgacaggtcgaaggcgacttgcccggcttagcgcctgaaccgtggcagacgttacattcagcttcccgatcgtatttaatcgtggtttccttaccaaagatggcatccataaagtccagcgtcatgttgtactgcagatcgcgtccctgacgaggtgccgtggggtcacggcgagcacggccgccaccgaacagatcgctgaagatatcgccaaaatcgccaaagccgccttgactgaaaccgccctgaccgaagccgccgaagccttgaccgccaccaaagccgccttgagggccagcggagccaaactgatcatattgagcccgtttctgctgatcatgcagtacttcataggcttcattgatttttttgaatttttcttcggctcccggctcatggttgacgtctggatgatacttagccgccagcttccgataggcccgattgatttcagcgtctgaagcatcctttttgacgcctaaaatgtcgtaatagtttttctctgccatttaaatccctcgcaacgcaatttttctctcttactttatagcatagtcacgataaataagcaaaagccaaagtccgttaggggggctttggctttttgcttatctaaatcggcttcggctgactggcctacttgttgtcgtcatcgttgacttcagtaaagtcgccatcaacggtcttgccgtcgcccttgccgttattgttgtcagcaccgccattgttgccgtcagtaccattttgttggttttcttgttgagcttgttggtagagcttgactgccaagtcttgaacgatcttgtttaattcgtccttcttggtcttcatcgcatcgaagtccttggcatccttagccttttgcagagcatcgcgagcgtccttggccttcttgatctcatcttcagaaaccttgccgtcaagttccttaatggtcttgtcggtttggaagatcagctggtcggattcattcatcagatcaacttcttctttcttcttcttgtcggcttcagcgtgttcttcagcgtccttgcgcatccgttcgatttcttcatcagacagaccagagttggacttgatcgtaatgttttgcttcttgtgcgtaccttggtcttcggcagaaacgttaacgatcccgttcttgtcgatgtcgaaggtaaccttgatttgaggaacgccacgtggtgcaggtggaatgtccgtcagttggaagttgccaagcgtcttgttgtcagctgccattggacgttcaccttgcagaacatggatatcaacggctggctggttgtcagcggccgtcgagaagatctggctcttggaagttgggatcgtcgtgttgcggtcgatcagcttcgtcattaccccacccatggtttcaataccaagggaaagcggcgtaacatcaagcaaaacaacgtccttaacgtcaccagtcagaaccccaccttgaatggcagcccccagcgcaacggcttcatcagggttgatagagtggtttggttccttgccagtcaagtccttaaccagttcttgaacggctggaatccgcgtcgagccaccgtttaggataacttcatcaatgtcgttgaagtccaggccggcatcgtgcagagcgttcataactggctgcttggtcttttcaaccaggtcgttggtcaattggttaaacttagcccgcgtcagcatttggtccaggtgtaccggctgaccgtctttttgcgcgataaatggcaggttgatttcagcggattgtgagctggaaagttccttcttagccttttcagcagcatccttcaaccgttgcagagccatcttgtcttgagacaggtcaatgccttgttcagccttgaagccatcgatcagccaatccatgatcttttggtcaaagtcgtcaccacccagatgagtgtcaccagaagtggaaagaacttggaagacgccatcgcccagttcaaggatggaaacgtcgaacgtaccaccaccaaggtcataaaccaggatcttttcgtctttgtccttcttgtctaggccatatgccagtgaagaagcagttggttcgttgatgatccgcttaacttccagaccggcaatcttaccagcatccttggtagcttgacgctgagcatcgttgaagtaggctggcaccgtgataacggcttgagttaccgtgtcgccaatgtagtcttcagcgtacttcttgatgtattgcagaatcattgctgagatttcttgcggcgtgtacttcttgccatcaacgtcaaccgtgtagcctggttcgcccatgtgactcttgattgaagtaatggtgtttgggttggtgattgcttgacgcttggccgtttcaccgacttgaacctcaccattcttgaaagatacgacagaaggagtcgtccggccaccttctgggttggtaataatcttaggttcgttaccttccataacagcaacggcggaattagtggtaccaaggtcgataccgataatcttattgcttgccataaatgttttccctctttttatattggtttatctaaattattgtgcaacaacgaccattgaaggacgcagcacccggtccttcatttcatagccagcctgcagaacctgaacaatagtgtcggctttttgatcatccgaagctggcgcggtttgaaccgcctgatgcttggtcggatcaaaaggcgtgcctggctcagctggaatctcaacaatcccatggtccttgagcgccttttccaagtggtcgtgaaccatttggatgcccttcttgaactcttgggcctgcttgtcatccaattgagttgccaaggcccgcttcaagttgtccaaaacaggcaggatgtctttagccagaccttgaccatcatacttgatcaattgcgcgcgttcttttttaaagtggttgttcatattttgaatttccgcttgcgcccgcagatactggtcgtctttttcatccagctgctttttcagatcggcaatctgctgcttaagtgcggcagttggatcttccttggcagctgacttggcatccttggcttcttcggcattcttagccgcttggtcagccgcagtctgttcagctgcttgagccgccttttcttccttggcagctgctgatttcttttcagccatcgaacccctcctataaatcgtaataattgtgatagtagtcgagcagtcgtttagccagctcgcgtctgaacgcgtcaaccaggccaatcgtccgcgaataaggcatccgtgttggccccagcacggcgataatgcctttgccgtattggttgacgtcgtaggtagcggtgatcagactgtagtcgttgagcacttggttgtcggcaatctcactgccaatcttgacgttgaccccatcatttggtgaatcggaatcaatgatgcttgacagattatcgctttgatcgagcagtccatacaatgcccgcagcgcctgtggattctgccgatcagaatagccgagaatgttgagccgaccgccgacgaagtatttttcgcgagctgcctgccccaatacgctgtcaaagatctgcagaaagccgtcgggactgtgcagatactgactaacctttagcggaatgtcagtctgcagatgcttgacaaccgtgaccagcggcaagcctaccaactggtcattgatcaagcgcaccacggcctccaaagcctgcgtatccagattcttaggcaaggtgaatgattgactttccacctcaccgctgtccgtaaccagaatggcaataactttttgattacccaacggcaccaaacgaaaaccgctcaagtgcacgtctttttgttccggcttcaacgtaaacgccgtgtaagacgtcaacgctgacagaatatcagctgaatgcgaaacgatctcatcaatcttgtgaaaatcggcacccaatgaattttggattaccatcagatcactatcggtaacggctgccggatcaagcagatggtcaacgtaatagcgatagccttgcttggaaggaacgcgaccagaactggaatgctcttttttcacgaaaccttctcgctccagcaccgccatttcgttgcggatcgtagctgagctgaccttaattgggagcttgtcagccaagagcttgctgccgaccggttgaccagtcgccgtatattgacgtacaatcgcttgcaggatttgcttttgacgctgtgttagcattggcatcacttccttttagcactctaactgcctaagtgctaaacacaatttataatataccaaccccaccaacaaaagtcaacaatagtcaaactttttttcgataaaaatgtcaagattagtcaaaagccgctgcctcttgattatcaaggcagcatcttcaagcaaaggagtcacttatgaacgaagaaaatcgctatgtccagccccaaaacgccaaagaagccatggagctgattcaaaaactgttcaaccagtaccgcaacgcgccattgaccgcggaattgcttcagtatcacaataatttgatcatgcgactgcagaccgacatcaagcaggcagccgaagcagaaggccagaccgcgcttttaaaggacctgcatgaaatgaccgaactgatgcgccgctggacgacgattcggctcagtgggcgtccatttgccggtaagatgcgtcatttccgctttgcgccagccaacgggcagaaatttaagcgccaggtgcacaaaattggcggcagcagtgcacaccgcgccagtcgtcattaattcgatcattggcaatgtcttgagttgcgaactgccaagcatgaagcaggcaagcagttccattaattggcaaatccatcatcaagacttactcgggaccgactttaactttcaatggaatttgaaatcactttaaccaaaacatccaatcaaaaatccccgtttcaaaatgaaatggggattttcagctatcttagtctaaatttatcagtcgcgttccttttctcgtagcgaacgcggcattttattttcctgatacgtctgccagacattgatgcggtctttttcatccagttgacgaattacgcgcgcaggcacaccggctaccaaagaattagctggcacgtctttggttaccacagccccggccgccacgatgctgcccgcgccaatcgtgaccccaccaacaatcgttgcacttgagcagatccagcaatcagcgccaattgtaactggtttggcgtactccaagccatgacggccgtctggatattcagttaccgcacgttcttctttcaaaaacggatgacaaggcgtggcaatcgtaaccccactgccaatcatgacgccatcccctaaagtaatcggcgcgtcatccagaaaagtacagttgtaattaataaagcattcgcgaccaacatgaatattgctgccatattcacagtaaaacggcaagaagattcccaaatcattgcccttggcggaaggaatcaattcttctttcagatgctcaatcgccgcctgatccgttatcaaagtctggtttaagcgctgacacaacgccatccgttccatatgataaacgccaagctttgcatctgatgcattatacagtcgaccactgatcattttttcaaattcattcattggaataaatcctttcttaattgctgattaagtttgcctaataacctggctgactttctctgactgcatcaatttgtcaagtcagatcttaccttttaattatgtctttgatccagcactgcccgttttaaggccgcctgcagctgcggatcgaccgcgtgcagatatagaccgtgcacgccccgcgtcagcaaaacgttcaattcgttgtgcagcagctgttcgccaaacctttgcttggaattgtctttcattgttcgacgctgaacggcttttttattggcactggcgcttggatcaaaaataaccttgccatcgcgatatttcaccgatggaccgatgactacgccgacatgattgaggtcaaagccttggacggtataggttgagccgatttccttgattgtgtgcggctgctcggcccaggaaagatcatcataattgacgccgttttgctgcttttggctactcttcagctgcaggttccagggcattgaccagtcgccttcgcttacacaccagtagtcgctgccatctttaggcttgcggttgctggagtattcccagtcaaacgtggcgaccatgcggctgatgccatgaccatgatcttccgcgttaaactgggcaatggcttcctgcattactttaggatcgtcaaacacctgcagatcatatttatcatcttgggggatcgggaaaacgcggcgctggtcgataaaatcgcgaatccagcgaatcgtttcatcagatgccgcgatccgcatttgatttttgagccggatcaccttatcgccggccagtcgcttgatctgctgccagtcctcattttccataatctcgtcggccgtcagcacctgcttgtaatcatagaccgccaaaaccaccttggcccgctgcagaatatcaagcagctgattgtcgccatgcccatgatagccttggttctgctttgtccataaaagatgcgcctcatcaatgaaggccacgtcgactttatgatcttcgtcgtatttgttaataaagtgagttggcttgacgactgtttcatcatcacccacgcccagttttttgacgatctgccgatagaccttgacctgctggggatgattgaccatcatcacggcgttaagctgatcttgtttggccagctcgtaaaaaatgttgctcatcagcaccgttttgccggcccctgcctcgccagtcaccaaaaccagctgaccggtctgatttttagccagcgcctgctcaacggttttgagaatctttttcttggcctgattctgctcgtcagtcagcttattgaacggcgaggccttaaagattgccgacttttccagaagctgacgcggcggaaacaggttgcggtactgcttattttcgcccagcttgtcccagatacggttgaagatcggaatgaactcctcgctcgtgtagtacttgcgctgggcgttctcgcggcgattgttcagcttagagatcacgtccacgctgcttaggtactgtatcatgcggttttcgatgtctaatgccaacgatttattaaaatgctcatgaccgatcacaaacatgtgcgcgtttttggcattgcgcagctcctcccagtccgcacgcgtttccggatcggcatccaagtgctctagcgtccggcgctgaatatcgatggtctcgccgacataaaccgtgtagtcctctttgtagtcgctttgcttgccctgattgtcgataatgtagaccgttggataatccgttaacagttcctgctcatggtatttacccggatagcgtttttcgatctcttcatccagatgcgcggctgtgtctttacgataggacgtttcaaatattaatggatccttgacttgttcgctcataatcatccccgcttaatcatgattggctgatatttcatcgtgccgtttcttcaattatattatagttaattcgctattgcggacctaattgaatcttttgactgttaccgtctttcacttgaatgaaaggcggtttttaagattatcttgacatttgtagatgatcagtttaataatgttctagtaaattgcctttatttagttagttttgttatttaatgttcgtattttaggaggagattatgcactggttcgctgacttgatcgcggcaatcggcgtggtcttaaacggaattccccaaggtatcatggcactgagccttggattcgcggtgttcccaaccacgttctcatttctgttagtttgcgcgatcaactttatctttaattcggtcgccccggtttcttttcaagccgagtcgctggccctgaccggcaatctaggccgcaataccaaggaatacacgtcaatcatctttggcggctcgatcatcatggccattatcggtctgactggtaccctaaccaagatcgttgggattctgggcaaccatatcattaccggaatgatggccggcgttggtatcatgctggcaaaaatcgcgctcgaaatgactcgaaacaatcagaaaagcttcactggctgggtttcaattgccatcgcggtggttacttatttaatctcaaacgacctggtctggacgatctgtctttcagtcattggctccagcctgtatgccgtctttggcgagcactaccgcaacgagctgcccgccaacgtgacgatgcgccgctttattttcaccaagccgacgtttaatccacgaatcgtgcggggtgcgctcagtctggcctgcctaaacatcggcgccaacctgtcatacggactgatcacaggacaaatgaccggtatcaagcccaatcccgtcaacttaaacctgctgacaacatcacaggcactggccgacatgggaaccagtcttttgggcggggcgccggtggaaaccattatctcggcaactgccagcgcgccggagccagtcatcgcggggtgtctgatgatgctgatcatggccgtgattctgtttgccggttggctgcctaagatcggcaagtacgtcccaagcgcttcaatcgctgggttcctgctggttttggggatgtttgtcaccttccccgaaaatgccgccaccgcactggctggcaaagaacagctgatcgccgccgccaccatgatcattactgcactggttgatccattcgtaggcctgttgtctggtggcttgctgaaagtcgttttgccgctgttagccgcactttagggggaagctattatgaaaaaatatcgtattaccgttggcgaccaaactcgtgacctgccgctgattccgatcagtgacgacactgccattgcttcattcgtgctgctgggcgacgatgccatgtccaaaacggcggctgaactgcttttgcccaagctgcctaaaaagtttgattatgtcgtaaccgttgaaagcaaggggatcaccttggcacatgacatcagtctgttgtccgggcatccccgctcattcgtgatccgtaagtcagtcaagggatatatggaaaatccattgacgactgcggttgactccattacgaccaagggacaacagctgctcgtgcttgatggggccgatgctgccgaacttaagggaaaatcagttgtcttagtcgatgacgtggtcagtaccgggggctctttaaaatcagccgaaaagctgctcaacctggctggctgccaaatcgttgccaaagctgccatcctagctgaaggcgccgctgctgatcgggttgacgtggcgttcttaggtaaactgccactgttcaacctggatggcacgatcaaatagttcattcatttagataaataccaataatcgccgacccagatgtcacaagcatccaggccggcgattttgtttttgctgatatatgggaaacggttgcgtgccctgcctttgagaaaatatcgctgcaggtacgcaacatcgccaagatcgctatagtccgttccaaaactttaatagaaaaaggctggctgaatgccggctccatagtcggtgcgattgtcttagccaataaatttagcgatctgttgggcaaaagccgcagtcaaacgtcatcagcacgctttatgcaagaaattctgcataataacgtgtgaaaaattcatcattacctacttttttcgaaaatcgactgcatagtaggtaaaaatcaatgtatatcaagttaaggatccctaacactacctac

SEQ ID NO: 1855 - DNA, 6004 bp, Unknown
  gut microbiota DNA sequence
aatgcagttccaaataacaatgttcagaacacgactgttgcaaaagatactcaatcagcaacaacaaacgcatcagatcctaatacaacggtccaaggtcaaaccggtacgctgccagtaaaccaggtctcaggaacaactgaagtccaccaagacggtcactggtatttaaaagatttccagggaaattatttgaatggctggcaaaagctgacggacaaccgaatcgtttactatgatccgcagactagccaaatgcagtatggcgaacatcaaatcaataatcaatggtactattttgatactaattgcggtgcagtcgtgcagggctggtatgtattagcagatggccgcaaagtctactatgacgttgctaacgatggaactggtcgtggcatgctgcatggtattcaaacgattgatggtcaaacatacgactttaacatttacactggcgcgcagacaagtggttgggaaacaattgatggacaaaaatattattttgctcctgccatggttcatggaatggaaaagcagattgatggccattggtactgctttgatgacatgggaaggatgcggaccggctttgtacgcttaaatgatggtcgtgaagtttactataatacagatggtcagatgcagtacggtgaacaaaagatcaatgataagtggtaccatttccaaactgacaatgggaacatggctcgtggctggtatactctagaagacggtcgacgggtttattatgatgttgatgctgatggcagtggcgctggcatgctgcatggtctcaatcaaattaataatcaatcatattattttgatgcttcagatggcgatgaaaagatcggcttacaggttgttgataatcaaacttactattttaatccaattatggtgaaaaacggtgaggctaagattggcaatcattggtattactttaatgccgctggtcaaatgcagaacggttttgtaaccttaaaagatggccgtctggtttactacaatgcagacggtcagatgcagtacggcgaacaaaagatcaatgataaatggtatcatttccaaactgataatggcgataccgctcgtggctggtacaccttagaagatggtcggcgcgtctactatgacgttgatgattcaggagccggtcaggggatgcttcacggaatgcagaaagtcggcaatgactattattatttcaatcctggttatggtacagaagaaaccggcctaaaaacggtcaatggtcagcaatactactttgcgccgacgatggttgttaatcaagaagaacacttggctgatcattggtactattttggtgctaatggccaaaagcagactggctttgtaaccttaaaagatggccgtctggtttactacaatgcagatggtatgcagtatggcgaacaaaagatcaatgataagtggtatcatttccaaactgataatggcaataccgctcgtggctggtataccttagaagatggtcggcaggtctactatgacgttgatgacaccggcaatgggcaaggcatgctgcatggtctaggaaaagttggcgatgactactattacttcaacgatgcaactggtgctaaagaaacgggccttaaaacgttgaacggtcaaacctataattttgccggcaataatgggcaggcattacttaatcaattctggaccaatgacaatcaaacgtattattttgatcagcagggacagatggtcaaaaatcagcagttgacaattgctggtgagcaatggcaatttgatgtaaatggcattggtaccaaagttgctgtgaagattgctgataactggaattttgataaaaagagcagtgcagaattaaataacctgggaaataaggaacaactggggaataaatataatgggctgttaattgatgcttcgaaaccaggggcaaaattcagtcctcgtgacgctggcgatacacaggtcaacgccaataccgtaatcagcgtaccggttaaggctaatcaatatggtgccaagattacgattgagctttcaggtggcacggttgatctgacgactaatcaaggatcacaaaccggcttgaagggcacgtttacgttggcagtacctgcaatggctgcggatggtacgtttgccattacctttaattccccagcttatctcaaaagcttaaagattgactatctgacccaagctcctgaagaatacccgggcacgccaagcaacgttaaggctgaagatgctgattggaacctggcggctggcagcaagcagattgcgacagctcaaaacagtcgggctgagtatcttggtcttaagatcgatgcttcaacggctggtgccaagtttgcgcctcgcgataacaatgatggtaccggtcttgatactcaaatcaatagtggcacgattatctatgttccaatcgcggccaatcaaaatggcgtaacgctcaaactagcagggcaaaagtcagctggtttgacgattatgctaaacaatcaggcagttacgttgggaaatgagattaaaattgatgcggtatcaacaccaacctatttgaagattcagtttgctggtacgggcagcgcctatctaactgacgttgcagtacgctacaatgtcgcttatccaggtacgccaacggtttcggccaaggatactgactggaatctcagcaatgacaatagccgaccaaccgtgcaaaacaatcaaggcgaatacaacggcttaaagattgacgggacgaatggtaaattcgcaccgcgggcaacggacacgcaggttaatggcggtacgattatctacattccaatcgctagtgatccaaatggtgccaaagtgacgatttctggaacggctaatggccagacgctgacactggatggtcaagcagtcactttgggccaggccattaatgttgacagtacgtcagctcattacctgaaactgttggtcagcggtacgggcagcacctatctgaccgacattgccgttgactatggcagtgatcagacgaatgatttccctgggacgctgccaactggcaaatcagaagatatcagctgggatctggcgcaagctggggatcggccaagcgcagaaaagtcaacgacgtcatataatggcctgcagattgatgctcgcaatggtaagttcagtccgcgcgcaaccggtgatacgcaggttaataacggtacgattatttacattccgctttatcaagatgccaagggagcaatattaaaagtatccggcaacgccaatggccagacgctgacattagatggtcaaagtattacattaggaacgccaatcacgcttgatgcaacgacggctcattatttgaaactaacagttacgggaacaggcagcgcttatctgactggcattgatctggattatcttagtgatgactcgtaccagacccatgtggttaaagttggtgctaatgaacaataccaaacgattcaaagcgcgttggatgctaatcaatccagtttaaaggatcggctagttttggcaattgatccaggcacctatacggaagcggttcaggtaaacaaacctggcgtcatctttaaaaataccgattcaactggtcaaaaagccgttgtcattacgtacaacaactattcttccaatacgtttgatgccaatggaaactttgtgccacaagacaatcatgatcttggtacttctaaatgtggtactgtaatcgttacggctgcggcaacaggatttagcgcggaaaatatcacgtttgaaaacagctataacgttactgatcatacgaaagaaggcgaacagacgccggcagttgcttttgactccttagctgatcaggtttatttaaagaattgcaattttattggtcggcaggatacggtttatctgcagggcaagggcaatcgggtctacattaatggtggtaagattgaaggaacggtcgactttatctttggtgacgcgaatgctttgattgaaaatgctgcgattaatatggcctactatcctggacgcaagacggggtattttgcagcgccaaataccgcaaagagccaaactggtctggtatttaacaactgccagctgacggttgacaatcagtatggcagtaacgcggccatctatttagcccggccatggcagacgactgtccaaacgaccagcaaagtagtaaacggcaaaacgattctgacggcttacgatccaaataccaaagatgctagatatgcggatacgtcttcagcagtcacgtttattaattgtcagctgccgagtggtcttgcgcaaaacgtgttcgggggttggacaggcaagtatgaagatgctagtggcaagcaaagcacggttgacattacctatcatcctgatgtacggtttatcgaattcaacaatagtacgacggctgataaaaagagcctgacggatgaaaaaggcaatgtgttaggaacgattcagaccggggatgccagtgcctatcttaagcaggtgatgtctgaaatgaagattgacacgacagctggtgcttggcagcctgttgataagctttaaaatatagttagaatgttctaaactaaaagagttgactcggttaaatccaaggcagctctttttaattggaatttttttggagatgatgtttttgcggctattggtaactggtggggccggctttattggcagtcactttattgattatgaacttgcacacgatcaaagcattgagatcgtaaacttggatgctttgacctatgccggcaacgttgccaacaatgcgcaggcagctggcaatgctcgctatcatttcgttcatggcagtattaacaatcgagaactggttgactggctgctgcaggaatttgctattgatcatatcgttaattttgcggccgagtcacacgttgacaattccctaaaaaatccggagctctttaccaaaaccaacgtcttaggcacgcaggttttattggatgctgcttatcaggccaatattcaaaaattcattcagatttcaactgatgaggtctatggtacgatggcgcctgggcaagcggctaaggaaaccgatccgctgtatcccagttcaccatacgctgccagcaaagcaggggcggatatgctggcgatggcgatggtacacacgtttggcatgccaatctgcattacgcgcagcacgaacaactttggcccgcgtcagcatcatgaaaagctattgcccatgctgattcaaaatgcgctgcgcaatcgaccgcttaccatttacggtcaaggtaccgaccgacgtgactggttgtacgtcaaagacaactgcgcggccattgatttggttttgcgtcatggtcagttgggccagatctttaatatcggtgcgcatcaagaaaagagcaacaatgaggttacgaaaatggtgcaggcggagttgggcttttccgatcagttgattcgtcacgttgctgaacggcctggccatgatctgcgttattcgcttgataccagccagattgaaacccaactgcattggaagagtcagacagattttgcgcttggcctgcaggagacgattgcctggtatcgcaagcatcagcgttaagttccagcgcggaagtccttgtattaatcgattggtcaaagtgtggtccagtttcagcgcggaaattcccatgttaattgactgacggcagccttaaatctgttttgcggtcgttattatgatggttccctactttcgataagttaatcgttgttcatcaagaactgttagtggtttgagaatttggctgttgcaaataaagtcaggctatgctgaaaatatgattgttccaagacaataatttcaagtactaaagcgccggaccacctttacaatcgttcgacgtttttataatgtaatgatttctcatcgggaattattgcagtgcattttaacgaattagatgaccgtctggcttttatgctgaacggctttatcaaaagaataacaagatctatg

SEQ ID NO: 1856 - DNA, 1778 bp, Unknown
  gut microbiota DNA sequence
ggtcggaatggcttcttacggtggctaccttggcatgttcgactgggcaacggtatggccattcttcacagtaattatgaagtaccttggctacgtaggtattgcggtagttgccttgatcctgatcatcattcctcagcttcaataccgtgcagacccagaaggatatttcttggttacgaaagactatgaagcatggaagaagctgcatggtaaaagcgatgccgaatagctaaatacaataatattaaagactaactgaatgattacaagcttgattgcttgaggaggaaaattatgaaagttttgactgcatgtgctaacggttctggtactagtttgatgctgatgcgtactgctaagaagacattggaaaagatgggctttaacattactcagtgcgaccatacctctgtttctgaggcaaaaggaactgctcgcaactatgatgttgtattcacatccttgccgtttgtaaagatgttcaaggatgttacagatcgtggcggtgaggtcattgggattaagaatgttatgtcacaacaagaagtcgaagaaaaggtcaaggcttctgatctggaaaagaaattcctcaacaagtagtcaacggttaaaaggagtattaagatatgtcaatgccaaaactgcaagtagcattagatactgatgatttgccaactgctatcaatgtagcgcgtcaggttgtagatgttgtagatgttgtcgaagcaggtacgttgctgatctatcaagaagggatgaaggcagttaagtcacttagagccctggcccctgacaagattctgctcgcggactgtaagacggcagatgcgggcggtcatgtcggccatgtctgcaaagaagcaggcgcggactggatgacctgcatctgtgctgcaacgacgccaacaatggccaatgcacaaaaagaaattgaggttcaagttgagctgtatggaaactggactgaagaacaggcgcaagagtggttggacaatggtattcatcaagttgtctatcatcaaagtcgtgatgccaagtttgctggtcaaacctggggtgagcatgatctgaatgaagtcaagaagttgattgatatgggctttaaggtttccgtaactggtggcgttaaaccagatgtcttgaagcttttcaatggagttgacgtatatactttcatcgcgggtcgtgcgattacccaagctaaggatccacacgcagcggcacaagaatttaaagacgagatcaactgcatctggagctaattacatctaaacacttcttgggctggcattgcccaggttcactctcttttgcatgaaaagcgatggatggcacacgagatgtgtaaatccatcgctttttgctatctagaaactgattgaatggagaaatcgatatgttacgtactgttaaaggaattgccgccagtgacggtattggaattgctaaagcatacacccttattgaacctgacttaagctttgaaaagaaaacgattgatgatccagctgcggaatatcagcgcattgaagctgcttttgaccagtcaatctcggaattggccaccatcaagcagaacgccaagagccgcttgagcgatgaggaattggaagtctttgacgcgcacatcgccattttgtccgacccggaaatgaagagtcagatcaaagatgaaatcgaaagccagcacgtttccgccgaagaagccatgacggacgtaacgaccaattttgccaatgttctggccgccatgaccgacaacaagtacatgcagg

SEQ ID NO: 1857 - DNA, 1245 bp, Unknown
  gut microbiota DNA sequence
tgcaagatccgacaggtgatgacgatgtaggagctgattaatcatgggagcacgcgagcgattcgaacaggcgactgattacatcaacagtctttattctgggttggaagatagtatctttaagctgattatcaatgctttaaaagatggcgactatcagcatgtggatcaatctgatgtggtcatgtggcaggcacagcaactgcagaagattggcaggcttaatcaagatgcagttaagcttatggtacaggtcgacggattaagcgaagatgctgttaaggatctgattaagtttcacggcatgcagattatcgatgagattgatggtcagttggagcgagctaccaagcaaaaccaaccgctgtctgctgatgtaaccaacaagctggatgcactggcggaccagacttggactgacctgcaaaacaacgtcaacgaatcgctagtgacgcgtaactaccagcaatcagccatcaccaaggcctatcgtcagattttaaccgagtcaacgatggctaccgtatctggtgcgaccagtcatgaagatgctgttaagcacgcgctgtataaagtagtcgatcaagggctgccaacacgcttggttgataaggctgggcataactggagcattgatggctatacgcgcatggtaaccacgacaacagtcaatcgtacttataacgatctgcgcctgcagcggatgaaagactttgacatgcatctggcattaatgagcagccatcccaacagtcggccggcttgtgcatggattcaaggccatgtggttaatttagtaccgccagaaagcgatgactacgattccaagtacgacagcatctacaatcatgattatggcaagccgtcaggaacattgggcatcaactgccggcatattctgttcccttatgtaccaggcatgaatactaatcatcagccacagtacgatcctaaagaggcaattaagaatggcaaactggtacaaggacagcgtgcacgagaacgggctatcagggatgccaaaaaacggttgaaggcagccgaagaactcggtgatactgaaatggtcagccgtaccaaaacactgatcagagcccgccaagcaaagctgagggactatatcaaagaaattaacgccggccatagtgtgccaattctaacgcgagaatatgatcgcgaaagaattagatgatgagcactagcgtttactggtgctttcttgttaccatgacctggacacgtcgt

SEQ ID NO: 1858 - DNA, 14223 bp, Unknown
  gut microbiota DNA sequence
gcccccgcaattttggtccgttggtctagttttggttaggacgcatccctgtcacggatgagatcacgagttcgagtctcgtacggaccgtaaatggctcggtagctcagttggtagagcaacggattgaagctccgtgtgtcggcggttcgattccgtcccgcgccatttattatggaggagtagcgaagtggttaaacgcgacggtctgtaaaaccgttccttcgggttcggcggttcgaatccaccctcctccacttatggcggtattggtgaagtttggttaacacatcggtttgtgggtccgacatgcgtgggttcgaatcccacataccgcctctgttaaaagatcatgttcaagtaaattggacatggtctttttttgcataattttatgaataaaaatttcaaatctgattctgaattagttgcaaacggttgcttcaattcattacaaacgcttgcagcaaaaattttttgaccggcgtgataaggttcatcagcgcttattttgcatgcctttagagaatcttaaattcaattgaacgtttaatgatacattgtcaaattgcatttaaaatgataatttatataagaacacgcttacataatattggtaagtgggattttttaaaagggaagtgatgaatatttacttcatgaccagatgtttttataaactgtggtcagtgctgtagatcgattttgaataatttgatagtaatagagggattcatatggtaggaattgtattaacaagtcacggtggttttgctgatgggatcaatcaatcggcggaaatgatctttggtcagcagcaggatgtggcgcatgtaattttgaagccggatgagggaccggatgatattcatgccaagcttgaaaatgccattaaggacttttcagatcaagagcaggttttatttttagttgacttgtggggtggtacgccatttaatcaagcctcgagtctgtttgaaaagcatcaggatacctgggcaatcgtaacggggatgaacctgccgatggtgattgaagcattggcctcgcgaatgaccatgaattcagcccgagaaattgctacacatatcgttgaaacggctaaggatggcatcaagaccctgccagaagaactgatgccaaagaccaaggagccagctgcaccagccagtgccaagccagccatcaagggagctattccagaaggtaccgttatcggcgatggtaagatcaaatacgttctggcacgggttgattcccgacttttgcatggtcaggtggcaaccggttggaccaaggcaactaatcccaaccgtattatcgtcgtttctgataacgtcgccaaagacaagctgcgcaagaatatgatcaaacaggcggctccaaccggcgttcatgccaatacggtgcccattgccaaaatgatcaaggtcgataaggatccgcgttttggcgatacgcgggccatgctgctgtttgagacgcctgaggatgccttgcgcgctattgaaaggcggggtcggcatcaaagagcttaatatcggctcaatggcctattcagaagggaaggtcaacgtaaaccaggtcttggccatgaaccaagaagacgttgatacctttagaaagctcaagcagctggggattaagttcattgtcaaaaaggttccctccagcaatgctgaggacatggacgctttgctggacaaggctcaaaagctgatcgatgaacaaaagaaataaggggttttgattatgtctgcgatttcaatgatcttagttgtgattgtggcatttttggctggtatggaaggtgttttggatgaatttcaattccatcagccactgattgcctgcacattaattggtttagtaactggccatttggttccctgcgtcatgctgggcggctctttgcagatgattgctctgggctgggccaacatcggggctgcggtagcaccggatgcagccttggcagccgtggcctcgacgattatttttattcaaagtggcggtgagatcaaacagatcggaacggcgattgcggttgccattcctttggcggtagctggcttattcttaacgatgatcgttcggacgatttccgttgcaattattcatatcatggacaaagaagccgctaaagcaaacttccgcggcgttgatctatggcagatgctggccgtcagtctccaagggctgcggattgcgattccagcagcagccatgctgttcgttcctgccagtgccgtccgcgcctttctgggatccatgccggcctggctgactgatgggatgacgattggtggtggaatggtggttgccgttggttatgcaatggttatcaacatgattgccagtcgagaagtatggccgttctttatgattggttttgccctggctgccgtttcagaacttaccttgattgcaattggggcaattggtctggcgttaacgctgatgtacctgtctttggaatccaagggcggttctggcagcaatggcggctcgggcaacgataccggtgatccattgggcgacattttagatgactattaaaattcaagggagcgactgattatggcagataagacggaaaacaaaattagactatccaagcgcgatcgctgggacgtctgctggcgctcaacgtttctccaaggatcatggaactatgaacgaatgcaaaatggtggttatgcctacgcaatgattcccgccattaaaaagctttacaagaacaaggacgatcaggcagcagctttgaagcgccatttggaattcttcaacacgcacccttatctggcctcaccgattattggggttaccctggcgttggaagaagacaaggctaatgggactgctgttgatgacgttgctatttcaggggttaaggtcggtatgatgggaccattggcaggtgtcggggatccagtcttttggtacacggcacggccaattattgctggtttgggggcctcaatggcaatttctggcaatatcgttggaccaatcctgttcttcctgctttggaacgccatgcggattgcttttatgtggtacacgcaggaatttggctaccatgccggctctaagatcactgatgacgtttctggcggtcttttgcaaaaagtaacgcgtggcgcggcgatgatggggatgtttatcttagggaccctgattgagcgttgggttacgatcaagtttacgccagtcgtttccaagacaccgctgcaaaaaggcgcctacattgactggagcaagctgccaaacaatattcattcggtacaaaaagtattgactgaatggaacatgggcaagggcctgtcattgaccagctataaggttacgacgctgcaggataatctggaccagctgattcctgggctggctggactgctgctgacgtttctttgcatgtggctgcttaaaaaacgggtctcgccaatcgttattatcattggcttgtttgtcttagggatcttgggtcacgtctgcggcctgctgtaaggtgagtgaaatggttgaatcaatcaatgccaaagtcgaatacgtaacggatggcacatcttttatggggcccgtatcatatggcaagattatgattggcgatcgcggctttgaattttatgatgaccgtgacgtccgcaattttatccagattccttgggatgagattgacttggtaattgcctcattggtatttggcgggcattggattcctcgctttaagattcgaacacggcataacggtgagtttatctttgccgccaagaataccaaggcaactttgcgcgctgttcgcaaacacgttgatcctcagcatatggtcagagcgttgacgtttacgcagaaactaaagcgcggctggcaggggatgcacaatagccgcaagcattcaacaaaataaacgattgattggcacaagagaaagggcgcctcaggactgattcaacggtcttgaggcgcctttatcgcaatcaaaaatcccgacttcaagtatcaagccgggattgaaatcaattagaatttaaattcgggaaaccagatcttaatctcacgcgctgcgccatcaacggtgtcagaagtgtgaataacgtttcgcaaaacgccatctggccattcacgaccgaagtcaccacgaatcgtcccccattcagcttgaccaggattggtagccccggccatattgtgaatggcttcaacgacattggttccggaaacgaccatgccgacgatcgggccttccatcatgtaagtaaggatttccggccagaacggtttgtcagtcttatcgtaatagtggcgctcaagttcatcttgggtagcgttgatcatcttcaacgcttcaatccgatatcccttgcgttcgatgcgagtaataatgtcgccgatgtgacgcgtctttacgccatccggttttaccaaaaccaaagtgtattcatcttcgaccatattagcggcctccctttaacaaattatgttattagcatatcatatcgcctacttttgtcaagaaatcgctttcaaaataaatgatttttcttttcgtgtggttaaacgataggctttcgaattttcaaaatgaagatcttattttcatgccaaggctaaatacttgaaaataagacgagaatcagtagaattaaaccagcatagttagtcagagaatgatagccggttttaggacagactggctaaaatcgtgattagatgattggtaaagagagaatcagtagctgcctaatactgttgaattaataacagcgcatccaatgttcagttttgaacgcggatgcgctgttttcttttgaaataaactaatacaatgtaaatgatgaattgtgaatagtgaattgtaaaaaataaacagttaacaataggtataataatagtgaaaatcactgatattaaggcattttatctatcgctcagtaacctgtatcaatgtaaatagtgaattgtaaagaataaattgtgaacagtgaattatgaatagcaaattgttgattgatgaaaagacgtttgttaagtttaatgattttaacggtttcgcactgataacttagatcttgaatattttgcctatttctctagccagcaaatctaataatcgactataattaaatcaaaccatgcggaaggtgagactatgacaagtttattaatgatgtctgacggctgggggcttttctgccttttagtattaggcttgtttttaatgctggcagttggctttttgtggggcgatttttgtcggcggatgcggcgccatcggctagacgtgctgtcgcagcggcatccgatctcttggcagattctcccgttggattcgcctgaggcactgcgcggcttgcggatctttaacggttttcacaaaacgcttgaagctgctagcgagcatctggccaataataatcgtgatgcagctaagggaatcatggatcagtacatgacgccactggaatccaaggcctttttgcgggaatgcgagcagcgcgtgtatgaaagtcggcgtgaattagacatgcaattagatctggtgcgctgtcgtgaagtcaagctggaaggtcaaagaacgatttttgagctgacgacgcgccaaaatggtcacgagcagcgtcccgatggcaaaccggctgctgttagctatgagcgggttgatacgtttgtctgggatgagactcatgagaaaatgctgcgaatctggcgaggcggggctactggtcaggaactagaaatctggatctcgcagtttgtctacccctatggcaaatactggcagcggatgcgcaatgctgctttggccgttgctgtactgctgatcgtggctgcttttgtagtcggtatttgttttggcagctggccaatcaagagctgggagccaatcgtctgggcctgcatcatgctttatgttggacttggcctgttgttttcgcctttgattaattcagatcgagatgtagcggctgaagagtatgttcgttatttcaatcgataacctaatatacgttttattaaaatttgtttaacagtttcatgatgggtttttaataaacattaaatatcgtataattaatttatactggtagtcagttaataatgtcaaaaatgtcctgctcgatcaatgcaatgtcattaagcactgagcttgacaatattattagccatttgaggtcatctgattagtgaggcaatcacttttggatggccttttttgatgtctttgataaattgaattggtaccgacgattttatattttcgtaaaatgggtgcagaaaatcttagcattcgcgcaagattcatcagttgctctgtgatgagttacgcccgattatgattcaaatatgattcaaacttttcgtaatgttaaactaaatagcaacagcattaatttacattaactaaaaataatagatcaaactcgaaccaataattaagtgaatgtttggcgtcaataaaataatgacagcgaccaagaaaatgatgctgattataacgagagagtaaaaaagtggcaattcatagttagtgcctcaagaaaacttgtgttggaagcctgataaaacgattttaagcagatctggtaagaaaggcatccataatgataagaaacaaagcagcaatcatatctcaaatgaactcagataaaaaacggcctgaccgcaggaaagtctgctgccaagccgtatcaatgaatttgatttatcatgcaattttagaagaaaacagtgcctataaaatgttcaatacggtactgttttttatttagcgtcatggtgctgttgttctttaagcatctgtttgatttccaacagttcctgatgtagctgcctattttcggcgtgcagcttggcgatttcttttttggtgacctcatgcggattggttggttcaaaataagtcgtgatcgtgctggtcaaaagtccaatgatgctgacgcctacgaccatcagcaaaactgcggcaatccgtccccagagcgtagtcggcgagacatcgccatagcccacggttgaaacagtcgtcaaagcccaccaaaaggccgttgaaaacgaaacgccctctgagatgctgtacatgccggacgcgataaacagaattccacagctaaggtaaaggtagtagatcagaccatccgtgtgaaagaatcgttttaagcggaccgtcagaccaaccaggcgtaaaagccgcaagacacgcagcatgtgaaagacgcgggcgacacggacaaaacggaatagcgtgaagattgagttggtcgggatgattgagagcagatcccagatattttcattgaaaaattgaattttgtcttttgcgattgccagacgtgcaaagtagtcaactaccagaattgcccagataccgcgatcgatccaaacgtaaggcgactggctgaggattaatggcatgagcgcagtcaaacaacagcagcagaattgaaactaaggcgatcagcgcgataaacagctgatagagtaacagaattttgtgtttgcgaggattcatagttaattttcccaatagtatagtaattaattaaataataattcgtttgtggcaaggtgacaatagttttgcgtgatcaatgcttcaattttgcgttgaattttagtggttgtattccccatgaatgtggagacagtctgctcaactgagactgattgataaccaaaatagcgctatatcaagctttgaagcctggtatagcgctattggcagttttagacctgttgattgaaccgttatgctgaagctttgttggcaccgcgacgtttgatcagccaactggcaactgcagccaaaagcatccagatcaaaccaaacagactgattttgcagccaagagccaaacctggtacgtggtagtgtaggacaacgcgatgagttcccgcaggcaggcgcagaccgacaaaagcctggttggtccgcaacagagtggtctttttgccatcaacggtcgcggtccagcccgttgaataagggatcgaagaagtcagaataccgacccgcgaagtcgtaatcgttcccgaaagttgattgcgcttgaatttaacgtttttaagcgcatgttcttgaatctggcgaacttcttgattgtatttgttccccagtttttcggcaactacttgatactgccattgataggtccccagcttagaaggcttgagagtcaaagaagtcggcattcctttagcaaagtagccaatattcatcgtaccgtttttaaccagcttgaaaaatgaaagcttgctttgcttaggctgttctatggtttcggaacctaaacgactggaaatcttgacggcaaaactcatatcaggtgaaccgttcagaatatggtagcgccagaatttatactggttaaagcgatgattgacgatatcgcctggattggtggactgctgctcttcatgcttttgctcataggcaatctgctgtttcattgaaaacggctgatacttgatcgaggcaaactcaacgtgcagttcgctgtctttgagctgttttttgaatgccttgctggtcaactgtggcagctgcagctgataggtttccagactgtcagtatatttaagaccggttgacttgatcttgttcaaacgatttgaaaccagctgcgatttaagtttgatgacgttgcctttcaaattggcggtcttcattccgttggtagcgtcgctgtttttagagctgaccgtaaccccactggccaaggcacgttccttggcagtaggcgacagcttctggtaggttttttggctgatgtaggaatcctgccaataaagcagcggaaaggcattattcgtccgatagcgattagtcgtggttggaaccagctgcgtctgatcggtcgggttggtaggctgcccgacgtcatagttgattttgggttcggtagtagcatcaaggaaatagccgcctggaattttattggcgttctcgctgttgctttgcacgaacagatacttgacgccaaagaaattattcaaaacggttcggtcatcaacctgacgcaaagggacgttggcttgatactgagtgttttgcagcgaggtgctgaactgtcccaggtacttgttttgcagggagtagtatgaatcgatattgtgcatccctgaggtcagatcattatccaaaagcccaccggaagtaatctgattgttggagatcgtggagacccggaaaaatgagccgtcgtttaagcctttttccaagccgccatagcgattttcggcaatcgactgatactgaccgcgcaccaatgtactgttggcgaaattaccgttataaggcgtaccgacatacagcgcgttgcaggcagcgttggccaaaataatcgtaaccagccagcgatcaggatgcggcgtgccatgcaggttaataatccaaagcattaacagcgacatgatcaaaaaaatgatcggcataaacatggtcgtatcgttttggaaaatataggttgccaccaagacgaccagatagatgccggtcgcgctggttaagatccaaagcgtatgccgatcaagacgggtcgcattctgcaaaagcaggcagaccgtcatggcaatcggcagatagatcagcagcgtccagcgattggaggccgccatcatgccattgaaaaatgcccctactgccggaatcagcagcataaccaatgccagggccagactgattgataaaagcggaaattcgcgggttcgcgtataaagatagacgatcgcgataaatgcaatgctgaccaagcctaatgctgaccagaacataaacgtccactggtcaccattgatcagctgtttgggcagaaacagatagtagtagagcggatagtgtttaagaccattggcaaattcagaaccggcacgagtggaattcataacggccatgatttctggaaccaaaaggcaggctgcgactagaatgctggtaattgcggcaaaggccagcttagccagggttttgccgtagctaagcgtggttcgataatgagttgccacgcggagtaccagatagataaaagtgccgattcctaaaacatacgctagatagtagttgttgaccaacatccacaaaaaagccaaggtaagcggccaggctgagccgttttgcaggacgcgctcaagctggacgaccagaatcggaaacagaataaatgtcgtcatgaaaaacggttgggcgatgctggcatacaacaggtatgagttcaccatatagactatggcaccacctagaataacgtggtcgcgaaaagaaaaatggccagcaaaccagcagaacgtcaaaccgacaaagtacgttcgcacaacggtaatgacttgataggccagcgttagtttagctgctgggaataataatgccagataggcgaaaacgtcaccaatcgtatagtaggaaaagacctggaaagtatcggtgcccagtcccatgttccaagaccaccagtttaatggccgtgttgggtgatggagccagcccaggacgactttacgatattcgccgagcagcggtacgtgctgatttaaggcatccttattccagatcaacgtatgtccggtgatagcatagctgccgaacatgcacagcgcgatcaaggcaaacattaccgtatatttcagatatagcatgcgatgatcacgcttttcgaatgagaagttcattgaaattgctccttaaaataaaaagtacacccttctattctactatagatttttgtaaaccttgccactgaaaatattaaggtattttaatgaattactggtttttaaatcaggttggtctgcagcgctctcaaaccaagctgatcggctgttcaaaaataaggttgccgaaagtacgttcgcctgttaaaatataaatagcgaacatatgttttaattatgtctagccggaaatcccgtgactttagtcatgggatggataggcttccttaagacgttctttttgaagcgcattgtatttcttttctttagtcattaagaacactgcaatcgttatagtcattagctgatgatataatccaattaaaggaggtgaaaaaatgaagtcaatggcacagttagaatatcattatggattgaaggttcgcatctatccgagtgattaccagaaacaaataatcaaggttaatagcgatgccagtcgtttcgtctataatgagatggttgcgatcggtaaagaactctggcaattaaaccgaatcaaactgtcgattgatacggttcaagatcggatccaacagctaaagcttcgtcaaaacgctaagcagatgtcaaatcatttccagtttttagaagataagcgtattgacagtcttgctaaggctaatgccattcaaaactatcacaaggcttggaacgcttttcgcaaggttcatgaagccggtgtgccaaaatttcatcgtaaaagctatgcctggcgataccagaccaactgtcaatacccaaagcaaaagacggcccggctagataacggtaccgtctgctttgaagaccgcaaacatattgtggtgcccaaactaggacgtttgcggatcaaaggcgctcagcagcgactattggatcgtcaagacgaaacacgcattggcacggtgaccatttccaaagatgctgccgatcgattctttttgtcgctgcaattaggttccgatacaccgtttgttcctaagcttagccgcactaatcggcaaattggcattgacctaaacacagaaaactttctgactgccagtgatggtcgaaccatcgctaacccacgctactatcgaacaatcaagggaaaattagctaaagcacagcgtactctttcacgtcggcagtgccgggctaaaaaagagcagcgttctttgcgagaaagcaaaaactaccagaagcagcgcttgttagttgctaagatccatgcacgggtatttgaccgacgccgtgattttctccaacgcacgtctacagcactgatcaagaaccaagatctcgttgtagccgaagaattgaggagtaagaatctgctaaaaaatcatgctttggcaatgagcatcagtgatgttggctggcggtctttcttgggtatgttgtcatacaaagccgacctttatgaccgtcaatttatcacggtcagccctaaaaacacgacccaaacctgtcatgactgcggttttgtaatgggaagtgacgggaccaaaaagctgacactggcagatcgtgaatgggtatgtccacagtgccatgttcatcatatccgtgattataatgcagcactgaatattttagaaaaaggactccagaaacaacaaaaagcctagtcgaaaagctaggctcattcctatggcaacctgggaatgtaaaaggcattggtaattagatgatcactgctcaagcaactgcggctgtttgagtaaatcgtccgtatctatgcaaattgtggttcggatactcaatactggggtgtttgcccacaagccatcgactttagccgatggtggttgacagaagattctcgaggccattgactatttgatcgatgcattacggcttaaaacaactgctgaacgccagctgaaagtttttgaccaatcgattctgcaagactatctgcacgtaattgaactgactgagcttgaccagatcgatgcgcagcggctggttgccagtctgcagacaaatcggcgggcacgtcatcagattaaagaccttaagatcatcttatcggcgctggctaagtcgtttgatgttcagcagtttttgaatattctgctgtcagagccgtcattgggcagtcaatactattttcgtgattaggcaacggccgcaaagataagagaaatgattcattaaaagctggtgaccgcggctttcaagtagagaatcagtcacgataaaacagctctgccaacaaaaaaagccgcctctaaagaagacgacgtttagcttagcgttcaaggtaggcaatcaactgaggcagctgctgttccatttcaatcagtccctcatcatgaaagccagccagttttttgacgttgttttcaaaccggctgaccttgactggtttttgcggcgtaatgcagtaaagctcatgattggcaaaagcagcgtcaatctcattgcatcgctgattatatacttctggccggttgatgccttcttcggcaaaaaccggatagtctttgtactggcgacgataaagcgccttgaccaggggactggaaggctttttgcgataggcggcctcacgcgttctgacgacgacgatcttatcgaatccttgttccttagccagatcagtcggaatcgaatcagcaattccgccatccagacaaggcccttgatcagtcagctgcggctcaactaaaaacggcattgaacaggaagccttcagagcagttaccaaaccttcccgccggtagtttacaaagtcaattcgcttgccagtttcaattgaggttgccaccgctgtaaagttggatgcggagcgctcataggcatgatggtcaaattgatgccagtcccagccatgatcatcaaacaaaaagtccagattgagaatgtcttcgtgatgcaggccgcgtttgagcgaaacatagtcagaatcatgacggtagctggtattgacgtgatttacatacccatactgcttggccacgtaacaggcaccacataaggccccagcagaaacgccaatcacgcttttaaactcgatgtgatgcttgagcaggcaatccaagacgccagctgtgtactggccacgaaaagctccaccctccaaaactaatgccgcgttgtaaagcattgcaatccctctctcttcatgcatttaatcgtattgaatatgattataataacacatcacccaatcaatcaaggatcattaagctgcaaaaagaccgcaaagccatcgttgtaaacagctttacggtcgcagaatcaagattttttattttggttggctcgcttttcctgttcttcagcctgtttttgaagctcacgattgaccagttcgggatcagccttgccaggattaagctccgtgattttaccggttgccgcgtagatcacccattcgaccaggttgacaatgtgatcgccaatccgttccagcagatgaatcacggtaatgtagtgactgccatccttaatcagttcaggatgggcgtgcatgcggttgatgattttttcatggacctgcacgtattgtttatcaacttccagatccatgttggcaacaga

SEQ ID NO: 1859 - DNA, 30931 bp, Unknown
  gut microbiota DNA sequence
ctagccattttattatcgttcagccacgttatgataatggggctgaacgattttttctttttctccaaaaattgtaaaacgacgcagtcagtaaatgatcactgatgttttttatgcttatgaaagcgtcaaatacgaatttgctatgaaagattgatgtccaaaagctttcgttaaatagtttaggtgaagtatccatcagcagcttttgcacgataacataatgaaaaacacgctgtcctaaccttggtatggctagaacagcgtgtttttggctgctggattatttctgcttgtcttttaaaagctcaacgatttcagctaaatatttttcctcagcacttggttcaggatcagctggtgcttcatcgtgacttggcatcagcttattgacaaacttcaccaataaaaagacaacaaaggcaataattaagaagttgatgactgagtttaaaaaggccccatagcggaagtgcgcgtcgccaaaactaaagaccagattagaaagatcaatcttgcctaagaagattccaatcaatgggttgatcagattcttaaccagcgcattgacgattgacgtaaaggccgagccgatgattaccccgacggccatatccatgacattgccgcgtgaaataaattccttgaattcctgcaacgtttttttcattaaagtatctcctgttattcttagagcaacagtaagattatatgctaaatcaactaattgagcaattaaaaattaaatttagtatccatataattaaaaatattatagttattaaagtcaatcaagtgactaattattgcttgtaaaattaagaaggttgattgtataatattagaaatttttaatttaagagaggaattctaattatgttcagtcaaattggtgaactcatttttaataatgaggccgttgctaagacttctgattttacaatgggattggaagtcgagatgcagcgcgtggatgaaaccggcaatgtcagtcaagaaccgtatccggccgcgattggcgatgaaaagaccaatccttggctgaccaatgactatttggagacgatgcctgaaatggtgacgccggccgccagccactcattggatgcaatgcattatctttataaaatcaataatgcgctgcgtgcggccctggctcctggtgaactgctctggccactgtcaatgccgcctaagctgccagctgataaatcacagctgcgtttggcaaagatgggacccaaaaaagaggcctatttgaaagaatggaccaagcgtcacagctattcagaggggacgccatgcggagtgcacattaatctaagcattgatcagcatattatcgatctggtcaaagcaggctttcccgataagtttaaggacgaaaaagcagtacgcaactatctgtacgcggttttggcgcaaggattcgttcgctattgctggtttattacctatctgtttggtgccagcccaattgctgaggccaactattttgaaaaagggcaggggattgaccatccagttcgcagcattcgccaaagctcatatggttttgggaccaaatttcaaggtgactatacggatgtccaaagctacgttgatcgaattgaagacggggttaagcagggaattttgacctcagattatgaatttcatggcagcgtgcggttcaagggcaatgccaacctaaaagagctgcccaagactggggtggaatatattgagctgcgcatgctggatctggatcccagcagttcagttggtgtcagaacggatacgctgcgttttattcgtctgctggccagttattttattatgcacccagccctgccgcttgctgaggttaatcgagtcctggataatgccgacgagatgaatgatgtggtggctaaagaactgccaactgaaccttgccattatcagaacaaggctttggcaatgatcaagagtctggagcgctatgccaaccagattcaactgggaccagaattttctgagattttggaagatctggaagaccgggttatcaatcctaaaaccacaccgagtgctaagctgatgaactacgtcgaaaatgattctttagaaagctatgcactgcggcgggcgcgtcgctatcaagaagcggccatggaatcgctgcatccgttccagggatttgccggtgatcatattccaaatgccgacgagctgaagcgagaacttgataaatagacgaatttaagattagacataaaaaacggcactgccagcttgaagcttgcgcagtgtcgtttttatgctagttgttttgattatcggtatgatgacgcttggctgccaccttggctgagcggcggataaagtcgccaaacaaggcctgtgattcgcggtaatgcttgtacatgttttcaggatgccactgcacggccagaatctgatcactgtcatttgattctaaggcttcaatgactagatcctgcgcgcgggcagcgaccttaagcgaaggcgctacccgatcaatggcctggtggtgtcgcgagttgatgtaaggatgcttgccgatcagcttgtagaggcggctgtccaggtcaacatcgatatgatgcgaaggcagattgcctggggcgccttgaacatgttttaaatgagcgtctggattctcagaaaggtcttgatacacggttccgcccagtccaatattgatcagctgcataccgcggcagattcctaaaatggccttgccggactgaaccgcccccttgagcagcgcaatctcaaacaggtctcgtttacggtaggtcattcccagattcatgtgtggctcttgaccgtaaaatgttggatcaacatcggccccgccagcaaagacaatcccatcaaaagtctcgagatattcaggcgctaagtcgggctgcacgcttggaaaaataatcggcacgccccctgatttaacaacggcttcaataatcggccgcggcgcaaatggagcattgcgctcgttgataacgttggtggcttcagtcaaggttgcggctggaatcgcaatttttggtttcattagaaaaatcccccatttgcaaaaatcttattagaatgaacttatcatacttaatcagaaaaagtacagttaaatgctgaaaaatattaaaaaaagatgataaagcgattaatgaaacggtcagtatcagttggccgctgtgattaaattttttgcaaattagttacaatcgccgacataacggcatttggtgacgagaaagctgaattttaataacgatttacccaaaaaacgcaattgacaaagcaaccaacagcgagtatctttatttgcaatgaatgaatgtcctttaagtttagtccagagaggctagcaaggaaacgaattaaattgcggcatggtgaatgctgttttcgttgaacgctgccctcaaataagggtggtgtttttttaaggacaaattcacaaaggaggatttttgatccgccatttaaaggacgacagtgagcgtccaaacggttactcgtgaatttaaggaaggattttgtcaaaatgttagaacctatgaaccttgtccgcttagaaaactttgtcagcgtagaagatctgtcggctgatgaagtcaacgctttgattgctcgtgctgaatacttcaagcgtggtggtgccgtaccaaagctgaacaaaccagtctatgtcgttaacggcttttttgaaaactccacgcggacgcacaccagctttgccgtagctgaacgtaagctgggattgacggagattccatttgatccaacgcattcttcagttaaaaagggtgagacgctgtacgacacgatgctgacgatgacggcgctgggaattgatctggcagttatccgtcacagtgaaaacaactactaccagccactgatcgacaccaaagaaaacgaacaggccaacattggaatcgttaatgccggtgatggttcgggccaacacccatcacaatgtctgctggacgtgatgacgatccatgaacagtttggtacctttaagggcttgaagattgccattatcggtgacatcagccactcccgcgttgcccgcagcaatgctcagctgctcaataagctgggggctgaagtctacttctctggtccagaatactggtttaatgaagactttacgcagtatggtcaatacaagccggttgacgaactggttggcgagatggatgccatcatgctgctgcgggttcaacatgaacggctttccaatgatgatgctcacgaaaaggacttcagcaaagaagcctaccatgaaaagtacggcatgaaccaagatcgctacaataagatgaaagacaatgccatcatcatgcacccaggtccaatcaaccgtggcgttgaactggccagtgaactggttgaggcgcctaagtccgtcttcttccgtcagatgcaaaatggggtcttcatgcggatggcaatgattgaagcagttctgcgcggtcgtaagttgggtggtttggaataagatgacgacaaaactgatcaagggtggtacggtctttgtaaacggccaattggttaaaacggatgtccgaattgctgatgacaaaattcaggcaattggcaacgatctgccggccgccgatgaaacgattgatgccaccaataaattagtagcaccaggactggttgacgttcacgtgcatttcagagaaccgggccaaacctataaggaaacgatcgaagccggcagcaaggcagctgctcatggtggttttaccacggttggcgccatgccaaacgttgatccggtaccggacacgccagcacacatgcaagcacagacttctttgaatcaaaaagaaggggtcatccatatttttcaatatggtgcaatcacgcatggacggaccagtgaggaactggttgactttcatggcctcaagcaggcaggcgcttatgccttcagcaacgatggcagcggtgtccagacggctggcaccatgtatcaagccatggaaggcatcgccaaagaaaagatgatcttggcagcgcatgttgaagatgattcgctgctgtttggcgggatcatgaatgctggcaaacgagctgaagaactgggactgccgggtgcacccagcgtttcggaatcggctcaggtggctcgggatctggtcttagccaacgcgacgggggttcactaccatatctgtcacgtttctaccaaggaaagcgttgcgatggtacggtttgccaagtcacagggcgtcaacgtaacctgtgaggcatcaccacatcatctgttgctggctgatcaagacatcccggccaataactcatattacaagatgaatccgccgctgcgtcatgaagatgatcggcaggcgctgattgagggactgcttgatggtacggttgacatgattgcgactgaccatgccccacattcacaagctgaaaagccaaaagatgacatgcggggggcagctaacggtattactggcagtgagacggcttttccgatgatgtataccaaattcgtcaagggcggcatctgcaccttggaacagctgctgaactggatgagcaccaacccagctgacatttttggtctgcatgaagctgggcatctggaaccgggcaagccagccgatatcgtgattttcgacttgaccacgcagcgaacgcttaatgaagctgattatctttccaaaggcgtcaacaatccgtttaccggtgagcaggtctatggcacggctgatctgacgctggttgatggtaaggttgtctatcagcgataaaactattaaattcaaaccagatcgaaaagagcggtctggtttttttacttctcaaacatttgttcgcaattgagaaacgtgttaaaatgagataccaatccagaattaggaaaagaaaatggtgaaagctttgaaaacgataacttggcaagacatcatccgaatgcttaacagtgatgtctacttatatgaattaggtcgtaaatggggaaacgattttttaacttccgaacagcaggctgccatgattcgcaaatatcaaaacgaactgctagacctgcaggatgatctggcggactacacgagcttgccgctgcctgacagtgcaactttgattggtatttttatggcgcgctgcgtgattgcggaactgaccaatcaagagccggttgccagtgatgagattttaaaggttgattatagtgccaagccggatcagtttgattctcgctggacgatcacgatctataatccggttgctgatgaagagatgattggcgtagcggagctctcctatgctgagattttggggatgcgcgtagcaatcgatgatgatactgattttatggccgggctggctgttttattcaatgagattaccaaatcaggactttatgactgggagcgcagtgcggtgatctatcgtcagaatgccgagcagcaggcagttgaatccgctatgtatgattttatgacgcagacgcagcaaatcgcgctgtttttcgatgagtacgtggccagccatcccgatgatccgaatctgcccgatgagattgcgcttttttggccattgactaccggcattatggcgcccttagatgctgatgatccagccagtccgctgatttcaacaatgcagctggatcccaagctattggctaggttcaagctgcggtttggccaagcgtttcgccgttttaaaggtgagtagtctttcatagcaacaatattcgtgttttttctgatttaaacgtctgaaatatcggaacgctattaaaaatcattaaaattcacttcgattaatgattgaatggttaaaaatgttcgttcaatatgttaagataaatataatcattttctaagcagattttaggaggaacattatgcgggcgattttaaccacgattggcaaggataaaactgggatcattgcaggggtcagcagctatctggctcaaaatgacattaatatcgtagacgtctctcaaaccattatggatggatactttacgatgatgatgatggtcgatgtagatgctgctgctgctgattttgaaaagctgacccaagaactggatgctttaggcaccaaactgggcgttgacatcaacattcgcaaccaagaaatgtatgacgctatgcaccagctataggaggcctgttttggaaactgaaaagattatggaaacggttcgcatggtctctgaggaaaaacttgatctgcgaacgattacgatggggatctcgctgcttgattgtatcgacagcgacagtgatcgggcctgtcaaaagatttacgacaagattacgaaaaaggccaaggatctggtgcgggttggcgaggaaatcgaaactgaattcggaattccagttgccaacaagcgtatcacggtgacgccgatttcattgattgcggcggcctctggtgatcacgactatgtcaagtatgccctggctttggatcgagctgccaaaacggtaggcgttgattttatcggcggctattcagcactggttcaaaagggctaccaaaatggcgacaagacgctaatcaagtcgctgcctgaagccttgacgcagactgacctggtctgtgcatccgttaatgttggctccacaagaacggggatcaacatggatgccgtcaaggaaatgggggaagtcgttaaagaagcttccgaactggactacatgaacaatgccaagatggtgatcttctgcaacgcggtcgaagataatccgtttatggcagggggctttcatggcgttggcgaatcggatgtcgtcatcaactgtggagtctcgggtccaggggttgtcaaggcagcccttgaaaaggttaagggcgaatcaatggacgtcgtagccgaaaccatcaaaaagacggcctttaaggttactcggatggggcaattggttggtaccacggcggccaagcgtctaggcgccaaatttggaattgttgacctttcattggcccccacggcagcgattggcgactcaattgccgaaatcttggaagaaatcgggctttcaagcgttggcgcgcatggaacgactgcagctttggcaatgcttaacgatgctgttaaaaaaggcggcattatggcctgcagtcatgtcggcggactttccggcgctttcattccggtttctgaagatgctgggatgatcaaagccgtgaatgctggctacttgaacgtttccaagctagaggccatgacggcggtctgctcggtcgggcttgatatgattgcggtaccgggtgatatcgaagcttcaactatcagcgggatgattgccgatgaagccgcaattgggatgatcaatgccaaaacgacggcggtccgagtcattccggttcctggcaaaaaggttggcgatacggttgaatttggtggtctgctgggctatgcgccaatcatggatgtcagtcatgcctcttcagcagctatgatcagtcgcggcggcacgattccggcaccggttcacagttttaaaaattaacgataatgttaaagatcgtacttgtctggttaaattgacaattaacggtcttttttttattattaaatgagaaattgcggatttatttagaatatggtatcataattctaatatttttttaatttagaattgggagtggagaatatgagtgtccgggttcgcgacctattgaaactgccaaccctgtcgcgatcacacattgcagcaggcgaagcagggctggatcgaatagtttcaacagtatcggtaatcgactttacagcgacgtcggtggcccaacgagaactctatcagccggaaaattcggctaatgaacagctgctgctgacctcaattgaacaagacaactatgatctggtaacggattgcactaaaatcgaacagctggccaaaactggttgtgttggcgtggtaatttattatgttggtgagcgggtaccaagtctccctgctgaaatcaaggaaacggctgatcgtctcaacttcttgatgatttttgcccaggaaacgcaaaagaacatgacctatagtgccgttatctctgaaatcatgtttgcgattttccaagatcggatgcgtcatcccagctttgcaccgacaattatcggtcgcgtttcggcaatgccggaatatcggcgcagcgttggcgaggtcctaaagcttttggccgaacagatacaggcttcattggcagttatcgatgaccaaggcgagatcgtgtatcgtgaaaattggcctaaagaagcggttgtcaactgggaaagtctcttgaacgtggttgaaaaaattaatatgaatggcgagctgccggtaactacatctgatggtatgaagattacgcattggcgcttgccaaacagtgaggagacggtcttgttcgttggccgccagacggtaaccaatctgacgtgcgagcgagtggctgaaacgctgcagacggccttgaatctttggggcgggcagaatcaggatgatcaaaatctgattcgcgccatcattcaaggacagatcgttcgggccgccaaacttggtcgccagtaccgttttgagcctaaaaatacgcaggctgccttgattgtcagctgtccgaatgacgttaacaaagctaagatgaaaaaatgggttgatcaactgactgagcaatataccgaccagctgatcagtgactggtataatgaccaattgatcgtattgttggaaaagacgccttcctatcaaaactggcagaattgggaaactgactttaagaaggacgatcatcaattggctgctcaatgtgtcgtagtcgaagccgccttggttgatggcgttggcggcattcaaagactgtatcagctggtcactcaatacctgccagcagcccgtacgatcttgccatatcgcttgtttttgaatcaggctgatttagagtttgcgcggggctgtcaaagagagctgcaggaagaaggcactgaggtcattcgttggcaaaaacggttggactccatgcagcataatctggtagaaacactaatggcctttttgcttgacacgccgcagaatatagagcaggctggtgatctgctttacgttcaccgaaatacgatcaaataccggctgaataagatcagcaatcgatttggctttgttcccggcgtcatgcctgaatcgttcgagctctaccaggctctaggcgtccatcggcttttgcgcggcaatgatgacccaggcgaattaggcgaataaaacaagtgcaatggaaaattttagttgacatgcctaatgacaagcggcgattttattcgtataatattgcgtatagttagaaatctatctgcgaacgaagacttctaattagctgtcagcgtcggcaagcgctggcacacttcaaattttcctaattccgagagtagccagagaaaaccttgatataaaggctttccggctacttttttattttggtcaacagaaaaagtcaacagaaacatgctactgatcaagccggctgagcgattcgctagattaaagcattcggcgaccagccgttttaatttttgccgaaaagtgagttgcaactcactttaacgtccgctataatgagtgcatactcacttaatgaaaagagggaaacaatggaaaatacgattgcaattaccgacctccagattggctatcagcaaaaacccgtagtcaaaaacatcaatcttatcgttcgtcctggtgagattcttgggctgcttggtcccagtggttcgggcaaaaccaccttgattagggcaattatggggatgatcaagccaatgagcggcacggtacgcgtttttggccaagccatgccgaatcgacacctgctggaaaagattggctatatgggacagacggatgctctatacgatacgcttacagcccgtgaaaatctccagttctttgccagcctgcgcaaaatgccgcatcagcagactgttgcggagattgagcgagttgcgcgggtggttagtctgcagtcgtttctggatcgacgcgtggctgacttttctggcggtatgaagcggcggctttcattggcaattacgctgttgggaaccagtgagcttttgattttggatgaaccgaccgtggggattgaccccgagctgcggatccagatctggcaggagttaaagcagctggcagcagccggcaaaacgattctgatgacaacgcatgtaatggaggatgctgaacaggccacgcagcttttgatgattcgaaatggcgaggcgattgctaccggcacaccgcttgatctgaaacagcggtatgccgttgataacgttgaagaagtattcttaaaagcagggaggattcaagatgcgcatcttagcagtctttaagcgagttattttggaaatgctgcgtgatcgacgcacgctggctttaatgatgtttggaccgttgctgatgttgtctttgatttgggcgatgtttcagaccaatgccacgcaaacgaccgtcctggcgacacagaatgtcgatgcttcattggttaaggcagttgacggcaccaaacatctcaaggtcgtcaaacttgccaaaaacgaacggcaaacggcccgccagctgatcaggaaaaatgattacgcgggcgttttaaaagaacatgatgataaattaacgctgacattggcgaataacaacccgtcgcaaagcaagctgattcgccaaggtctcagtctggcaaagatcaaactggcactgcagaaccagacgcgaataatcaaacagcagcaggcaatgctccaaacactgcttgctcaattaccagcgacaggcaggcagctgtcagttggcagtcagtcaacggccgagaaaaaagttgcggtcaagtatctatatggcagtgccaattcgacttatttcgatgcgatttttccaattatgatcagttttgtcgtgttcttctttgtctttttgatttcaggaattgcactgctcagagaacggacgcgcggcacgctggatagagtcttagcaacaccgattcgtcgcggtgaattgatcagcggctatatccttggctatggcacgttcgcgatcgtacagactttgattatcgttggctttagcatctggatttttaaaatgcaggttttgggcagtctcagcggtgtctttttaaccaatattctagttgcgttggttgcgctcaccttaggccttttgatctcggcatttgctcaatcagagttccagatgatgcagtttgtaccaatcatcgttattccgcagcttttattctcaggcttgattccgtttgataccatgccgcattggttgaagctgatcggatattgcactccgctttattatggatccacggcgatgaccgatattattgaaaaaggtgctggtctgctgcaggttggcaatgaattgggcagtctcattgtatttgccgttttatttatctgtctgaatgtggtatctttgagaaaatatcgtccagtttaaaggagctgttgagatggctgaagatatttttgaaaacatgctggctaagatggatataacccagcgtcagcgggaagtattacgagccagcatggagctgtttgccacgcagggctttaaccagaccagtacgcggcagattgcccaaaaagccggtgttgctgaaggaacggtctataagcagtttaagaccaaacaagcgattttaacggcgattctgacaccgattcgcgaattggtgattcctcaagtagcagttgatttcgcacaaaatgtcttgacgcggcaatatccggaattaagcgacctggttcatgagatttttttgaatcggctggagttggttgataacaatcgcaactttgctcggttaatgtatggatcgtttttgggacagccacatctgcgccaagaagtagttgatgcctttgccaaagttgccacgcccttcattgaagtatttgaatactatcaaaagcagggcaagattcgtgaaggcctgacgatggaaagtatcgttcagttaatgatttcaacgattttgggctatacgaccaggatgattttatttggtcagcactttgatccgcatacggcagctgatgaaggggcaagtctggtactgcaaggcattgccaaaaattagctattaggccagtgacaactcaggtcaataaaaaacatcacctgacgatgaagtcaagtgatgtttttttataatttagatggcaattttatgatgatgccttgtcagatagaccaacagaaagtccagcagcagggtacagccagtaatagcgaagacggccgaatagctgaacaaaccggaaatagtggagccaagcagcgcgccaagtacggagccggccgcttgaaatgattgattatagctgaagacccggccaaaagcctcggttggcacttccaaggtcagaattgtctgggcagccggcatcaaagccgcgttggcaaacccaagcaaaaagcgccagaacgctagcatccaaggcgaattggtcaaggtcatcgggataaaaaggacggccgcaataagcaagccaaccgttaagactttttgcggaccaatgcgatccatggtatggccaactttagaagcggctacgagatttcccagccctggggtagcagcgacaatccccgcgacaaatgcgatattgccggtatcatgcatcatttccttaacatagagcgaaacgatagggttgattgacattaccgatgactgtaccagcatggttgtgacaaacataaccacaattaattgaacattgtcgatttggcccattaattcgcgcatgggcttcatattttcttttttaatcggcgtaaacttttctttaaccagaatcgaagtagcgataaaaacaccaaacatcaatccgccggtaataaagaatgggattcgatatcccaaggcgcttgatagggttccgcccaaaagcggtccgatcaggttgccggtaacgccagctgtcgtcatggctgacattacccaaccagatttgctgtggggggtctcaccagccatcaaggcaattgagttgttgatatagccagagaatgcgccttgtaaaaagcgcatgccgataatcatccagacattgactgaaagtccagtcaaaaaaatcgtacaggccatgacgccagaagcccgcatgcacatcagcttgcgacctttacgatcggcaagactgccccaatatggtgaaacgattgcctgggaaataaaagttgccgcaaacgccataccagaataaatattaagctcaaagcgcgagaaatgccccagttcattgataaaaagtgagatgaacggcatggtcatcgagtagcccattccagtaataaaacagccaaaccaaagagtgtaaaaagtttgatgccatttgctgggcagttcatgatgggtgccgatattcgagtcttccaaatgatcaccttccaatttgattgtataaatgaaccggattagcccaactgacgcttcttccagccaaggtagcgataaaagattaccagcattaagacggctaaagcaacggttacccacatggcggactgaacgccagttattaacgaagccggcaagccggaaataaccaccaaaagcgtgacggaagcagccccacaagcttggcgcagtgtattgttaagcgccgttccatgactgttttcttgaggtgccagctgcgagaaggcttcggaaagagcggggttgaacaaaaatgcattaccaatcagccgaagcatgtaggcaacggttaagacccagattggcatttgagcattgatacgaaccaagggaacagaagccaaaagcgtcaagatgccgccagtcgttatcagccatttaggaccgtattgatcgtagagccgaccagcaattggcgcaaacaaagcattacagatggcgccaggcagcagaatcaagccggattcaaagctgccgatatgcatcacgttttgggtaaagattggcaacagctgctcggttcccagcagaatcataaatgcgcagcagccgactgccgtcatcattcgaaatgaagggtagcggatgatctggactttcagcattggatcggccattcgcagctggcgtttaataaagaaccagataatcagcagcccaatcagcagcatcgccagcccgatcatcaagttgagctcaaagacggtcagactgcccaaaatcagtgatgatccgattaatgagatcaagaccgacaccagatcgatcttgatagggcgtggttgagagaagtttggcatcttaaagaacgcgcccagccagaccaaaagcattaatggcaagacaaaaataaagatatagcgccatgagaagtattccagaatcagtcccgataaagaaggtcccaaagccggtccagaagcaatcaccagaccagacattcccaaaacggaaccgcgcttttcaggtggatagatagtaatcatcgtcgtcatctgaaacgtcattaagattccgccagcgcaggcctgaaccaagcgtgccaatagcagcagccagaaattatttgcaaagcagccaatcagcgtgccgatgatgaaggtcccaaccgttgataaaaagacgctgcggttggtaaagcgttcgtagatgtttgacgataatggcgtgataaccccgatcagcagcgtatagccggtcgtcagccactgagcggcatttagcgaaacgtgcagatcgtttttaatcactggcaaggcggtaaccatcatagtttgacttgccagactgatgaaactggcaaccagcaggatgatcgttacgctgcggcgagtacgcgcgtcgacattggttgcggacataacagacttcctttcataaaatatcaagcaacaaaagtagattaaagatataatttcataccaatctagtctagcattgaaagcgtcatgcaaaacaagtccaactggatgatttttcgatttttttgcacagaggtcggtcaggtttgatatgattgttcttgtgaataaataatgaggtgacatgatgagcaagcgaatcgcggtattttccgacgtacacggcaatctgcatgctttgcaggcaatgtatgctgacagtctgcgccatagtgttgatgaatattggtttattggcgacctgttgatgcccggcccaggtgtaatggagatctggcagctgattaaaaaaatgcagccaagcgtaatggtacgcggcaactgggatgatttaacggtcaagggcgtgcggggacagatggatcttgaaaagccctcgcgaatctattttgctcgtttggcccagtacgttggcgagcatgtttccgccgctgtgattgatgagattgccagttggccgctgcatgttcaaaagcaggctggcaaattaacgtttggcatttcgcataatctgccaacgctcaacatggggcaggcgctgtttcccaccaatccagtcgagcattttgaccagctgtttgaaaatttcgatcagcaagacgtggccatctatgctcacgttcatcacagtctgatgcgctatgccagtgatgagcgcttgatcttgaacccgggatcggtcggggagccgtttaatggctggtggccgctgcagcacgatacgcgggctcattatctgatcttggaggttgacgatgatgggattgccgaattggactatcggcacgtaccttatgatcgtgaatcggaatatgagctggctgttgaatcagatattccttacctgcaactttataagcggacgcttgaaactggccgggtcaatacgcatgatcaagagctgcttgatcagatcaatcgcaaatgggactatctggctgagtaccaagcttatgccaaacgagttaggaaacattcctgacatattgaccaactaatggccgcttttttgccagattcccataatctaatttgattacaaaaagtaaggcaaaaagtttgcattcaaaaacgcaaattggcataataaccaacgaatgactatgcaaatgtaaaaatcttatttttaatcaaaatctacattaaatatggagggtagaaaatggccaaaaagtctaagattgccaaactcaagcatcaagaagcgctggttgaaaagtacgcagccaagcgtgctgaactgaaagcggccggtgactatatcggcctgtccaagctgccgcgcaattcggcaccggtgcgcctgcatcaccgtgaccgcttggatggccgtccgcatgcctatatgcgcaaatttggcttgtcacggctgaacttccgtgaactggcacacaaaggtcagctgccgggcgtcaaaaaagccagctggtagctaaaaaaggtccatggtctgaaatagtcagccatgaacctttttctttttgcgaacatgctgttatcagccgattcgcggtatactaagtctaaacaatcttttaagaagtgaagtgaagctatgctgaacagattagtggaatggacggtgcgtttcaatcagcgctcttttattaaaattacccgacagacattgatgctgctgtttccaatcgcctatgtcgggaccttggcagtgatgctgaaaaaagccttctttgccacggatagttttttctttaatgttgccgatctgggcgacatcatgccagactggctttggactggtattacggggctcacgggcggtctggccaagattacgtttgggatgtttggcgtgatggctgcctatgctgcggcccgctatactgccaaactttatcatcaggatgcaccgatggcagggatgaccggttttgccaccatgcttttgctggcctttcgctatacgcgtacaagtaatcccaacatgatctcatttgactggaatcttttgagcgtgcgcagtgtgttgtttgcgctgatcgttggctatggggttgggcaggtctatcgttggctgggaaaaggcggcgagcccagcgatcagacgattgaaacgctggaaaaaatgcagcagcgtgctctgaatgctatccgtccgctgtttttttcgctggcagtcggcgcggccttaggagcattgttcaactggctgacgttaagttcctggctggatcttgcctatacctggttggagaactttggccagggcaatcagtcgctatgggtggcccttcctttgattgccgtttcgttattgatgagctggctgggcattggcggaccaacgattaacacggctgctcagggattgaccggcgcggcggcagccaatctgaactacgcttttcagcatggctcaagctggaacgtgccatacaaatgcctaacttctacgctttacagctcatttgccaactttggcggtgatggagtcatgctggctttagtgattgccctgatcattgttggccgacagccggaaattcagcggttggcacgttggaacctattgccgaccctgtttaacagcggttatggcttgatgaccggtctgccagtaatcctaaatcccgtcttcttgctgccgtatctcctgctgcctttggctaatcttttgttgggcgctttggcaaccttaatgcatctgatcccggcaacgccctatccactgccaatggggactcctgggccactggcggcatttatcggttccaatggtgattgggaggcactgctgttttcattggtgctgctgatttttgatgtctgggtatatatcccattcgttcggttggcgcttggtgctgaacttaaaacacaacagatcgaggcggtggcataatgctgattattaatgataaagagcgccgacgcagcatgcgcttattgatttttgtcgtagtcttgctgattgtcctggcgtttccggcctacttttggatgaaagacaacaaccattatctggcacagcgcagcaaggctcagatgtcgccggtcattatgattccaggcagttcggcaaccaagaatcgctttgatgaaatggtgacgctgcttaataaagataccagtcacaagcacagtctattaaagctggaggtctacaacagcggtaagattacatatactggcaagatcagcagcggcgacaacgaaccgattattgtcgtgggttttcaaaataatcatgatggctatgacaacatcaagaaacaggccaaaatgtttgatgaagcctttaacgagctgattgatcaatataagttcaataattttaaagcatttggtcattccaacggtggcttgatctggaccctctggctggaaaaatactactcagattattcagactatgtaaagatcaaacggttgatgacggttggctcgccatttaatcttaatgaaagctcaaccagcaatccgacgcagatgtacacctactttttgaagcatcgtgaccagctgccgtccagcctggatgtctattcagtttctggtgccgatacctatactgaagacggcatcgttaaattaggcagcgtaagagcggggcgctatatctatcaaaaacaggttaagcactataccgagatgacggttaccggcagcaaggcgcagcactcgtcactgccgcagaatcgccagatcattcgtttgattgaagaatatttactggacagtgatcagcctaatgccgtcaatagtaaaaataaacgggtaagtcacagctcttcagtttccaatccataaattatgtttgcaaaatccctctgcaaaaggttattctaaatgtgacgtgcagactggatacgcatagtctggcaccgaaataaacagggggataacaatgaaaagacaacagcgttttgtcgagatcattctattgttgttgctggctttagtggtttcgttttgggggtatcgcggctatcgatttatgcaggcacatccgctggtcaatcgcgtctatcgctatcaagcatcatccgcagccaaagcagaattgaccagcacgccaaatgactaccagtatgtggtttttggcgctggcagatatcggggaaaatacatcagagttgataatcaaaaacagctgcgccgaattttaaatcatcggcaagcctatcaagcagcttttgatcaaaatggaacttactatctggttcgtcaccatcagctgcagcttgatctggggaacgtcccggctggcgagagctatgttcagacaaacaagcaggcttgggttgctcaatcagatcggcatgatttagggcagacagtaaacgattcgttaaagctgacctcaatgcatgctactaaacaggcagtcagctgtctgccataggtttgggtaacacttactgtacaaaactaaataactatactaagcatctgaatcattcaggtgctttttttattttttgtataataattcgcaaattcatggcttatttgcagaaatcgaattgattaatttacatttcgtacattaggtaggaatactaaatattatttttttaacgttgactgtttgtatatattcatttaagaggctagattgtttgcatatattaaaatgaaattaaaatcataaaagctgattttattaaaaagcttttcaattgacagatgaattaggaatgatttttatgggcaaaaaacgaatcatggtgattttcgggacgcgacccgaagcaatcaaaatggttccggtaattaaagtattggagaaggcggctgaatttaagccaatcgtggtggtgaccggacagcatcgacaaatgctcgatctggttttggagacctttgatgtttcgccaacttccgtagcggtaaaagccaaatagccataataagccgtaaaaggggtgctgattgatcagtcagataatctttgaaacgtcatttgctggtttgataatttatctagtctgggtttgttttttacttgcgctaggtcaaaacagtcaatcagataaagtcgagctgggatttgatcagtcgtatcggctggtgattttggttccggcgatgaatgaagaggctatcatcaaacagaccatgcagctgtttttaaaagaggctcatcagcttgaaaacgttaaaatggtcattattgatgatgcttctgatgatcagaccgcagctgtcgtcaagtgatttattagtcaaacgggccaagagagaattcagcttttgcagcgttagcaccccaacgctcaaaccggcaagggaaatgcactctatcatcagctggttttgcaggatggcgatccaaagcgcctaatctgcggcgttctggatgcagatgcctacatgacggaaaaaagctatcgcaaggtgctgcagtattttgccgatgatgaggatttggatctgctacagacacgggtaggcatgcttgaaaccaacaattggctgcagctgatgcaagatattgaattcaccgtaatcaatgattggattcaaaacacccgcaaccgacttggcaatgcggtagcttcgggcaatggacagtttatccgtgtcggctccgttgccagttcgcggccatggggcaatgcattattagaagattttgaattcagtacgcgttttttgatgcagggtaaaaaaacacaatatgccagtgatgctttggtataccaagaagccatcgccaaggcccgccctttcattcggcaccgatcgcgggcacggcgggtacagcggctacggcaccaaccgcaccgactgactctggctgcaagcgggtagtggttgtcatcgttgttcatgttcattactctggctggtatggctataactaccgccaaagccgctccatgtattggctaccacgcgtacaccacagctggcactcattttatggatgctactgctaaaaaactcgtctcaaagggcataaaagccgcttgaggcgagtttttaaatgatgatggcttttcaatcaatgaaggagagctgaacagatttaagccgatcgctgctgatccggctaaaagatgtttttaaataaaaagaacaccaacggtcccaataaggatggcagcatatccagtgtcttgaactccttgatttttaacagcgagaagccagacgcggcaatcagaaagccgccaacgattgattcctcaaccacgaaggcattggaaaagaaactggcggacagaaacttggcgattaaatagatgccgccaaaccagactaaaacgatcggcgtttctaaaagcatcccccagccaaagccggtcccaaaaataatgccgcagaccagcgtcagcatggcgttggtataaagcatcgtctgattgccattggttgcggcaacgactggtcctaagatccctaaagcaccaatgcagtctaaaaagcttgccgtggccacgccttcgccaagcttagaggaaaaacgcgtgctgagccagtggttggaacggtcatccagttgccaataggtgcctagcgggatcccaactgccaggctgatgataaaaaggaccgggtagctgcttttaggcatgttgctgatgaccgactgcagtccaacgccaagagcagcaaagcctaatgctatccagagggtctcaatgtatttttcctgtaagaactgcttaaaaaaacagccgattgcagtaccgacaactaccgcgccaacgttggcccagattccgatcatttaaaaaacctcgctttaagttaatctgccagactgagcagcatcagccagacattttgaacatacttaactattttagcttatttaatcgttataaaaaagaaattaccacagactctgaaacgatcaattaaagagtcaagaagttgagtactgatttaaaaaaagactgacatgtgtgcaggacaccgtcagtcttttatcaagatgagattatttattacaggttttcatctgtgttaaaattcaaaggacagtaatcagtcattttggtgatcaattcgagactcagctgacggtaggcgtttaaaacgtcggttgcgaagttttctgactgacgcgtcaaatagttggtcagtttggcgccggccagaccagctgccttttcgtcggttgcctgaatcatggcaatggccttggcgttgcagtctttttgaacatcacgaagcattggcagaaaatcgtgcaggtgactgtcgactaaaacgctggcatgcttaaagatccagtatgccgagttgagctgagccggcagcttgcctcgtttgtatggtgctggggtgtcgttgatgttgctgaagaatggaacaaacgttgattcattggcaacccccatggcaatccagtgaatgctgtttttggaggcgcgggacgtctgcagaatgtgggcttcctgtgttttagccaggctgatgggacggtagcgatgcttttcttcatccgaaccggtaccgattggatcaaacggcgtcccttcataatgtgagccaaggtaggcctgggcgtcaaagattgacagcttgcgttcaggcttcatcaaaaacggcaggtcagcagcttctggctgttcgttttgcgcagctttgggactgaacatttgatgaccataccaaacgcgcggctcactatagacggcatctgaacggtcagccgtaccaaagatctggcggaagttaaaggtaccagggtgcggattgagatggttcttttcgacgaattcctgaatgccaggatggtacatgaagttgtctggatcgttaaaatcaatctcctggatggctaattgattggcaacgacagcatagcagtcatcgggaatccgctgggcaacccagtagtgaccagcgccagtctcaagataccaggcctcgtcatcgtcagcaaacaaaatgccattggtttcgccggttccgtatttggcaaccagctcgccaagtctttgcaccccttcgcgagcagtcttgacgtatggcaaaacaaccgtaaccatggcctcttcgtttaagccttctttaacgagtggatcatagcctaacaccagatcgttggaataggcgctttcggttgcactcatggctacaccgtattcattgatgccggcttcttcaaataggccgtacttgtcggtccattccggcgttgccgtatagcgagcactgatcttaggcagcgtcagctcaagtttggtatctttagaaacgaattgagatggcatctcgccgcgcgcgtgaacaaccaggcgttttggccaggctgccttggcatcttcattgcggccgatcatgattgagccatcgcgactggcctttttaccaatcagaatgctggtacatgccgatagtttttgtgacattttcaagtccccttatttgaattttgtaactttatgtatttattttaacccaaacaatcaataaaattaaacaaaaagtggaggaaattaaataatggaacagctttcaatgtttattattatgttttcagccctgctgattccaatattgatggcgcgctttagggttgccagcgtacctaccgcggtggccgagattatcgtgggcatcatcttgggtaaaagcggttttaatctggtcgtgcaaacccgtgacctgactttcttatcgagtctgggcgtgatcgtcttgatgtttttgtcagggatggagatcaacttcagcctgttcaaaaagcgacctggggcacccaaagacaaaaagtcaccggttaatttggcggttgcctcatttgtcggcatcatgctgacggcgtttattctcggaatggcattgaaggcaactgggatgttcaatgacgttctgctggcgacgatcatcttttcaacagtggcgcttggcgtagtgattgctacgctgaaggaaaaagaaatcctcagccggccgatgggacagacgattcttttgacggcggtcttaggcgaggtcgttcccatgctttcactgacggtatatgcctcgatcaacggtggcaatgctgagcgcttatggatgatcgtgctgctgtttttggcggcgattctgctgctgcatcgcttcaagcagccatttatctggtttaacaaggttaccaaagcaacaacgcagctggacattcgattggctttctttctgatttttacgctggtgacgctggcagagacggtgggagccgaaaacatcctgggtgcctttttggccgggatggtaatgaaactgcttgagcccagtgaggccactcaagacaagctcacctcaatcggctacggctttttcatcccgatcttctttttgatgaccggtgtcaaactgaatctgcgcacgctgctgaccaatccgcatgctctggcgctgattccagtactggtagtctgctttattatggcaaagattacgccaatgctggtctttcggcagcgcttcaatgggcggaatgcatttgctggcggtttcctgctggttacgacgatcaccttggttctgccaacgctgcaggtcgcacgcaatctgcatgccattaccgcgacacagtcagatgcctttgtcttggcggcagtaattgtctgcattattgcgccaatcgtctttaactcggtctaccgtctcgcaccagaagacaagctcaaacagcgcgtcgtctttttgggtacgaacgtcttcagtgttcctgtcgctcagcagttgtcgcgtaactggtatgaggtacgaatggttacggacagtcaggacaattataaaacctatgacagtgaagttaaaaatctgacctatctgccggaactaagcgaagccgccttagaaaagggcaagttttttgactgtgacattatggcgattgactatctggatgatgccaagaatttccggctggctaaacttgccaaagcgcatcacgtcaaccgcgtaatcgctggtcaaaatcagcgcaatctggatgaggaccagcgcaacaagctgcaaaagatgggtgttgagatctttaatgtctacaacgtacaaaccagtgtcttacgggctttgattgaatcgccatctattatgacgatgcttaacagtaccgaagccgggctttatgaagtcgtagtccgcaatcgtcgttatacaggtcagcaattgcaggctctgccgtttatcgatcagatgacggtcagtcggattcgccgcgggacgcagtggctgattccacgggggacgacggtgatcgaacctggcgaccacttgatctttaccagtaaagccagtgatgttgccaatattcgggctgaactgcgcaaacgcaactaagccaaatcaaaaacagtgccacggcaggctgatgattaagcttgcaatggcactgttttttatattgctgaaatcggctggcaacgggatgctggtttgattatttctgctcaaataacagcgcgcagacaatcatgacggcagccagcccccaagcagctgctttaaagattcgcagtcccttaggcgtggtcttgatttctggatgacttttccagtatatcggcattaaaacggccagcagcacacagccggttgcaattatccaaaacatattattcacctcacgtattcataaaaaactttaccatatactcagctgagattaacaatcattaatcatcttttggacaattcgcgattgataaagcctcagctcaaaaggtagccaccagtttatggggcaattaattgcactaaacggtgaaaatcgataaactaggatacgtttgcaagatttcatgctgtgggggaatttgatggaaaaaacatatatcgttgctgctcggcgaacgccaatcggcaaatttggcaagtctttggctggtgtttctgctgtagagcttggtgcaactgcaattgccgccgtcgtcaaagacagcggcgtaaccaaagaggccgttgatcaggttttaatgggcaacgtgattcaagccggtgctggccagaatccagctcgtcaggccgtgatcaaggcaggcctagactatgccacgcccgcaattacgattaatgacgtctgcggctcaggtctgtccagtgtcagtctggcggccggtctgattcaatcaaatcaggcccgcattgtgattgctggtgggatggaaagcatgtcgcgagcaccgtatatcttaaatcaggctcgtggcggctatcgttttggtgatggtcagctgattgacgccttgcaaaaagatgccttgattgatgtcgaaaacggctatccaatgggaattaccgcggaaaacgtggctgaacttgatcaaatcagtcgtcaggctcaagatgaatttgccttgcgcagtcatcaaaaagcagtggcggcacaaaaagatcatgcctttgatcgcgaaatcgtcccagtcgaggttcagactcgcaaaggtacgatgatcgttaaagatgatgaggcaccgcgcgcggacacctcaattgaagcattgcagaaattaaagccgtcttttgccagtgagggaacggttacagctgggaatgcctcgggacttaacgatggggcggcggccgtcatgctggcttctgaatcggcagtcaaggaatatgggctgcagccgttagcagagtggcaggcgacaaccctggtcggtattgatccggcatacatgggattgggaccggcctatgcaattgaaaaactgttcaacgagacggggatcagtcgtgaggatgttgatctgtatgaaatcaacgaagcctttgcctcacaatcggttgcctgcctgcgccgactcaagctggatgaacggcgcgtcaacccgcgtggcggtgcactggcgctgggtcatccggtgggctgctcgggagcgcggatcttggtaacgctgatccatgaaatgcaggatcttgatgcacggaccgggattgccagtctgtgtattggcggcggcatgggcgtggcctgtttggttgaaaaggcgtaataagatcttaaaatagccgacgcgtctttgacgaatctggctgttttttagtttggcggtcaaacgggtgttgacttagcaaaattacgatcagaaggaataattggcgcggattaggcattggtaaaggaatgaaaaaatagtaaaatattatcttagatgcaaagttttgagaggattttgattatgaaaaagtcgcgttggattgattttggtgttgtctgcggtttgttttttctggctttcatgtttgccgttttgcgtcatgactcccagatcaaaaccatggaccaggctgggtttgctttaacgctgccgattaccgccgtgaagactcgtattatgctttttatcactgcattaggctcgccccagtttttaggaccggtaacgctggtaatgatgctgattttatggtggaaaaaacagcttggcagcagcatgtggtatggcgccatgcagtttgtaggatatctgctggtgattttctttaagaccagcgtaatgcggccgcgtcctgctcatcgattagaaaagatcggcggctacagctttcccagtggccatacctttgcaaccgtaatttttgtcctaacgattttggctttgctttggccgcacctcaagtcaaactggagccgactgtttggctgcattcttggcgtctgctggatcctgctgatcatgtattcgcgcgtctatctgcacgttcactatgccagtgacgtcttggccggcttgctgctggcgctttgctggtggctggtcgccaactcgcaaaaagagcgctttatgaattggcttaccgaaattcaaaaataattactgatcactcttgtcaaatctgtaaaaattcgctatactagttagcgttgacttatggagagttggcagagtggtaatgcaccggactcgaaatccggcgaacccgtgttgagcgggcgcgcaggttcaaatcctgtactctccttaaatatagctaaagaaagcctataataaaggctttttatttttgtttgtgcaacaatggtgcaacgacaactttattttcgttatttttaccgcttatttcatcgagaacttgagcaatttggtcattagatcttgcccgatgttcgtcaatgagataagcgtatttttttgccgtaattgtcatgttagagtgccctagtcgctgactaatagcaaatagatcgacacctttgtccaataacaaggcgacgtgagaatggcgcaaactatggaagtggaaattattgcgttcaatgccacaactggcaagatgtttcttgagggttttgttaactgccgttgatcccggaattgtaccaactttagttttaaaaatcatgtcttgattattagctttgagctcaagcagcaaatcaacgagtccttgattaatcctaatagttcgattagacgattctgttttaggtgctttaatttcgccaccgtttacatagtcgtaagatttattaattcgtatggttttaaagttaacgtttaagtcattccaattaagtgccataatctcacctaaacgcataccggttaaaattgccgtgattatcatataacggctaaccattctgggcgtaataccgtccttaagtgagtctactaattgtttgatttgctgaacacttaaatatttaaccttgatgccatcgctagaccatatcaattccacacgttgggtaaagtctttggcaataacgccatcaagaatagcgtctttaacacacgctcgaataatcgaattagttttttgaaccgtttctttagcgtgggttttgccaaattgattcataaagtcttggtattgtctgcggttaaccgtgctaattttagcgtggccccagtagtcagaaattcgttctgacgttttaaggtacaaacgagcggtagattttgaaatcttatcttttttaaacgtgttaaaccattccagaaagtaagccggccattcgggattggaagtattaatttgaccactagctaatagctgctcttgttcaatgccccactttcgtgcggctgttttagttgggaagccgcctttatttcgacttttccaattgccttgcgtatcacgccaagcaacccgaacttgccactttccgttacgctttgtgattgaagccatgatgatattttcctttcttaaacgtacgttcgattaatgtgcaaaaattaagctcggcgctgtgccgggctgtttttttatttttagaagtcaatgttcatatcataagtatgatattggttatcatcgtcagcattatcggtatcgtagtttgcatcaaatttagcgcgaacggaatttacgcctgaaactttctgaactggtattgatacccagccgctcttcttaacatgagatgaaatcgatccgtcccagttttcaagactatcagcttggtgttgttctccgttgctaaaagagtaagtgccttgagtaggataaatatttacatccttgcttccggtctgaatcacatagtgcaatctgatgaaaccgttaattttaaatttgccatcatttgctgaatcatatttatatttttttgctagcttaacgacttgaattttgttgacttttacatttacgccagaccaactgctatcggatgcgtttgttttataagtcttaattgactttgcgttataggcatcgtaatcaagggtaaatttttttgcagatgcaggcgaggctgtaaaaataaaaattgaaacaaatgcaagaataggtagtagaaacttacctatttttttcatagttattcctcccaatggtagcttttaacgtcgatcacgcttggacgtaggagactaatagtcagcgattatctctttaacgatatcctcatctttcaaagggatgtcattctgacgcataaactctagatagtcgatcctgtatggatcctcaccagtgtatttgatgtatcgatgaaacagatagctgatcataaagcgattggcttcacattccattttaagcttcatcgtcttggttgcattgtatagctcaatttcatttttttgtttggcagcatgtcctagttcatgcagcagaacagcttcgtgctggcactcatcgagtttttcgtcgatgtaaatagcatt

SEQ ID NO: 1860 - DNA, 3487 bp, Unknown
  gut microbiota DNA sequence
gactgccatcagtaaagtcgttggataccaattcgtacccttgatcttcgtagttcttgatcttgtcggccgtggtgtagttgatctttgaaccaaccttgccgcttggcagatcagatgagcttaacgttttaccagtcgtgtcatcaacgtacttgatcgtaccagtaactacttggacatatggtaccggcgtgtccttgcctggatcagctggcgtgattgggcttggatcaaccggcgtgtagcctggcacgtctggaattggttcgtttggcactaccttcgttggatcgttagggtccgttgggtaggtcggcgtgtccgcacctggaattggcgtaccgtttggatcaaccggaacaatcttaccgtttggtgcgtaggttaccgtttcttcaacgtctggattatcaggcgttgccgtcagtccaccggcagtcttcttgtcggcatggtacccgtcaacgaatggcgtgtcaaccgtgttaaacgtcttggtaccttcccaatcactcgttgagagcaccttaccagttaccttgtcaatcgtaacagtccgcgtgaaggcgtccttttgcgtcacagtgttgtcagctggcgtcttgtcgccggcaccaacgtagtgaatcgtttggctggcatccttaaccaggttgttgcggtcagcatcggttgggtaaaccgggctgttcggatcgttagggttgattggttcgcctggcgttaccggatttggatcgttaggcgtgatggtttgcgtcttgtgcttcaagtgaaccacaaagtcgttgccagtcttttcgtagacctgactgccatcagtgaagtcactggataccaattcgtagccttggtcttcgtaagccttgatcttatctgccgtcgtgtagttgatcttggaaccaatcttaccgcttggcaaattatcactatcaagttctacaccagtagtgtcatcgatgtacttgatcgtacccgatacttggttgttgctgtaggttaccgtaaccgttgtgtcgccttgatctggcgtaacgaccagtgatgaaacattagcaatatcgacgttatcatagcctacagagcttggatctgctgatttaacggcatccaaggtcttttcaattggcgtccaggcacgatctgcactttcggtgtcaaccttgccatcattgttggtgtcgtagcccagaatcttgccggttaccttgtcaacgatcgcagtccgcgtaaattcagcagtttgaacgtatgagctcgtaccgtccggggcaccattaaccttattgccgttttcgtcaacatagttaatcgtccgctttaccgtagcagtcaagtcatccttagcaacaccatctgggtaggtaacgtcacccttaggattgattggttcgccaggagtcttagggtcagttggcgtaactggcgtcgtttggtgaccatagtaaaccttttccgttacgttggtcgtgtcactatcaaccgtaaccgcagctactgaagcgcgatcaggtgccgtgtagccgtagtcggaaaggtcggcagaatcctgctgcgtccaagtctgagcatcaactttccagctgtcatcgattgtgtagctggaaccgtcagctgaaacagtaccgtaaccgataaagttaccttggtcgtcatagatcttgttgcgcgccagcgtcgccgtttgcgtaaccgtgctttccagattagatggaattggttcacccgttacactgtcgtagtattcgattgtccgtgtaacgtccttagtttcggcttccgtgtggtaagttacctgttcgtaaacatagtaaacatcattaacattgttggagctgatcgtccccgtagcgtcagatggcgtcgtgttgtacgtaaagccgttaacggtcgtcgtaccagcagtccccattgacttgtcgctcttaacgtagcggtaagtcttaccattgacggtaatcgtttctggtttgtaggttgaaccagatacatcataggaagtgttattaccagagttttcatatgccgtcgttggcgtttgaattaccgtaccatcgctggttacgtagttgatgcgaacctggccttgcggagcgtagtaatactgaaccggttcttgaccagctgccagacggttgttcaagccgtagatagtaaggtagtctttagaatttttaaaagtaaactgatcttgagtaaagccagcatcagtcagatacttaacaccaaccggatcaccagatgttgtatagagtaagaaagcaccattcttatgggtatctgcatcataattaccattattgccgaattcgcctggggcgactggatccgtagttaagattgtcttccagattctttcatcagcaatatcatcaatacttgcccccaaggcagctaccttaaggacaacccgagcagtcccattagtatccgtgattacattgattcgggcaatctgcagctgatctgacagttgtttttgcgttaaaacaataatgtcgccgactttgtatgaagctgaaagagtcccagtggtgttggaaggtgagctgattagatcaaagcctttaaagatccgcgcaccagaagcagtgtaggtataaccctgccgaccagtctgttcgtagtcagccaaaatggtttcgttgcccgccgcgtctttagcgatatattcagtccgaatcgtactttcgtctgggtacattacatgggtaaccgttccggatgaagtattagaactgttttcggcatcataaacaaccttagcatactgagtaccaacatcagagttaacttcgatctgtttagtggtaactccattagttgtattagccatataagtcagctgatagtgatgggtagagccatcactaatcacagttttaagtttatcaacttgaacagtagccccatttacggtcaacgtaccttcccaaagcacctgatccgtatcagcatcaaccaattgggcataaaccgtgtcatcgtactgaccatttgtagcagttttactagttgagaaacggaagtagtaattggtgccattttcgccattgtaagtagtactcttttctgacgtcgtgaatggtcctaagctgacaatcccaaacgtgtagcgaccatcagttggatctgccttgtagccgctagggatcttgctttcatctgcaacaacacttgccccgttggcagcgctcatcccaggagtcacgtcactgtcactgatcttatcagttgccagaatttgacctttgctggatgctgcatcatcgctggcagcctgactattggcagtcgtagcagttgaggcatcagtagttgcagtagcagcagtcgaagccgcagatgaagcgtcagtagttgctgctgaagcactggaagccgcagatgaagccgtcgaagcagcctgtgagctgtccgtagttgacgtcgaagccgccgcagctgttgccgtttgtgcgctggctgctgctgaactagccgc

SEQ ID NO: 1861 - DNA, 14024 bp, Unknown
  gut microbiota DNA sequence
gtaaccgcactggcactggtatcattggcagcgctgtttacgctagccgtgtcagcactggtatccgtatcagtcgtcgtgtcggcagatacttggccattgccgaagaacatcaatgtccccaaaagcacggataccgttccgatgcttaatttacgcagtgagaaccgttgagcgcgattggcactcttttgttcctgcatatatttattattcttggaatacatatatgtagacctcctaaatctaaaatctcaatatcgaataaagctaatatcaaggttttcttggcagctgctaatctggtgaatttttgttaatcactttataatctattttcaaattggcaaacttttttcgtcacctaaattcacttttaaaccgataagcagattccctttcaacacgaatgattgtatatgggaactcacaaaaaagaaagaccaatccgccttcttataagctcttttactttgttatacaatgaatggtaactgttattttaaagagttgatttaagaaactattagtctacataaagtaaccagatagggaaataaatagctgactatcgccgaatccgtttatatattgataacatccaactacttgctgcagcgactgttgaatcagaaaagccgttccgtgaatgcccacggtaacggcttttatcacttatagaaataatcccagcagcatcagtcccagcgtaatcaagagaattacacccatgatcagctggccaaaccacgattctcgcggattcttttggtaggtgcgagccttttcgcgttcaacctgagccaaacgcgcgctggcatgccgctcgaccagatcatcatgctgattgggattggttaatgaatcaatcttgcgcgttgccattttaagacctcaattcattaaaacgcttttgatatgtttcaactttggcatccccggcaaactcacgctgcgaatcgatcagctgttccatgacggccggtttaaccattgccaataagagcttttcaatcatcgcgtcaagctgcgtctcatcataacgattatcaggcgcgaccagttctggcagatgcagcgtgtcattaaagcctagaatcagctggttgttctcaaaggccgcccgcactgcatccataatctgatcaccgcgattgatatccagataaatatcgcaatcggccatcagctgtttagcctttgcaaaactgaccgctggatacaggtgcacgttggcttgctcaccgatctgcagcagtttttccgacatctcggtcaacgccgcaacgtgaaaatcaaaattcttaagccgggctgccagtactgaaagcatctcgatctgatccgaattggtcatgatcaaaatggctggccgcatctgattgccgcgcggatgcggatagatcgtacccagctgctgcaccttaacgtcacttagctgcggatcggcatccaccgtcttggcaaatttttcttgatactgcacccaggcctgatgattctgcatccagatctgcttggtgcgcgtttgattttcaaagataaagcgcatgttgccaggcagctcgtcacccagcccttcttgccagaccaaaacgtcgctggcattttcgtttggcagcttcaaggtcgtaaagaaagccaggttcagcgtgttgtagataacgtgatcgagctgatagtcgctgctttgcaaaaaatcggccgtcagttccagccagtttgcgaaatgacgctgccgcccgccggtatacaaaaagatgtcgtcagtcgttaaatgatggtcgatcaccacgttttgtgccgcgtcataatactgcttgagttttgcctgacccttggcataaaacgtcttggcaaaacgctgcccatgctgatcatattgatcgatccactgcagctcgccagccgcgttcagccattcaacctgcttgacgaaacgcgtattgtcatttttaaagaagcggatctcggcccgcttggtattcagatcataaacctgggccccactggcatcccctttgatctgccagaatcgaggcacctgaacctgatcaaaataaagcggctcgccagtctgcttacgatactgtttgattggcgaatcgacctctgccggcaaaaagccatcatcattgatcaccactgttggtaccttgattccagcgatcttttgcgagcggaccaggtcaatgctgccgcgctgccagtcgtcaaatagattaagcatcaatttcctcctttaccagctgtcgccattttgcaagaatctgatcatccaaatagtgctcggcaatctcataggaatgctgactgaacttcgcgccccggttttcatcggcaaagagctgctcgatggctcccgtcaaagccacgactttttcagcttcatcctgctgttcgtcataaggcagcaaaaagccgttttgatccggatcaataaacgtctgattgccatacgggacgtcaaagccgatcattggcaggcccccgccgaccgcctctaacagactcagcccaaagccctcactggttgaagccgcgatgtagccggcgtagttttggtagacgtcatccagccggtgctgtcccatcagatgaatatagccgtttgcctgtgccgtgtcgatctggcgctggagccgatcatgctgctcgccatagccatagatatccaagaccagatcgccaaccgtctgccgggccgcgattaccgcgctaatcagccagtcaatatgcttttcgcccgccagccgggaagccgtgatcagcgtatgccgacgccgctgctgatactgccgctgcttgagagtggtcagactgccaacgggaattacgaccaccttggcctcatcatgctgatactttttcagctgtttggtcagcatcgcttgctgagccgcggttgccacgatgaaaaagtcggtgtccgccgcatgcacgaactgatactcataaaagttgttccagaggacgcgctgattatccgtatggtgcgcgtcataatgttcggcatgcactaccacgcccagtttggctggtccatgcaattgataccagagctggccgctgcttagatccggactgtcctcacgatccaaaatcaccagatcatcagcctgcaggttcaagcggcggatcatctcagcgtacagttcggttttggagtagtagacctgctcgggaaactcaaagacctcattttcgccattaaggtactgatgataggcaaagcggccatcttgattcaaaaagtcgcgcagatagacctgacctttgccatccagatattctacggcatagcagctggcactgaagaactcccgccgcattaagcgtggtcccgcgaaatactcggcatagtcaatcagctgccgcttttggtctaccacatgaactctgatccgccattcttcagccatctcaaagtcaaccagctgcttattgccgacaaaggtctgcgtcttcattggcacgtcctgcagctcatgggcctggcgaaactcagctaaagaataggttgatggcgtgattggcatatcagtaaaaaagttgtacagccagatgacctgatcatcacgcagccccagattgctcgtcaacgtctgaatgttatcggccagaatcatatccgaaaagataaaccgggcctcaattcctgcctgttcaaaaaccttggcgcgataagcctgggcatactcaaccccactgctggcccagccaatgccaagattaacgttataaaccgtcatttcctcacctctgtttagataaattccaaaaccagttcctgcttgcgattaaccttgatcaagctgagcagcagatggcgcacggcaaccagccgcacctgatcaaacattttttcaaacgcctcataagcctgcttatggtagacgtacaccgcgtctcgctgcatcaatgaccacggctcagtataagacttcagccgctccaaaaaggctacctgatcaatccagcagtcatccagactcttaagcatcgcggcccgatagaactgatcgcactgcgcgggagtcaaaagctgtttttctttttgatccaatactttgcgactcagctgcatcagatactccttgatcgctgcctgactgctaaagtcgattgcaggcagatccgtaatcagatcataggtaatccagtgattgatcgtatccttcaacagatccgcattccaagccgtccgctcagccagcagctgatcaaacccgcgtgccagccaattttccgcggcctggcgatagtcatcgagctccatcacctgctcgcgctcaaaataaaagacctctcgctgcatgcgcatgctgtgctcatagcgataagtacgcgcccgctgattctgttctttatccagcagccgctcatttaaaaagtgcattgaaacccagagcgaaggactgcgcaattgccgcggcttttcaattgggtgcgtggcgcggcggcgttttttacggcgatagtagttctgcagcttgacactgctgtttttgccgaccagatcgtcttccaatgaccagaaaaagatgctggaacctggatcaccttgacgcccagcccggccccgcagctgttcggcaacccgcggcagcagcagctcagtgccaatcacggcaagaccgccaagctccttgacgccctcgccaagcttgatgtcagtaccccggccagccagattggtcgcgaccgttacggctcctttttgaccagctgctttgacgatcatggcttctctggcttcattgcgggccgtcaagacattatgggcaatcccccggttcagcaacagttcagaaatgatcgcagaattttcgattgaaccggcaatcaaaagaatcggccgtccctcttgatgcagtctcatcgtcaagtcaatcgccgcccgcagcttttcgccggtcgtcagatacagtcggggcgagaaatcctggcgcacaaccgggcgatgagtcggaatcgcaacgactttcatcttgtacaggttgataaactcgctggctgatgagcgcgccgtccctgtcatccccgcgacgttttcaaacaggccgaacaagctctgataagtcgttgaggcaacggcctgctgattatcggtcagttcaacgccttctttctgctcaacggcctgctgaatcccagtgttgatcttcatcccttttaacaggcggccattagcctcatcaagcagtaccaccttgccgtcctggacttcatattcatgaccgcgctgctgcagaaaatgtgcctgcagtgccagattaatgtgccgatacagttcgcggcgctttggactgaacagatcatcaatgcggaaatagctttgggcatactcaatccccgccttggtcagccagactgcttgatccttgagattcagccgatactcctgacgatagcgcagcgtccggacaaacagatcggcctgctgataaaggtttgactgcaacgacggcttgctggaaaccaccattggcgaattggcgccatccaaaagcaccgcgtcaacctcatcgataatcgcgaaatgatagggccgcagatactgatcacgcggattggccgccagattgttgaaaagatagtcaaacgccagcgtggtccccgtcgtgtacatcacgtcggcattataccagccccgttttatctcaggcttaacctttttggcttcatcgtcttcatcagcggcatccggatcaaagcccaggctgcaggtcaatcccagccattcatacagcggcgccatctcttcttgatcacgcttggccaggtacatgctgggcgtaaccagaatcgcgcctttttgcgtcagaccgttgagataaagcggcagtgtggccgtcagcgtcttgccctcaccggttttcatctcggcaatctgtccctgctgcatgacgatggctcccaatacctgcacgtcaaacggatacatccccaatatccggcgtgcagcctcgcgtacggtggcgtaggcttctggcagaatttccattaaagacgccccttcagccagctgagcacgcagtttgggcgtttgttcctgcagcgactggtcatccaacgaccgcatcttgggtgccagcgcgttgacttgccgcaagatccgccgtgctttttgatattcccatgaaaagctcattcaaaattcctttccggccgcggatcctcattgctgatcatcataaaataagcaaaaacggccttgctctattttggccgcgcgactctcagctgatcgcgcagctcctgcagaatcatcataatcggtaagcgaaccgcgctttgccaaaaagcatcgccgcggtagctgatctgatagcgctcaatgcttggattaatcggcagctcatctggggccagcgtaaagccatgccaggtcggctgccaatcaatcagctggtgcaccaaggcattggtcgcgggcgaagtgccaatcagattcacccggccatgatcggggattgcctgattaatccgtgcttttgccaaatccaacgcgtcgtttcggtcctgccacggaatcaccaccggcagcaggttggaaatgatgtgctggtcagctaagacattaaaatcaatcccactgctggtgcggcgcgtttccagcaataaaacgctgactggctgacccggaatcggcttgatcagcggaggaacggttatttgctggtcaattccctgttcagcaatctccagtcgtttaaaatccaactcccaacagcccagattgatcaattcaacggtatagctgaccacttctaaaggacaaataaccgtcagctgagtgccgtgtgcctgaaactccttgatcacgtccccctgcgcatcataaaaagacgccttgagcatcacgcgcgctgcgggtccaactttcatcacggccttgatctgataggtctgattactgagcagttccggcagctgcgagacgatgcgctgagcctgatagttacccgctgaatgccatttgaccagcgttttgcccggtgccatcagccgattaacgaaatgaaccgactgatcggcgcgcacggtcattgccgagccatagcgatagttgttgtttggctgattgccccagtagacgtagttcagcaaatcctcaccttccaaaatcttcttttaagacgcgcgcgtactgccgcaaaaaccatttaatcatcccgctgctgtcgtcattgtgccggccgggcagaccatagtagttgatctggcgggcccgccccagcagatgctttttcaagacggccagcgcgttgggatcatagtcgtcatcaaacatgtacgcgaggttgagtgacgtttcgctggcatcttcatggatcagcgcgtcaatgattttttgatccagctgtcgcagactggtttcgtccagttcatttggcgcggcaatcagttctcgggccaggtcaaagctggtgccaaattcgtccggccgtgccaagcgactccgctgtgcgatcgttcctagatgtaccaggggcttggcggcaatcaccgcatgagccttttgtcgcagaccaaatttaatcgcgccataagttcccattgaaatgcccgacatcaccagctgcgtatggtcaaagcccaacagctgcagatgctgatcaataatcttcggtacggcttggttgaaaaacggtcccgtgtaaaaggcgcccccctccagccgcgaatcggtaatcaaaagatagggaaccttcatttttttcatcatgaaatagccttcaaagcttttcttggagtgatagccggcaaagtatacgcacagtggtggccgcagatcaccaggattaaagaagaactgcacctcatcgcgcgattcaagatcctgccaggcctgcccaccattgataaacgtccccagtccatagcgcgcccagcgaagctcaaggttgcccagcgtcatctggccatttcctttagcaaagacgatcgcgcttaaaaactggttgcgagcggtgatcggcgtcgggattacctgcggcttttgcagctgcgcctcggaaaactcataagtctggcgctcactgccataaaccaaaacaaagcggtagcgaatctccacgttggcatcatgctgaaaaacgggccagaccgtcagctgccgatcaggatcgacaaacagattggtgcgcaggttggctaacggctgccagtcatcactgtcaaccgtcagcgccaaggccgcggaatcttgccaccgctgacttccctgatagttgggactgacggaaaaagcatccggaccaatcccaattccctgctgaccgacatagtagtattgaggaattgccgacacaaaggcttgacgattgctttttaacaaccgtgcctgcgtccgcgccaaaaaatactgctgcagctcatcaccggcagctccaggcaaaaagaccacgttatatggatcaaccttggcatgcagctgctcccattcaaccggggtcatttccagcgggtcggcaataatcaaaagctcaaaccgcatctttttgactttcaactgcgccaggtcgttgaagtaccactgcacgccagcgggaatccgcagcgtctgcgaccagtcttcgccacccagctgcaagactctaatcggtttcaattcttagcctccctttctaccaaagattctgccaggcattcatgatcatttcatccgagtagcgattgatcatggcaactgaactcaccaacgcctcattccagtgcttcatggagcctagataatagtccagggcttggtccagctgactgatctgcttaatctgcagtccattttgctgatgcgtgaccagctcgcttgccgtgcgattgatctgcggtacgccaacgctgacggctgccatctgaataaaatcatccggtgccatactgagatctaccaatacgcgggttgaatccagcatggtcaagaggtccttaggctgcgcgatccgcttggtatagattggaatcggctgcgcggctgacagatcttccatatccggcgtaaggtccgcgtcctgcagatcctcatttggtttgagctgttcaggcgttgggttgatcatgatcaaaggataatggtcctgagccaattccctgatcgtctcctcggcacgactcagctgatcatcgtcatagccgaccagcttcagattttcattaaatcgtgcctggtcaaggcgagctaaaagccgggccaaaacagcgcgcagttcagccggcgtcagatcgttgaccaccagcaaaatcgtctgctccagctgctcttgactatgccccagatgaaactgagctgaaaagatcggcaaaagcagggtctcgcgttcattccccagcaattcatgcacccacgcgtcaacggcagccgagtcggtcaccagctgcccagtaaaatcattcagccgtggcaaaaactcttcaaaagcatgccagcgactgatgacggccgcgattttaaagccgttaaaaaatgacagcctggcccgctgctgatcagccgccgtaaaaataatctcgtcttgttgagcgtcaagattttgcttgatgagccgcggcaaaaactcgtcaatcagtgcctgccgatcctggtatgcgggcgcgttaaaatctttggcaaaccacggattgacaaaaacacggccatccgcgatccgttccttgacgcgccagctgccggctggatctaaaaacacccgctcaaccagctgctcttgttcatcgtagttttgcagacaagatagccagccccgcgaatccatcaccagatcctgaaaatgcttgtcgtgtgcaaaacgctcaatccgcagaatctgtccgcagacgttaaaaatcacctgcgccagcttttggtcatcacagtaagccaccacccgaaacggatcgtattcaaaccaggttccgcgcggccagttaaagtctggtagatccaaaacctgccgggcgcgcggatcagtaacgccctgcaccagatcaaataccgtcagcagtttttctggtgccagtcccgcttcgttgagctgggccgtaagctgcggaacgtattcactgacgatcacgccgcattgggcatcattgcgcatgaagatctttaaattgttgatggcatcgtcaaacttgagacggtcaacggcatgtgcccagtcgtcaagctcgttttgccaagccggcacgaaatacttcattttccagatctcctttcaacttggcatagcggcgcggaatcctaagctcatccagtttatcgatcagaccgttcataaacattaccagcatgatcagctgagccatcaactggagaatgctgccccattcatttttgattaaagaaccagaaagactcatgacgatcacgcccattgccaaaagcgcgccaaaaaacgtcagactaaacaaacgccgccgcagatagcgctgcgttggcttgcccggctgcacgtttaaaagatagctgttggtgtacagcatctgtttggcctgctgcttgggattgaactgcagccacgcaaaaaagtaggtcaataaaaaggtcaagccagccgcaaagccagtctgaaattgtgaattcaacaaaagcgtgcggtgacccagtctggtgccaatcaaagccggcagtaccgccagcgccgttccaatcataaaagtcatcataacgcccaggttaagcccaattggatacatcaaaggcggcgtgtagcttggcagataggatctgatctgcgcgtcctcatagcgagccaaacgaaaagccgctaaaaaccagatcagccctagactcaaaagcacgattccgatgatcagcagccagccttgccaatttgccgccagctgttgaaacagtttgcctgcctgtgtagccacgctccgcatcatattgcagatgatgagtacgaccatcccgccgatcccccgactgccatttagattgctcagccaggtgaccagcatcgcgccagccgtcaatgccgcgattgccgtgatttttgccagcggaccatcaatcaggcgcgcgttgccgactaacaggtgtgcttcaaaaacggcaatcagcatcgtcagcaggttttgcagcagaagaatctgccgctgcgaaagctcccgcagatatggcagcttcatcaataacgccagctgaactgccatcatcgccaccataaacggcgtaaagccaatactgaaaagcgacagtttcggcagattagcccccgacatggcagccagggcactgactgaggattcatgcatcagctgttggtagtggcgagtgatcctgactgccggtaccggaatctgactgcccaacagatagatcgtgattgccatcagcgtaaagccggccttttttaaaatccctttagtttcagaaagcattgcaacccctttgcttgtttactgttcttcaatctatgtagcacgctaaattattttttcagggcgcgctagctgattgtttagaaaaacgattctttgaaatacgctaaatttttttgagcacgctaagtcattcttctatgtgcacttaattgttttttaagcacattaaacgattcttttgcgtgcatcaaaccactcttctaggcatactaaattgtctttttaatcacgtaagcctactcttccaggcgcgcttgaaaaacagcttcggtcagcgcccgtttggtaaacattccctgccgattgagccagccgaatcgataaacatgatcagctaattgccggtactgatcttcagtgaccgactgcacccattcactggcttcggcaagcgagtcgaccaccttgcccagatgatatttttcaacaagatccgcctgcgcgatgccgcgatgaataacgatcggcaaacccgctgccagataagagccgaatttaaaattgacattgagtttcatgtattcatataccgtgggcgaagcttcccaaagcagaccaaagcccccgttttgatgcagacactcaatcagatgctcattaggtacatagccttgaaagctgacctgaggattgtcaagcggagcggttggatcggcaaaaacctcaagcggaaccttttcgtgccagtcattgacaaaagtaaacttgctgggactgcccgcgaaattaagcaccgtgcgatatggcgattcaccagtcagttgatcggcagtcaacgcgtcccaagcttgctgataaacgatttttttgaccttgagaccccatttgtccaattcctgcttcatctgcggcattggcagaatcaaaacgtcagcctgattgtaaaagtcaatccattccggaacgcgcgcgggattgtcaaacatcaacggcgctacgtcatgcacgaacatgatcaatttgacgcgatactcttgacggtaggcattgatcttgtcaaccagtcgctgctgccattgcatctccatccaggtcggctcttgcagaatcacgatatcgtcaaccgtcaatgatgacagaatgccgtccaaccgtgctgataattcgccagcaggttcggccgaggcatcataaaagtagtagcccaactctttaatgccaatctcatcagcaaattgagcagccatattttgagcaatctgggccgtactgtttctcatttggccatgcatgtttgtaatgtagaccgtcataaccatcgctccctcttacacttatcattttataaacgttattgcagttaataacaatatacataatattttttcgaaatggccgttaattacagatgttgcacagatcaacatcaacttatattttgatatgactttcgaaactttttggcgatttaggtgataaaaaagaaaaacgctgcaatcacggcttttttgccatgatgcaacgttcttctttttaaatatcaatcgatcagttacttatcttcatcagttcgcttgcgtccaaaggcagcagccaatgcacccagcattacggctgacagtcccaggatacctgcttgagaatcatcagaaccgctgagctgtggcagtttttcagcctgcttcttagcagccggcgttggctgacttgatacaacactttccgttgctggctgttcaactgatggtgcgacgctgtcaaacgactgcacctctaccagcgacactggttcaatcagtgaacggccattgttgttttcagcataaccgcctgaattggagtcggtgttgtgagcaatgctttccgaaatggattgactgatgctgttcaccttgctgttggaaattgattccgataggctgcgcgactggctctttgaaatactttgcgatgcgctcttagagattgattcactcgcactcgtcgataccgaagcactaactgaagcggacgcgctagctgaagcagactggctggtacttactgaggcactcgtggaggccgaccaactggtgctttgtgaagcactcgttgatgcggagatactagttgacgccgacgcactcgtggaggccgattcacttgcactctgtgatgcactagttgatgcagattcgcttgcgctcagggatgcactcgtcgaagtggattcactagcactcagagaagcactcgtggaagtcgattcgctggcactcagtgatgcactagttgaagcagactcgctgacactttgagaagcactcgtggatgctgattcgctcgcactcaaggatgcgctacttgaggctgattcactggcactcagggatgcactcgtcgatgccgattcacttacactcagagatgcgctagttgaagctgattcgctcgcatttactgatgcgctcgtggatgctgattcacttgcgctctgtgatgcactcgtcgatgctgattcgctcgcactcagggatgcacttgtcgatgcggattcgcttgcactcagagaagcacttgttgagacagactcgctggcactcaaggatgcgctcgtggaggctgattcgctcgcactcaaggatgcactcgtggaggctgattcactggcactcagggatgcgctgcttgaggctgattcactggcgctcagtgatgcactcgtggaggccgat

SEQ ID NO: 1862 - DNA, 7186 bp, Unknown
  gut microbiota DNA sequence
aattgatacatgcaaactaagatattgaggcctgggatgagcgccttccaaatagtcagaagcaaaagaaagtcgatcgttcatataattacctcgcaatcaatttcaataaaaagcgtttgattaatgtcgatcatacgctaaagatatgctggtgacaattatgggcaaagattttggaatctgattagttggctgaacctaatccggcctagtcagcaggtgaatgatttgttaaaataaaaaaagattattagaaataaattaaaaaaccgccatttccaaactgggatggcggttttaactggaggaatgaaaaatgccgggattgggaaccatcgtgaacgtaattgcaattgtcgctgctggaataattggctgtctggctggtgaaagaatcgcgcctcgttttcaagacaccctaatgaaagcgaccgcaattgccgttttgtttttaggactgggcggaaccatggcacagatgctcacgtttaagcatggcagcttttcaacgcagggaaccatgatgctgattggcagcctggcgattggcggactaatcggcgagtggctgcggattgaggatcgctttgccgattttggcgaatggctcaagaaaaagaccggcaatgccaatgatcaagaatttatcaaagcgttcgtaaccgcgtcgctgaccgtttgtatcggggcaatggcaatcgttggctcaattgaggatgggatcttgggcgaccattcgattctgtttgccaaggcgattcttgattttgtaatcgtcttggtaatggcggcttcaatgggacgcggctgtggattcgcggcggtgccagtcgggattctgcagggaacggtgacgctgtttagcgagctgcttaagccactgatgacaacggctgtgatgaacaacatctcctatatcggttccgtattgatcttttgcgttggcatcaatcttttgtggggcaacaagattcgcgtggccaatctcttgccagcactggtaattggcgcggtctgggtcgtcttttaatcaatcagacgactatggaatcacgcttgcttaggcatcccatcggtaattttaatctgatcgagcagctgacgcagggctggattatgattatcgctgcggtagacgaggttgaaggtaaagcgttggtcagaggcatccttgatcggccaatagcggatgtggcggctggtcctatcgtaagccttgatcagctcgcgggggtaaaatgctagtgccttgcccagactgaccagcatctgcatgtgttcaaacgaaaagacgcgctcaacgtttaaagcctgactatttaatcccagactttcgagaaaggcccgcttgagataggatgattcttcattgctgtaatagatgatcgggtagcgccgcagctgttcaatggaaacggcatctttgatcggcagtctttcactggcgccgatcaccatctgatccgtgtgcagcaacgcggtttttaggcccatcttggaaaattcctggtcaaagccgtagtgatccatcaccacagcgcaatccagatcattcatcaagacatcggtaatgacgtgttcgggaccagcttcagcaataaaaacgtcaatgttggcatccaattcaaagatcaagtcgcgcagcagcaaagtgtcaaaaggtgagaagtacccaatcgtcaagcgatgccgcgatcgttcgtcaaaatgctgaacagcctggttggtatcgttgatcattctcaagataacctgacagcgttccttaaaaaaaccgccagccgtcgtcagagcaacttgattcttgccacgcgtaaataatttgacgttgagttcatcttctaaacgcttcatctgtcttgaaacggcccgttgtgaaacgtaatgcgcctgcgcgactttttggaaactgcccagctcactgacttccataaagattcttaactgatcgagattcaagcttttttctcctgtctgccgaatgaaatagttcgggtgtcggcatattttagcactatttaggctacaagttcaatgctaaacttatcttgttaaatgattaacaataggtgcaagactggcccagtactaataggcatttctcaaaaccattacttaagcagtgaatgcgagtcttagtttttatagatacagccgaacgttagtaggaccataatgctgttttatctaaattcggaaagtctgatggtcacttgtcttagcacatatattgttatctggatgcaaaagcagttagtcatatcaaaaaggagaatcgattatgaaaatgaaggctgccgttgttcgtcaagctacggatccatacaaatttgaagaagttgaacttgctgagccaaagaatgacgaggtcctggtacgcatcactgccagcggtctttgccacactgatgaatttggccgcacgcttggcatgtcgccaattgttttgggacatgaaggggccggcatcattgaaaaactgggtgaaaacgtcaaagactttgcggttggcgatcatgtagccttttcatacgccttttgtggtcattgcaagagctgcgttcaaggccgtcctcaatactgtgaaaaatttaacgaaattaattttggcggcgtgggtgctgatggtcagagcaagctgtcgcaaaacggtcagccggtagcaatgttttttggccaatcatcatttgctcagtatgctacaatcagcgaagaaagcatcgtaaaaatcgatgaagacgttgatctggccatgattgcaccatttggctgtggcgttcagactggtgctggggctgtcttaaacacgctgcgtccccacattgacgaaacgctggcagtctttggctgtggcgcggttggctttagcgcgatcatggctgccaaggtggcgggctgccgtcagattattgcggttggcggcaatgagcacagtctggcactggccaaggaactgggcgcaaccgacgtaatcaaccgcaagcagctgccggctggtcaaacgatggcccaggcagtccaggcaatctcaaagggcggcgtcaactatgccattgatacctctggcaatggcaacatgatccaaaacgccattcaaagtacctgtctaaatggtaagatcgttttgctggcgccatctggtgaagttgagaactttgactttggcaaggacgtcttgatggcatatcggaccgtaattggctgttgtgaaggcgactccaatccaaagatctttattccacggctggttcaactctacaaagaaggtcggttcccaatcgacaagatcattaccaagtatccatttgaacagttggaacaggctcgagaagactccaacgcgggtaaggttatcaaagccgtcgtaacgatggagtaggcatttagccatttaaattctcataaaataaaaaaacagcattgtaagctttacaatgctgtttttaaattatttttcagcttttaaccgcgccattgaccaaaaaactgatatccagcggaacgacacggttggtcagttcaccgatggacaaaaagtcaacgccgcagccgcgataggaggcaaccgtagtcagatcaatgccgccggatgcctcggtaagaattccgtcaggcaccagttcttgccattttttgatcgtagccgggacctggttgtcaaacatgatcacgtcggcatgatgagcaatcgcagcctggagctgacttttagtttcgacctcaacttcaacacgggtcattgggcctacgctctgcttggctagatcgattgccttgccaacgctgcccgccaatgccagatgattgtcttttagcataattccgtgcgtcagtcccatgcgatgattaaaaccgccaccagcacggacagctgctttttcaaacattcttagcccaggcatcgtcttgcgcgtatccaagattttgatggttggatcagccagcagctggacggcttgagcagttttagtggcaatcccgctcatgtgctgcagcagattcaaaataacccgttcaccgcttagcaaaacggcagctgatcctttaactcgtgccagctcggtttttttagcgactttttcaccatcgctgaccaacaactcaacttcagcaccacttaaaaggtcatagacggcattgataacctgcagaccgcagacaattccatctgccttggcaataaacgttccttcaatgacatgatctgataggggagtaagactggcatccccaaattccagatcttcttttaaaaaagcggtcagtttttgttttagaagaaaatcattcagcatgagcgtcctcgtcctttcctggctctggcaataccaagacggcaactgaaccgatgatcaaagaaatcatgaaaatcaagaagatcatattgatgctgacatgctgatcgatccaaatcccaaccagcagcggaccaacaacggcaccaatccggcccattccttgtgccatccccgtcatcgtcccgcgaacgtcagtctcatataaggttggcgtcaaagcgatgatggcaccgtaagcaccaaggttgaagaacgataggatgcagccggcaataaccgtcaaagcgctgctcgaaacgttgccaaacatgatcgcgcctagtgccgtccccaacatgtagattgcgaagacgtacttagttttaattttaccagccagccaagccgccagatagtatcctggtaactgagccaccacaatgatcgttgtatagccgaaactttcaatcacgctgttgccccgtgccagcataatgcttggcagccacataaacatcccgtagtagctgaacattaccatcagccaagcaatccagagcataatagtcttgccatgaaaagatttctttaaggcctggcccaaaccaacccgttttgtttgaacatgactgatttcttgaatattacgacgcatcataatagcaaagaatccagtcagcgctgtaactaaaagcagaccccgccagccaatttgcgtgctgaacaaaaatgacagaaacgaggcaattaaccagccaattgcccaaaagctatcagccataatcagcatttgtgagcgcttgttgccctggtataagtcagaaatgtaagtagcagctactggcagttcgccaccgagtcccattccaacaaagaaacgaattaccaaaaagcttttaaagccaaccgcggctgctaagaccacattccccagcgaaaacatcagcagggtaatgatcagcgtgttcttgcggccaattcgatcagccaggtgaccaaaataaaagccgccgcagatcatcccaatagtgctgaccgaactgatcaatccggtctgtgaattggccagaccccaagctttgccaacgatcggcatgataaatgacagtagtccaacgtcaagtgcatcaaacatccatgccgtaccaataattaaaaacgtggcaaatgcagtctttttaacgttaataccttgatccattttacttctcccttaaccagttattaaaaaagtattagttacttttattgtgctcaagtgtagtcctttgttcgataaatgcaagccttatttagcaatttactaaaccagttaacgattatgcaaccgttgccgatcccgattcgatcgcgtttttgtaaaagtaaaatctacctaaaataatttaggactagatattttcgaaaccgcttatccaggggatgcaaattggcttgattgcaaattgactacaaaatcagcattccaaaaataaacagcgaccacttaatctcgtcaaacgattaaaaggcggcaggatttatgaaaatgagccgttcgactgacttttaaggtggcagcctgttttgacctgccaaatgatttttgatacgctgtttttacgtttaagatttaaaagttaaagttaaggagaagtcgatgccaaacaataatttaaaaatggatcttccgcgctgttcatgggttaacctgcaaaacccgctctacgtgaaatatcatgactgtgagtggggcaaaccggttcatgacgatcaccggctgtttgaaatgctgcttcttgaatcgtttcaagctggcttgtcatgggaaacggtcttaaacaaacggtctgctttcaaacaggcatttgcggaatttgatgttgacagggtcgctagctttaatgatgaggactgtcaacggctattgcaaaatccagggatcatccggcatcgtttaaagattcgcgcggcggttgggaatgcccagatctttatggctatccaacaagaatggggtactttttcaaattatctgtggcattggacgcaagaggagacggttcgcgaaatcggtcaaaccagctcacagctgtccgatgaaattgccaaagatcttaaaaaacgcgggatgaagtttgtgggtacgactacgatttatgcctatctgcaggcagtcggcgtagtcaacggtcatgagcgctcctgctggctgggaaatcacgttggtcatgcttaaactggctgactaccttgacagcataaatttacatcggccatgatagttagtgcgtttgatagcgtttgcaatttagcaggcagtttatttgcatccccgcctcagcgtgctatgctgaaaacaacgaactgtaatgaggtgattttaatgacggattatcaagaaaagctgaatgaagcacgggccaacaatcgcaatctgtttggtgcattgggcgagaccggcaaaggctttaacgctatgcatgatgctgccgtcaaggatggcgcgctagatttaaagactaaggagctagaggcaattgcgatcgcgattgccatgcgctgcgagggatgtatcgttcaacatgccaaggcgtgcctgaaagctggcgttaccagagatgaactggttgaaacgattggcattgccgtcatgatgggtggcggtccagcaacggtttatggcggcaaggcattggactgctatgatcagtttgtccaggcctcaaaataagctatcgtcaaaaacgacataagtgataattagataaataaaaatggcgcggagcaatccgggccattttttaattcgtattatctgagggcaggatttagatctaaagtcgaagcctgtttgatgtttggctttgctttatatgacagaaatcagctcgatcaagccgcgcagatccggtttttagctatat

SEQ ID NO: 1863 - DNA, 2517 bp, Unknown
  gut microbiota DNA sequence
cccgaagtagcatcaaagtagtaccacttgccattgatctttgcttcaccatgatacatcttaccttgactgtcatagtttactaaacgaccatcagccagtgtgtaccaaccagtctttgccgtaccatcatcaccaaagtagtaccatgaaccattgacttctttttcagcatttttaaccatcgttgggctgaagtagtagtacttaccattgacatttttcaagccgctttcttccgtaccgtaacctatattgaaatagtagtaattgtctcccactttttgcataccatgcagcatgcccttaccattaccactgttgtcaacgtcatagtagacttgacggccatctggtaacttataccaacctttagcgacattaccatcagtagtattaaaaaagtaccacttattactgatattctgttcgccataaagcatctcaccagctgtattatagtaaacagtacgattatcactaagcttttgccaacccgttaagttcttaccattctggtctttcaagtaccagtggccatttgagtaaacttcagtggccttaatggcagaagttgatgactggtctgtagcggaggcagaagctgctgcggttgtcattgaaaccgtgtccgcttctgcattagaactagtttcagccttagtattgccttggttgtcttgagttaccgatgcagtactctgttcaacagtttcagccgccttcgaagcctcagttgaagcttggctagtagaatcgattgcttgatcagttgatgacgttgacttctgagtcgtattcgtagctgaagttgattcattagcagtagtagaaacagcatcatcagatgttgaagcaacttgtgaatcattggatactgcagtcgtagtggtcaaagcaaccgtactgttatcatcactgttattatcgttgcttgtaccagtattggtattagcaacaacagcttgattactattgctagttgacgtgctgttgtcagcttgagcaacattaccgccagccatcaaaccagcagttgcagcagctgcaactaaccacagcttgccttttttatacattttaaagcgtgtcttaacttcaggactaggtttcgccatcattttctcctcgctactaattactcggtttttaaattttatttcttagttaatttcttgattcttaaaactatttaaaagtttatcattgctatccttttcaatcaacgtgattgaaaatatgatacataaatgtcatatattggttacattttgataatacaaaaaaacgctaatcaccaaatactgaggtaagattagcgtttttgataatttttttaatattacaactatatgttaacgttcgtcgtacatttgaacgttgttggcaacttgatttacatagtcagtaccattgttttggttagctgtgttaaccatgtcggaaacctggtaagggttccactgttggttattgtaaatgtaaaccgtgtcagcaattggtgagccgtctacatctttgccttgagcgtagtagtttacccattcactttcgtcaggctttgcgccgtagatttggtagtaagtgttgttggtaccatttggcagaggtgccaaaacagaactttcgttcattgcagttacaaccagtggacgatttgcttgaggagctgcttcgttagttacgtagtggctcgtgtaccatgccagcaaaccagccttttgctgatcagtcatctgatcttcattcagctgagcagcttgtgtctcattattttgagcaattgctggttgctgcgtagttgcagcagtaccagaagcttgagctgtttgggtagtttcagtggttggtgctactgcttgagaatttgtagctgtctttgatgattgcgtttcaggcaaggtaaccattgcactgccgacttttaatgtattagtggagcttgaagcttggccagccgatgcagcactgcttgaagctgcagttaaagtttcatttgcggcagtttgactagcagcgttttgtgattcattcttttgatcagtagtcttcttttcactagcagctgcttttgcagaggtcttgtgcttgtgagaagtactttgttcagtccgtgtgctgtcagcgttgctcttagtagacgtggtcgttgtcttggccccacaaccagccaacagacctgcaattaccaagctgctaagcaagatgttcatgttcttcttcataagcttatcccccttactctcttttgaattatgccttgaagttttttgcttattaactaaattaggtttgttacttaaatatcatttatgtaacatccttgtaacattattatagcatactctttattttttcgtaacctttttgcaaaacaaaatatttaataagtccactagcaaagtattgtaagcgtttaatcctaaccatcaaaatctatattacgattgttacaaataaagaggcttttgctgtaaaaacaaaagcctctttattatccatctataaaaatctact

SEQ ID NO: 1864 - DNA, 14158 bp, Unknown
  gut microbiota DNA sequence
aaagacggtgtggtatatgtttttaataacttttataatgaagagcttgttgataaagcgttagctgcctctttcacttttgaactagacaaattggtagtaatccctcatggcagttccaaagatcataaaattttaaagattaagtctgctaagcgtgattcgtttagtgatcagattgaaattgaaacgtctttggctagaatgaagcaaacggacagcgaggatttcataactgaagttacaaaattttatcaacagcttagtaagcatagtaagagtgataaagaagtatggggaaaagcctacttagactatttgaaagccttaaataaaggaattgattattcgagtttgtcttgtgatgctggcaaattattacataaatatgataactttaacaatgcagttcctactattcgtttatatcatgcgattgaaagagacagtggtaattttgaccatattatcaacccagtggaaatgtatctgcctaaaatcgttactccaagaattattgatcaacgaattaagaatcaacaaggactgtttatgctggttccgtttatttttgatgatgaagggataggtactgaatcaatcttgacaaagactcaacgccttattaatactttgctttatactagacgggatgaacataccggaaaggataaggcaattgtctttacgattccttgctgcatgaaagagcaaatcagaaaagaactaagcaatattggcattagcaagagtttcatttatactgatgctactagttatgctcaagatattgctaatagctatagtaaaaattaagttatacatattttaaaatgaacagaaaagggttaggcgcaatcaagcacctagccctttagtgtgtaaaatctgctagaaagatatgtatttatatattaattttagcgtgctgggccatcattagcaactggatagagcgttttcattgctatggcttatgatttcagcaggcaggtaccttatgatatactcagttcaaaagctttagaacacagtggctgcaaaggcaaatatttggagaaaactgctatggcaaagccaatcccagcctatataattaaggctacactgaaagacttccgatcaccggcaacctggcggcgattcaaaatcaaaaagaacctgccaattactgagctggcatactatctggaaatcatgtttgaaatgtacgcggagcatcagtatgacttcacttaccaatctgatgacggtctcgtggtgatggtgaacaatcctgaagaatacagcatggcaccaagttttccaggcggacctaaaatcaaatacgttggcttaaatgattttcggctcaactactttaatgtcggggatgaattcttattccgctatgactttggcgatggctgggaaatcaagctgaaaattgagcagctggacgatcaaaatgagctgagtgccaagaatctaccacgaatcattgctggcaaagggtttggaattgttgaaaatgttggtggcgttgatgccttaaaggaatttggacgtgatctgaaacattcagacgatcaattgaatgattttggaacaatgctgccagagccgttatttgatgtagcggatgtctttaccttgaactactacaaccaagatgaactcaactggcggctcaaacgactgattcgttactatcgccaggcctatgatggcatcgaaatctccaaccatgccattgacctgattgaacgctactacccggagtttaaattaagttaggatctcttagattttagattgctatcatccaattatgaacgtgattgacgtttatagttggatggtgtcaagggcaattaaaaattgtacagaaatgacaatttgaaaatgtacaattatggcagtttaggatggcgatttatggttagtcgttgattttaatcggtggtggcaggcagaattaagcagtaactgtgtatgatccaatttgagcatattgagaccgccaatgatatcatgattagattcagcagtgcatcgattctattttcggtacaaaatcagcttaaattgcaccgaaaaataaattgcagactacaaaaccagaccgcagcttgaacggcgatcggtataccgcgacaacaaatataccgataagctggctgataactatgacttcatgccaagggtcgtcgtgcttgatgatgctcaacgaattattgacatcgttaacgaaacggcgcaaaaatacggtcaatactatcagcagcacgatgcctggaaccatgaggcagataatctgacgcatcggccgggaaccccttggagcatcgcgcatgcaaaagggcaaaacaccttattgagcgatgatgatattttgaagtaccacgcgctgaaacgactgtaatttaaacatttctaaagcccgcgtctgatgcgagcttttttcttttaggatcgttataatgaaagaagttaaattacgaaaaaatgaggagtacggcttatgaaaattttgattgttgatgacgataaagacatcgttcaattattagaaatctatgtccgcaatgaaggatatgaaccaatcacggcctacaacggcaaagaagccctaaccaagttaaacaccaaccctgatattagcctggtaatcctagacatcatgatgccggaaatggacgggatggaagttatcaagcaggtgcgtaaggattcatccattccaattttggtggtctcggccaagacaacggacatggacaaaattcaaggcttgattacgggggccgacgattatgtcaccaagccgttcaatccgctggaggtcatggcccgtgtcaaatccctgctgcggcggagtaaaggcgatctgaccaatgatgagccagatgtcttgaatgttggccccctggtgatcaacaaagattcgcacgaggtcaagacgctcaagggtgatacgattcagctgacggcgctggaatttgggattttgtacctactggctagccatcccaaccgtgttttcagtgcggatgatatttttgaacgggtttggcagcaggagtccgtggtttcggccaagacggttatggttcacgtcagccacctgcgcgataagatcgaagccgctaccggtggcgaaaaggttatcgaaacggtatggggcgttggctacaaggttgaaagccactagttttgatttgatagatgaggtccggcgctcagatgaatgggcattgggccttttatcatgtttgatcggcaggctcgcggcatttccgtgggcggttagggggtaaagtttgaaattaactacgcgtgaaaagagctcgctgtttttcgagggcgtctcaacggtgatcttgctggccatgatcaatctggccatcgtcgtgattctgcaatggatcgtgcggcataatcctggcgtcaacagcgggattttcatcattaagcagtccttggcatttggcccgatggagattcgcatttggagctaccagcgtattgtgatcggcatcatgctggtgatcgatgtctgggtcctctggtggcgattgatgcggcgctaccggcaataccagcaggatcacattatcagagagctgcattacatcgcgcagggacatttggatcaccgcattccatttaagctcaacggttcgctgcaagacgtcatcgccagtgtcaatacgctggtcgatagcgtcgttcagtcaatggatgatgagcggcaggtggaaaagtccaaagatgaactgatcaccaacgtcagccatgacctgcgcacgccgctgaccagcattatcggctatctggggttaatcgaaaacaaacagtatcataacgagcaggatatcttgcaatatacccacattgcctatgaaaaagccgtgcagatgaaaggcatggtcgatgatctgtttgaatttaccaaggtgcagcagcatggcgccccgcttaacttaatgaaggttgatctagatccgctgttggaacaggtcagcgccagttttgagctggaagccgagaaaaaaggaattgagatttccacgcatgttgatcccaaaccgctgatgattgaagccgatccggaaaaactgggccgggttttcagcaatctggtgtcaaatgccttgaagtatggtcatggagcaacctggatcaagctttcggcctcgcgctaccatgaaatgattatcgtcaaagtcgccaataatggggaaccgattccgcaaaagtcgctcaagcacgtctttgaccgtttctaccgcgttgagtcatcgcgttccaaggcgactggcgggactggcctgggcctggcaatcgtcaagggcatcgtggatcggcatcatggtcaggtctcggtagcctctgatgaaaaggaaactgcctttaccgtggtgctgccagccagtcaaaccgcgccatcagaagcagcagtcaatggggatgcagctaaagcacagccagctgagtagttgagcatctgtcaaagcgtagccggctgagtcgttgggctgacgtttgagcaatgatttgggcagtcggaaaatcagttttgcttaacgctcagcaaaaaccgaactaaatcgggctattctggtattctttaaaatttaaatatgttagactggaattgcatcgtgttcaaaggaatacgagataaaagatgaaaaacatttaaatgctgggggatatactttttggctaaagcacagcaaatcaatccagaaggtgccagatggctgcaggtcttaggcgtttcgatgccgctttgcctgagttacgtgccaattggcgttgcctgtgggattttgttacacgccgcggggatgaacttcctgctgacgtttcttgtttcggtgatggttttctccggtggggctcaattcatcttggcttcgctgttgatgcttgatgcacccatctcctcaatttttatgacgctgtttttcttggaactgcgctatgcattgctgggatccagtctttccaagtatatgcaaaatgagtcgcagcgcttcgtttggctgttttccgtttcaatgaacgacgaaaactatgccgtcaactatctgaaatttgcgaccgacaaaaactggacgcctaaagatgccttgttggtagagcactattcgcttttatcatgggcggggggcaatatggtcggcggtctgatcggcagtgccgtgcacatcgatctggaaatcgttgactttgccttgacggcgctgttcttgtacatgatcgtgatgcaggtgcgcaatcacttgtcactgttgatcagtctggtttcagcggtgctggcagtcatcttcttgagtctgaccaagagtacgctgggaatcatcattgctactttgattgcctcgtttatcggtttcatgatcgaaaatacggttcgccaacgttctgatcatcccgacgatgcctggatcatgcgcaaactattccgaccggcttcatcgcgtgatacgatcagcgaccggcaggaaaaggatcgggaagctgaggttgaggccgagctgaaagccgagttgaaagaaaaactgcaaaatgatgccaaaaccgatgaagcagccagtgattcggcagcggtcaagcaggagagcaagaaatcgagtggagataaatagacatgagtgatttattaactggtatgccggtgctgtcgttggtgcccagtcatcacaacctgacctatcatttgatcgtcatcgtgatcgcggccattgcggcattcatcccgcgctactttccaatgcgtttctttaccaaccggaagattccgctgtggtttaacgaatggatgaagtacgtgccggtcagtctgtttacggcattggtcgttaagtcgatttttatgagcaagacctacgcctttgtgccatttggtcatgtcagtcaaattctggcagctgttatcgtaatgattgttgcctactttacgcgttccatggccgtttcggtaatcggcgggctggccgcggtatggctgatttctttggtaatttaaaataattgcaaataattgaagcgtcattttcaaaagcatgatggctgggttctgagcctggcatgatcatcatgggctgccttgcgtcggaattgtccgcgctggctgaaaatggcgttttttaaatttcattgtggtttgatcattgagtcgttgtggtgcatcataatggctttgccaaattgacgggttcgaatttcagttttgggcaaagcgagtgctatgagcaatgtatcggtgactgctcggctacatgtagtgacgcgtcggtgactgctcggttgcgggtaaggtctcattggtgactacttgccatttggactgccgatagtattccattggtggctgtcagaatgtccgcaccagttaatttgccatcttttagtcaattcggtcaatctagtcaatccgtcactggttagccaaatagttgcgtgattgcctggttcgatttgaaattgggactttttcactttgagttaggctggatggggcgaatcggcttataattggaccaagaaccgataaaatgaggggagcaatttgatgaagaaagcatatttgattcatgggacctctactcgtgatgatgactggttcccatggctggaaaaagcggctcggccagcaattgagctggatcgtctctggctgccggatccgtttgccccgcaacaggcagcatggaatcaggcagttgatgatcaaatcaaggccgaagatgggattacgctggtagcgcatagtctgggctgcataacggcagtacgctggctggctcgtcatgacgtcaagaacgtgggcctgcttttggtgggggcgtttgatcagccactgccaaactatgccggactggatgaatttatgcagggcagtgttgactatcgccaggtacggccaaagatcagtcgcgcgaccgtgattgcagcgcaaaatgatccgattgcgccttaccaattcggggttgccatggccaatcgtctgggggccaagctgattgtgcgtcctgatggcgggcatttcctaaccagtgatggctttacggaatttccgctggcattgacggaactgaagcgcgttgccggcgttgaatgaccgggtggcacttgccagattcaattcgacaagcattatttcgtaactggcggtgttgactgactggttcctgcactggcattcttataagatccattgcaagtcccagactgccttaatcttcaaaaacaaaaatccgccacgctgctgacgtgacggatctttttatttagtgcttgttgctcatgtagtcgcgcgtcattggcaggtttttgccggatgcgcctttggtaatcagaaactgcataacgtcaatgttgccggattcaaacgaggccgcgcatgcctgcagatacagatcccacatgcgcgtgaaccgttcgcccatcatgtcttgaatgtgggcccggtgtgcgttgaagttcatgtcccagatttccagggtacgctgatagtgacgccgcagcatttcgatatcagcaatctgcaggttgttttcaacgatatggccaaccatttcctgcagtccagggacatagccgccagggaagatgtacttgttgatccagccgttgtaggccccgccttgctgtcgcgtgatgccatgaatcagtaccacgccgtcattggttaggtagcgggcaacgtctttaaagtacaggcctagattttccttgccgacgtgttcgaacatccccacagaaacgatgtagtcccattgccgatcgcccagttcacgatagtccatcaacaagacctcggccacgtcctgcaggtgttctttttcaatcgtgttctgcactagccgatactgttccttgctcagcgtgacgccggtaactttcagcccgtattcgcgagcagccgtcagcatcaaggtaccccagccgcagccaatatcaagcagcgtcttacctggttgcggatggagcttgttgatgatgtggtgcaccttggccatttgagcagctgtcaggtcatcgtggttgccattggtaaagtaggcacatgaataggtcagcgtgtcatccagccacagcttataaaaatcgttgccgacgtcataatggctttggacgtcactggcgctttccttttcaccatgactctgtttgggcatcatatagcggaacttgctgctgcgcataaagctgtctttgctttcgtaggccgattcaatgactttttgaatgctgccgtcaatttcgattttcttatccatgaaggcctcgcctaaagcgattgaagcgtttttggtcaggtcgcgcactgggatcttctcgttgaaccggatcgttgcttgcggctcgccattgccgtaaacgactgaggaaccgtcccagaatacgattttgacggggatggtaaatgagcggctcagcaagactttataaaatgtcttttccaacatgtgcttttccttctttccaatccgtatgcaggttattatacaccaggcagtaaaattaggcggaatttgcatcatagcatgctatacttaggctaaattgtctaaaaataggagggattagatggtcaatgcatggcatcgattcatcgataacgtactattaaggcggtttgcggtgttggcgctgttgatctgggtgctctatttggtacgaggaatgctgagcgcaattctgctgacgtttatctttacatacattgtagtgcattgggttcgcttcgttcagcgctggattcccagactaccctcgctgttggtggtcttagcaacctatgtcgttttgatcgcggccgtctactttgcggtaaccaaatacttgccgctgctgatcacgcagattgtaaagatggtcaattcggtcttaaaattctatcaatcgcaggatggttcttggctgatcaaacagctcaatcactacattagtgccaaaaccgtcacagcccaggtcaagcatggcatcaacctagctttttcgactttaaccagcctgacgaagatggcagtgacgttctttatgtcatttattctgagtttcttttatacgattgagctcaagcagatgtattcatttagccgtttgtttttaactagtgaattgttcagctggctgtttgaggatatctactattttggcaagaagtttgttaatacgttcggtgtggttttggaggcacagttctttattgcactctgcaatacggcgctgacaacgatctgtctgatgtttatgcatatgccgcagattctggcgctggctttgatggtctttattttcagtctggtgccggttgctggggtgattatctcactgattcctttgagcatggttggctattcggttggcggcattcgcgacgtaatctacatcatcattatgattattgcaattcatgcactggaatcgtacgtcttgaatcccaagtttatgtccagccgtacggaactgccaatcttttatacgttcgttgtgctgatggtcagtgaaaaactgtttggcacctggggcttaatcgtcggcgtgccaatctttactttcctgcttgacatcatgggcgtaaagtcgattggggacaaaaaacaaagtgaataggtttaacgaccagcattgatggaaatcggtgctggtttttatttatcaacagggcatccggcgtgggcgctttgaaatttaagaagggcggcgttgggcaatgcgagatagttgtggattgtcattctcattcaaaagcaatcgttttaaattgttgattaatacaaaattaaaaacgaattaaaaaacgtgttgactttctaatgatcaactcgtagactaagacacatcaaatatttactacggcaaaagaaaggagccatggatcatgaaaaagcaattattcgaacaacttaacaacatggctcttcaattgaacgccctactgctactgcaggtcaaggacccggttgcgtgattaagcatttttgctgatcagcgattgagcccttctttctgttggcatgagggccgatcgataccggttgagaaaagccctcattccattgcggatgagggcttttttctttgatcaaatgcagtcagcaaaatatttgattgattgaatgatgagaaaaattaaacaaggggagtcaggcttatgaagattaaaaataagaaaacggggattgccataatgatggcagccatgaccatgatggcagcaggatgttccgcaactggttcgcaaaaaggcaactcagcttcaggcaatacgattaaggttggggtcaacatggaactgtctggcgcggccgctggttatggtcaacaagaagaaaacgggatcaagcttgccgttcacgacatcaacaaaaacggcggtattaaggttaacggcaagaagatgaagatcaagatcatcacgcgcgacaacaagacctcaacttcaacggcggcttcggttgcttcacaattaaccaccaaggacaaggttgttgctacggtcggccccgcaacgaccaacgcggctacggcagctattccaaaccagactaaggcgcaggttccactggtttcaccaaccgcggctgatcctagctttacgcggactaagaagggtggcgttcaaaagtacgtcttccgggcccaggcacaaaataactaccaaggtcaggtggcagccaactttgccaacagcaatttgaaagctaagcgtgttgccatcctgactgacaactccagtgactacgggacgggacttgccaaagcatttaagaagaactttaagggtacgatcgtttcaacgcagtatttccaagaaggcgacaaggactttagctctttgatcacggctatcaagaacaagaagatcgatgccatctacgttccgggctactactctgaagtcggtgtaattattaagcaggctcgtgaagccggaattaatgccccaatcattggttctggtggaatggcagatccaaagcttgccaagattgccggtgcttcaaacgcaaccaacgtttactacacgacgccattctccacgattacggctaagaacaatgccgaagctcgtaagtttatgaaggaatacaaggctaagtacggtcaaactgcaccaacctactctgcattgggctacgacgcgacgatgatggttgccaatgctatcaagaaggccgactcaaccaattccaacaagattacggaagccttggctaagaccaagaacatgaagggagttactggtacgatttcagttaacaagcaccatgatccacaaatgaagatgtcggttgaacaaatgaccaatggtaaggttgtcgccggctacactgttaagtaattaaagaaagggggcaccaaccgtgcaaatctttatgcagcaactgatcaacggtctctcgctcggcagcatctacgcgctgttggctttgggatatacgatgatctatgggattatcaagattattcacttcgcgcatggtgacgtctacatgctgggggcgttcttcggctactatacgatcaacgtttggcatttcaactttatcatggcgctgttcggctcaatgatcttctgcgctctggtgggcatgctgatcgagtttgtcgcatatcggccgctgcgtcattcatcacggattgccgttttgattacggcgattggggtgtcttactttttggaaaacggcatgtcggtcctgttctctggcgacacccgtgactttccccaggtgatcaaacaggttaactatgaatggttcggcattcggataaccaatatccagttgttgatctttgcaaccacgattattttgatgattattttgcagctgatcgttaagaaaaccaagatgggacgggcaatgcgggcagccgcggctgatcccgtggccgctgaactgatggggatcaatatcaacggtacgatttcatttgtctttgcaattggctcggctatggctggtgcggccggtgttttgattggtctgtactacaactcgattgaaccaacgatggggctgacgccagggatcaaagcctttgtcgccgctgtcgttggcggtgtcggctccattccaggggcagcagtcggggccgtgattattggctgtctggaatcactgatgcaggcgattggcttctcagctttcaaggacgcagccgtctatgttgttttaattatcgtattgctgttcttgccagcaggtctgtttggcaacaagcagccagaaaaggtttagggaggcgcgaagatgaaaacacgttggcagaccattgccatctggttcgtctgcatggcagccggatatggcattatctatgctggtgaaatgactggcgtggttgatacgtttatcgagaacatgctggtcatgatgggcatcaacatcatcctggccgtcagtctgaacctgatcgtgggcttttctggtcagttttcgctgggtcatgccggctttatggcaattggcgcctatgcaacgggaattatgacgcaaactgaatcaacatttgcaggactgatcttttccatgattactggcattgtgattacgattgtgattgctctgatcgttggggttccaaccttgcggcttaaaggcgactatttagcgattgcgacgatgggggcggccgaaattatccggctgaccgccaataacttaaagattaccaatggaccggctgggctctacaacattccccagcttgccacttggccgctcgtttacattatgatgtgtctgacgattattatcgttgccaattttgttcacagtaagacgggccgggcgattcgcgcggttcgcaatgacgagctggcggccacggccatgggcatcaacgcaactaagtacaaattaatggcctttgtaatgggcgcgtcactggcagctgtaggcggttcgctctatgcttcctacttgcagagtattgccccaagcaactttaacatcatggagtcggtttcgattctgattatcgtggttttaggcgggatcggcagcattactggatctgtaattgccgccatcgtattaggcgcgatcgatacgattctgcaaaacttcggctcgctgcggatggttatctacgcggtcatgctgatcgttattatgattgccaagccaagcggactgatggggcggcgcgagttttcgatcggcaaatggctgaccaggcgcgcggccaaaaagcaggcggctgttgctgaatcatagaaaggagctcttatggcagaaaaattgttaaccgtccgcaacgtcacgcggcagtttggtgggctgacagcggtcaatgacgtttcgatgacgatctatgataatgagttggtcgccttgattggtcccaatggcgcgggcaaaacgaccctgttcaacatgctgagcggtcttttaccagctaccagcggcacgatcgcgattcgtcatgatgggcgcttctacaaggtcagcggcaagggtgctaccagtgttgcgcagcatggtatctcacggacgtttcaaaacattcgactgtttggcgacatgacggtgcgggaaaacatcatggcggcgctgaacaatcaatttaaggaaagcttttggggtacgattattcgaacgccacactattaccgcactgaacgcgagatgaatgacgcagcccagaagctgattgaccgctatcatttgacggcggttgctgacagtccagccaacaagctgccatatgggatgcagcgacgcgttgaaatcgtgcgggccttggcaaccaagccgaagattatctttttggatgagccggccgcggggatgaaccccgaagaaacggcggagctgacaacgatgattcggcagctgcgtgatgagaacaatctggccgttcttttaatcgaacatgatatgtcattggtgatgagcctggctgaacggatttacgttttagatcaaggcgaggttttggccagtggcacgccaaaagaagtcagccagaatccagcagtcgttaaggcatatttaggaggtgatgtcaatgctgcaggttaaggatttgagcatcagctatggcgcgattcaagccgtgcgtcacgttgattttgaggtcaaagaaggcgaaatcgtaacgctgatcggtgctaatggcgcgggtaagtcaacgattcttaagg

SEQ ID NO: 1865 - DNA, 8953 bp, Unknown
  gut microbiota DNA sequence
caaaatcgcaataagctttgatggcgatggcaagtttctgatgcaggaagctctggagaagattagcaatgaccaagatcatttctggcgtgtgttgatgggtgaggagccacctaaggcgtgcggtaagtgcgaatactgtcggcagggcaaacagctggcaggatttacagaggttagcagcatcgagatctcataaggaggcgagaacgatggtcagaatcagaaaggagtacagcaaagggtttaccaccaccagcaacacaatcatccgtgacgagcgtttgacttggaaagcacgtgggatattcaactatctctggtcaatgcccgatgattgggacttctatgctaaagaagtagccaagcatgccaaagacggtatccattctctagatagcggcttggaagaattggcaaaatacggctaccttgagcggacaagattgcgtgataagaaaggcagattcggcgcgccagtatggattctgcatgatgaccctgtcgatgcccaggaacctaaatgcgattttcctatcttggaaaaacctatcttggaaaaacctatcttggaaaatcgcacactactaaataaataccttactaaggacttaagtaacaaagtacgtacaaacaaacaggctaacgccgcctcagctgacgctgatttgtctgagtccttcaacaagctttggaatctctatccaaagaagcagggaaagaaagatgcctttcggcactataaagcttggcggaagaagtccaaagacaacactgatgattatctgctgcggaagctgaacgaatataaagactacctggcggctaatcaatggctgcatccaatgaatggctcaacgtggttcaatggtcgctttgatgatgactattcgactgctaacagtcaaggctatcagccactgcaacagccacaaaacgatggcgggttcgctcagaaactagttgatggcaaatggacacagaacgaaatcaacgtggctgttaaagggattaagaatcttagcccgcaacagaaggcttactatgttcagcctatcgatcaagaaggcaatacacgatatcggcttgattatctggcaggaaaggcaattccaattagtgatgcgcttgatcgactgtagaaaggagcaggagctatggcgatgcatagcgtagctgaaatggcagcgtccatctcagcgaaccttaaaagaattgcacaagaaaaaggccagccgttgccggttgaccttgataataaagatgaagttaaggcctatatgaaggccaataatgataagcacgttggcgagtggaatcaacggcttaagcgtcagaaattcgaccatgtctataagcaaagtctttggtcaggtcgaactccgattgcctttaattttagcagttgggactcgtccaagcaaatcagcaagcagaataccgagcagctaaagcaaaaagcccaacagctggctcagcaaatgctgacgcctgatgacaagccgtttaatgtcatgctagaaggctcgccgggaacggggaaaacgagcttagcaatcgccatgattgattatattagacatcatggctatcggtggggctacattaagcacccagacggtgctgaaaaatataagcgttatgttgacgtgttcttcctggcgactgatgaaatgctcgagcttgtctatcactcaatggatggcgacagtcaggcacgcaatcgactgcaacaggtggtcaaattcgctaaaacggctgatgtgttggtacttgatgactttggtactgagggtggtatgaaaggcacgattcgaccggtgcacaagactatgcaggagctgatgtatgacatcaataatgcgcggtttggcaagaaatacacgattatcacgaccaacaataccgttgaagaattgcgggcaatgtacaacgttaaactaattagccggctgattcctactaacggggaacacaccttgaacttcaacggtttgacagacgtacgatcaaagatgctttaggaggaaacgaagtgctgaaactaacgaaagaccaaatgctgctagacaccgagcagagttgcgcttggtgtgatggcactggatacctggacgcaatcgagcgcaagtgtccgttttgtggcggtgatggtatgttgcgtattgacccggcaatcgtacgggtaatgaaaagttccgggcactgggacagcaacaacgatgtagacgcaagcttaatgcacgatatggaggaatgataatggcaactagacgatcaaagcaacacaagagcgatgtgattgttgattctgggcacaggaaatggttgaaatcttggaatcataaaggctttggcagcaagtggcgtatggaagcttctggaagagccccaaagttccgtacgcgtgcttataatcgtgcaaaagagctgggaaggcaataattgaacagtaattaaatcgttttaaatcaatcgagaagcgattctatgaatttattggaagttattatcatcttgggctcaatcgttggcagtatgctgttttctggcggtatgctgtggatgattttcatcagctggacgactgggttcaccgcagtcggtatcggatcagcagccatcgtcatcacgatgctgattgcactggtctactacatgtgggaggtgtatcacgatggcaaagaataggaaacacaaacgccacgacactcaccgtaaacgcaacaaaaagaaggtgcataaaaatgaccaaccattgcacgccgagatttttcaaagcgctcagcaatctcgagcataactatcctgaggtgtttgcagcctacagcaagctgcagcttgacgacgttgcatcaccgcttgacccagactttcgaatcgtcaaggattttcgtgatacgattcgtgagaacgattggagcaagtatcacagcgatcatggcctgcaggccgagattgcatcgtgtctgcatcgatacatgggcgtccgtgagattgccgagtatctcggtatggacgctaagatgatcggcaatgtgatccgagacacgccggagcttaaaaagatcatcgataaaagccggcgtgatttttcgcagatcattgtctatgaccgcaacaatggcgattatacactcgtgcggacgatgtattcagcagcacgcaaagtcggtctgaacacggcaagcatcaagttttatgtcaacgaccggcactgcaactattggatccacaatcgctataaagtaaaacggaaggtgtggtttgacgaggacagaggacaacggtatgtgatttatcgttggattttgactacggtgtcaatatcatgatgtgccataaataaaaaaccgcaccacaaaggcacggtgatatatatacaaaaccaatattagtatatcaaaagggagtggcgttgtggtgcagcaacagacaattgacgacaaagaatttcgaccaattgatcgtgaggcaacggttcaggcagttaaatcatttttcagcgaacaagagtgtgattacggctacaactatcaagaactgaagcgcttgtctggagcttggggagagctgaaatcgccatctctaaatacaaccgggggttccgcaacaggtggggttgagaatactattgagcggcgctttattaaacacacagaatgcttaaaagctatccaagcagttgaatatgcaatccacggctgtgatcgtgtgagccgtgaaatcttaatgaaacgctatattgagcaaagaccggttaagatcgttagagacattcttcagattgcaggcaatgctacttggcataggcttgatcaacgtgcttgttgccaattcgcagaatgtatggaagcggctactatcttgtatagaaccgatcaaagattgtttcctcagttacaattttatttataaaatcatttcgatatgtgtttgcaaatcagcacaaaaacaagtatattaaagacgtaccagaaggtactaacactttgcatagtgaatgactgctagtcatactgtataacgttttgaccgttcatttgttatctatgacaaagtccgttagggcacggcgaggtacgtttatcatagaaaaaacttccatatgcctattccgtgaattgaatttagtaggttaggtttccgatagaatgtcaattggataatatcttttgtagctgtatactgcgactagtaggttagttcagatctaatgcacagtgttataaagaggctgggaaaccatgcctctttatttttttagcagaagttaaaatcaaactaggcgatttttaggataaaattaggatgtaactaggagcagtttcgtgtaataatagtatcgtgatataaaactcactgatgcgccgatcgggataactgccgaatgcctatttatcaagataacttgattgattcaagttagaaaacacctcaaaagttatattaagttttgatcgtagcagttttgcaggttcgactcctgcacggtgcatactcgccacacagcgagagaaaggtcccaggtgggcttgctgtacttatggaccgacaaccaccacagcatgcaaaaagggtgcgagtcccttacctttctttgccagagatggcataaattctacaaactgtataattttgcattatcctgttggcttggtgctttccttatcaatgccaacgggctatgcatccttagctcaacgggtagagcgttcggctgttaaccgaaatgttacaggttcgagccctgtaggatgggttgccagtggtcggcaaagtgctcataagttgtttcaggcacttacttcaaatatgtttgcacttgaagcgcagcttaggctgggctttttattttgctgaaaaataattggaaaggcggtgtggtgatatgccatgactaagaagcaagatcgaacaataaatgacccttttgcaagcttgaataagaaccagcaaactcttgttatgcttgactttgaaggaagtcatagcaataaagaaattgctccattgatcggtttgaaaaatgaaactacagtatcacattggcggaagaagccatggtatgaaccagcctttaatgcttatgccgttaaggcgatcaaaggtaaatataaaagcctagctttgcgaacgttaattgatttgcttgatgcaaagtcggaaatggttagatttcaagcagctactgcagtcttaaaaatgtctggtgtcttgtctgataatagtacgcctgaacttgataaggctaagatacgaaaagcaaatgctgaagctgatatggctgaattaaaagtcaatgtattaaagaatggtgataatgatgatggggtaacgattaacttcattcggactaagcgtaaggaggaagaagatcatggagaagcaacttaacgtgaatattgattcaatgatctgtcctcattttgatgaagtgttgtatagtcctgcgcttaataaggttttaaaaggcggacgtggttcgactaagtcatcagtgatcagcattcaattggttatggattttttacaagatagtcaagctaacgtattggtcatgcgcaaagttgctaatacgttagaattatcggtttatgagcagattaaatgggcaatttatatgctgcatgttgatcgcttatttgaatttaagaagtcgccatatcgtatcgtcgataagcgtaatgggacagcgttttactttagcggcgttgatgatccgcagaagttgaaatccatgattattgctaaggggtacgttcgttggctgtggtttgaagaattagctgagttcgattcatggaaagaagtcgatatggtccgtgcttcatttacacgaaagccattgccgcctggttgtcacgtagtgacatattattcgtataatccgcctaagaatccttatgattggattaatgagtgggtaactcagcgcgagcaattgccgggctggtatgttgatcattcgacctatctagatgtgacgttaccaaatatcctttcgcaagattatctagatgaaattaataccgtcaaaggtaatgacaatgattattatcgttggatgtatcttggcgaagttgtaggacttggaaccaacgtttacaacatggacttgttcaagccgcttgataagttgcctgacgacgactacatcactaacgttttctattcagtggacactggccacgaagtttcggcaactacttgtggtgcttacggctggactaagaaacataatgttatcctgttggacacgtattactacagtccacaaggtaaaactcataagaagccgcctagtgaactagcgagagacttaaaacagtttgtcgataaagtcggaaaatggattggcaagaagccgactaacatgacgattgattcggccgaaggggccttagataaccaatactacaatgactttggtattcattggcataaggtaaaaaaactaaaaaaagtggatatgatcgaccgggtgcaggatttactagcacaaggtcgtttttattatctgaaacggccagagaacgagatcttcattgctgagcatcagaagtatcagtgggacgagaatacattgcaaagcgacgatcctaaagtcgtcaaggttgatgatcattgttgcgatatgttgcagtattttgtccgggataatgaacggttgttagggttgaagtggtaggaggtgaggttatgagcttcttaacgcgattacaaaatctttttcgtaaaggaggtgctaagctcggtatggtaaaaagtttagttaagatcactgatgacgatcgggtggctattggtcagagcgagtatgatcgaattcagttagcaaagtcatactatcgtgatgatctgccgaatatctggtttcgaaattcttatggcgaacgacggcaacggccgttaagtacgttaaacgttactaaattagcttcaaagcgtttggcctcaattattttcaatgagcagtgtgaagtttcgttagagaatccagaactcgataaatttataaagcaaatcattgatgacaatcatttcaatttgcaatttgagcagcatttggaaactggaattgctttgggtggtttagcagctcggccatatgtagatgatcagaacaatattagaatcgcttgggcaaacgctgatcaattctatccgctgcgaaccaatacagacaacattagtgaatgtgcctttgcttctcgatcaacacgaattgagaataagcagactatttactatacgctactagagtttcatcagtgggacggaccagataaatatattgtcactaacgaactatatcgttcgacgcagagacaagtaattggtgatcaagtgcctttggccacgctctatccagaaatggaagagcgggttgaatttaatagcgttattaaaaagccgctgtttgcttacttcaaaaccccaggagctaataaccgtgatttggatagtccattaggaattggtgttgttgataattctcgtaacgtaattgacgcaatcaattacactcatgatgctttcgttcatgaagttaaaatggggaagcggcgaattgcagtgccagccgaaatgctgcgcccaggggcgccatacagtaataacgagcttgatgaggcacatccgcgagtgtttgactctgatatggacgtttacgaacagttctatggaactgacgatctgaaaattacagatctaactagcgatattcgttcagagcagtataaatcggcaattgattacttcttacgtgaatttgaagaacagactggttttagtgccggcacattttcatttgacggtcaaggcgttaaaactgctactgaggttgtcagtgaaaacagtactacctatcaaatgcgttcaagttatctaactcaggttgaactctttttgaatcagctggtaactgcgatcttagaagttgcaagtacaccggaattctttagtgatggtcaagctcgtattaaatttaatgctgatgacgatctaaagttgtccgtccattttgatgatggcgtttttgttgataaggataagcagcgtactgatgagttagcgcttgtatctgcgggtgtaatgccgaaaaaagaatatctaattcgcaattttggtttgagtgaacaggaagcagatcagtgggtagctgaagtattgaacgaacagccttcgtttaattcgaatgcttatgaaagcagtactgatctagatggcgatactgatgttgaggctgattaatcatgggagtacgagaacgatttgagcaaagcggccaaaagattattgatgcttattcaacactacaggaacagatctttgaagttattattaacaccctcaaagagagtgattataagcacgttgataaagaagatgtagtattgtggcaagcagaacaattacaaaagcttggtcgcttaaatctgcaagcgatcaaattaatggctgaaactgatggcttatcacagactgcgatcgaggatttgattaagtttcatggtctgcagattaagcaagagattgatagtgagctgcagcatgtaaccggttcgccaattccatccagtgaagaaactgaattgttgatcaaaggaattgttgatcaaacatggaatgatttgcagaataacgttaatgaaacactgattacgcgtaattatggtaattcagccattacgcaaacctatcggcgtattttgacagaatcgactgctgcaacagtctcagggttaatgacccatgaagatgcagttaatttagcaattcaacgcgcagttgatcgtggcttgccaactaagttgattgataaagctgggcataattggagccttgaaggttatgtcaggatggtcattaatacaacggtaaataggacgtataattcaattcgcctacagcgtatgaaagactttgatatacatttagcagtaatgag

SEQ ID NO: 1866 - DNA, 33941 bp, Unknown
  gut microbiota DNA sequence
taacttgatatacataaacttttacctactatgcattgatttttgatgaaaagtaggtaatgaagtttttgtcatgtgttttatacaagattttttgcatatctgctgggcatcaattagctattggcaaaacatttgaagaatacataatcaaaaagacctttaagaaccaatagcgccacctcaagccggaaaaacttgaggtgacgctatttttatttgacagttgccataaatgaagcagttttggctttattgcgcttttttcgcggtgtgcggtgccagtttatgctgaacccagcccagtacccagtcagtaatgatcgccattaaagcagttggcagggcaccggcaaggatgatggccccgccgttggttgcgttggtcccacgaatgataatatcacccagaccgccggcaccaacaaaagagccaattgccgtaattccgatggcaacgaccagggcattccgaatcccggccatgataacggatacggaaagcggcatttcaaccatgaccaaaagctgccacttcgtcatgcccagcccacgaccggcatccagtgaaacaggactgacgctgtccaggccggctgccgtgtttttaatgatcggcagcagcgaatacagaaagttggcaacgataacggtctggtcccccagtcctaagaccagcatcagcattgaaaccatggccaaggaaggaatcgtttgaataatgttggcgatactgatgatcggcccatttaagtgatggtgacgagaaatcaggattccaagtgggattccaactaatgccgccagtaagacgccatagacagagatggcaaaatgatggttaaactgctgcagaacataggtgccattatgaccgaggtagtaccagaactgctgccatagactcaaacccttcattaattgtcgcctccttcaaagtagtggtgcttaactaagaaacggtgcgcaaccgtagcgggctccaacagttcgtcatcagcctgatagttaagctcctgcatggttgatagactgattttgccatccaagcggtgcaggacttttttaagatgcggatcatgacgaatgattgcgcctctgacgactagtgagcagttatatggcgggaaaaagtgcagattgtcctttaagatcttcaggttatagctgcggattcgtccgtcagttgagtagcctaaaataacctgcattttgccttgttcggccgcatcatagaccaacccgatctgcattgggtagacgcgcttgaacttaaatccatataccttggcaaagtcgttgtagccatcgcctttgcggttcatccaggaactgtcgaccccagccgttaattgactggcaaccggcttcaagtcaccgaccgtggttagattgtacttttgggcattggcatgggttaccatgaaggcataggtatcggcaaaaccgtacgaaggatagcgaatctcatcgtaacgctgctttaaaaggcgatcaacggttttagtagcttttttggggtctttttgagcgggcatgcccaaagtcccagtcaaatcagttcccgtgtagctggtcgccataatatcagcatcattgttttgcagcgccttgtgtgaaaccgatgagctccccaggttattgaccatcttgaccttatagttggtatcatgttcgatcagatccttaagcatgtagcccatgatctgagattcagttgagctttgggtagcaattcgcagcgtcttaggctgatgataggtggtctcagtagaagagctgcagccgctgacgcctaaaacgaggacaaaaatgctaaaaagcagcgccccgatctttaaatttctatgcctggtcattagccgcacctccccgactcgtagtaggtgtgagtttgcgttccacaatgcccagcagccagtcagcaaccaaggccaggatggtaactgggatcgtaccgccgatgatcaaatccggttcgtaaaggtccaaaccattgaagatgaagtcacccaagccgccagccccaatgtaggaagccagcgttgaccaggcaataacatagacggccgccagacgaatcccggccatgattacgggcagggctaatggcagttcaaccatcttgattgattcccaattggtcatgcccattcccttggcactgtcaatcaaggttggatcaacgtcttccatgccggcataggtattgcgtagaatcggcagcagggaatagataaacagtgctacgattgccggcgtcttgccaattcctaagattggaatcatcaaggccagcagtgccaatgaagggatggtctgcagcatgctggccagcccaattacgaatctggcaatttttttacaacgcgttaaagcaattccaagaggtaccgcaacaatgattcccaaagcaagcgaaacagcagaaatatagatctgctcccatgttttgacgatcagttcggtcccatgtgcttgcaagaatgccatcattattgctcacctgcctcttttagatccttagcttggtctttggctggatggggattttcagtggttccccaaacggcatcatagattacgtcaaccagtgctgatcgggtaatgatgccttttaagtgattttgctcatcaactacgggaacgtactcccaattccgttccaagagcggttccgtaatcatctgcaggcgttcgtcttccttgatcttaaccggtaccgcatgcttcatgtcatcaatgatcaactgcggctgttgctggttgcgcagcgtctttaagtcaagaatcccggtcagatgatcctcatcgtcgacgaccatcagactgtcgacgtggtattggtgcatttggttcaaggcgtcgccgagattttgctgagcgtgaatcttgattggatttggccgcatgatctcagctgctgtcaagtggttgaccttggcctggcggagacgttctggaccaatcagattagcaacgaactcattggcagggtgagtcagtacatcgtcaggcgaggcgttttgaataatatgtccctgatccataatcacgattcgatcggccagccgaattgcttcatccatgtcgtgggtaaccatgatgatggtccggcccatctgctgctgtaatcgcttaaccagccgctgcagtgcttcacgcgtcaacgggtccagggcaccaaacggctcatccatcaagatgatctgctgatcggcagccaaggcccgaataaccccgatccgctgctgctgaccgccggaaagctcggaaggatagcgatccagaaattcttcgggcagttcgaccattttgatcagttccttggcacgggcatcgcgtttttctttaggccattttaaaagcttgggaaccagcgtgatgttatcgcgaatcgtcatatgtggcatcagcccgatgttttgaatcacatagccaatactgcggcgcaattcgattgggtcaatatcatggatgtttttaccatcgacagtgatatcgccgccagttggaatcagcataccgttgatcattcgcagggtcgtcgtcttgccaccgccagaggtcccgataaaacaaacgaattctccacgctcaatgcgcagattgatattttcaacagctaccttgcctcccggataaatcttggagacgttcttaaattcgaccattggtggtttagcagccatatgcatcctcctccttacagtcaaaaattaaaatttcccagtgcaaaaaattagaaatccctcactaactttagtataagattgaccagccaaattgtcattacttaaaaaacgttcacctgtcgcgcaagtgaacgttttcaaaaaaatatccaagtaaaatagtttattaaatataaaatgttattctaattatccgaaatagtattttgaattatggcttataagccacgttgggttgcatagctgatcagttcaggacttaagactacttcggcctgcttcagctcggcaaaatcatgacagcccaaaagcgtcagcaagcgcaggattgcttcttgccaagtgtccagctcgcgatctaaggcatcattgccctcatcaagcagcgtatgcagaaaatggccagccacgccgactgcacttgcgcccaaagcaccagccttaatgacgtcgagtggggaagtaatgccgcccgaagcaataatactaacatcgggatttttaacggcgcgggcctccaacaatgattctggcgtcgtctgtccccagtcattgagcattgacaggtcgaaatgatgattgcgccgattttcgatggccgcgaagttggtaccgccgcggccactgacgttgatgtatctaacgcccagcttctgcagcctggcaatgttttttttatccatgccgaagccgacttccttaacgatgacggggatgcttagctgactgaccagttttttgatgcgttcctgccagaaaaactcacgatctccttctggcattaccagttcctgggcagcattgagatgaatctcaatagcatcggcttttagaatctcaattgccttttgggcctgctttggatcgatgctggcgccaagattggcaatgactggttcagtcggcatcttttcgcgaacgatggcaaaagatgcctgggcctggggatcttttaaggcaacgcttaaagatccggttgccattgccagcccatgccgatgagcgagtgctgccagctgggcgttgattttggccgtctgcatgctgccgccagtcatcgcttcgatataaaaaggcgatttgaaggtcaattcgcccagcttaacgcatggatccgcctggctgagtgccatttccggcaggctgttatgaatcaggcggacctgatcgaacggatgattggcatgggattgcgaatagagcttttcggccagcgaaacatgttcatttttacggtgagcttgcagcgattccataatacctccttgaatagggtacataaaattcgcgcgtcacgaaatagcggcgcgcgaacagatttatttgatcttaagcttgtagcggcgaatctagttgacaaaatgaaccgctaacggcagctgttcgattttcttagtctgccaagccgctaaaaggccatccagatcagcatgaccatcaatcgccacgatgccgcaatcgccaccgccagcaccggaagtcttggctgcgccgccgaaatcttcggcaatgcgacacagttcatgcagaatcggtgtttcgatctggactccggaattggcacccagatttttcagcagctcgcggtttttgcgaatctcgcgcttgatcacgtccagatctgcctggtgaaagccttcaatcatgcgctgaatgcaggccttgctttcttccagaaaatgatgatacttatcctgctgacgggccttaaacaaagagatcttgtcgaccagccgcgaagttgaagccgggctgccggtccagccgatcaaaagctgcaggttggctggggcggtcagtgattcgatttttagatcaggccatggcaggtccagcagagtcggcagatccaggtattggcgctgttcagccagccattgccgatcaaacgagtggtacgcgatccaaccgccatataccgaagctgccacatcccccaatgaaccgttgccttggacagcgaaatgggcgatggcagccagcttaaagagcttgtccttgtcaaccggcagatcataaaaaagacacagcgccttgaccgtggcaacagtaaccgcggcggaagaacccagaccatattttttgccattggctgagtcaagctgactgtcaatatagatgtcgtagatctgcagctgacgatccagactgcgggcatattcttcggtcacgctgatggcagaaagaatgtaggcgaacgggttgtcgcgctgatcaacgaccattttatcgccttgccgccgccagagcagggaattttcgtggtactgctcactgatgatgcgtcccgtgtcggcaggactgactttgattgaacaggtaacgaactggtttagcgcaaccagaattgccgggtagccattttcaactacggcatattcaccggcaatataaagcttgccaggagcttttgcagtaatcaattttccatattcctctcaatattggtttatttttgatccaataagactgttcctggtccgggctgggacacgaccagattgtcggcgccgaacagtggggtcagggcagcttgaattttactacggtcagcccgatcgtaaatgacttttacgttcggacccgcatccatcgtataataacagtttgtaccactggcgcgcaagttatcgatcgcgtgcatggcttggagcgtagcggcattaaagtatgtaaagccaggatcggcggccagattcagggcatgcatgcgcagggcatttgtctgagcaatgtggccaatttcattgatatcgcgtttttcaatggctagcttgattttctgcatgtcggcttgaacgacctcgcgccaggctgggtagtaaggcgaggtctcaacgacgtgctgcatgcccagcgtgctggaaacctttttttgctcggtattgagcaggatggccatcatttcgatcgggaaatccaccttttccataattggctccgcatacgaagtgaggtcatcaacaccgcgatgccactcaaccaggccgccatagattgagcgggtggccgagcctgaaccacggcgcgccagtcttgaaagatcacggcgcgccagcttcaaccctgcagccgaactggcggccatcgccaacgcagcaaaggctgaagctgagctggccagaccggctgccatgggaacgtggttgattgattcgacccgggcaaactgattgatctgactcatttgacgcacgatcgacaagactttttgaactttttttaagcccttgctgcttaccggttgaccatcaataatcagctcatcagcggtcagctgggcggaaaactcaaccttggtgtcggcatagaactcattcagcgttaaggaaagactgtcagtttgcggcagcatcagctcactgtcgcgttttccccagtatttgaccaatgcgatgttggtatgcgcccgcgcgactgcacttgtcattattcatccccctttgccaatggctgaatccaggtttcaaccgcaccatgctgttttaaaattccggccagcttgcgagcacccagggcagttttggcaagtgcaaacatgcagccgccgcgtccgccgccagtcagtttggcacctaaagctccattttgccgggcaacttggatcaagcgttcaagtgccgcgtcgctgacgttaagcttagtcagttcgtcttgagccagatttaagacgcgtcccagctcattaggatcatcgcggcttaaaatcgtccgcgcacgctcagtcagcttacccagatgtgccaaacgctgctgggtagtctgcggatcagtggccagcagctctctgacggccatgatggcttctttagtagctcctttgacgccggtatcggcaatcaccattgtagcgtgcaggttgagctcaattggctggccaggctgtcccttgatgaagtaaattggctgatcagagctggtcgtagccgcatccaagccgctgggactgcgatgcgtgatctgttcttcaacatcggccagctttaatagcgtttcacgatccaatggcgtttcgtataaatcaaaaaaggcccgtacaatggcaatcgcggtggcggctgaagatcccatgccgcgctcggatggcagcatgctgtcgatttccagtgtccaaccgtcatcttgaccgttgaaacgttccatcagggtgttgattagtttttgaatgcctgccatggattcgggcagactggttaaatttccttgggcccagctgcatttgacaacgtgactggcagatgtcgtgtcagccgtgagcgttgccttaagcttgacgtttggcagcggcagggcaattgccggctgaccatagacaacgctgtgctcgccaatcagaataatcttggcgtgactttgcccaataccttgttgtttcaatctgaaacctactttcttcaaaaatatttctctaattatcttaacctaatctggggatgtctgaaagatttttatattttttaacgctttttgctgccaaacatccagatgcaacaatggtcaagatgacaaatgaatagtatcatggtggtgagaaatataacgaagtacggtgaagacaagtgaaaaaacagtcaaaaaagcgcgagccgatttatgcgatcgttgacttggaaactaccggtaccagcgttaagcatggcgatcggatcattcagattggctgcgttttggttcaggcaggccagattatcaatcagtttgaaaccaaaatcaatccgcgcaccaagattcctcacagtatcgagcagctgacgggaatcaccaactcagacgttcatgacgcgccttggtttgatgacgtagcggatacgctggaaagtctgcttagcgatacgatttttgtcgcgcataacgttaattttgattttccgtttttaaatgcagaactggagcgggcagggcatcaatccttggcaattccagcgattgatacggtgacgctggcccagattctgctgcccacggctaagagctttcgattgcgtgatctgagctcttatctggcaatcgagcatgatcagccgcacagtgccgccagtgatgctgaggcaacggccgtgctgctgattgatcttttaaaaaaggttcatcagctgcccacgctgaccctggcaagcctggttaagatgaagctgcagctgccaaaacagacggcagacgtgttcagccaggagctggaaaaacgccgtcatcatccgcagaatctaagtgctgatctctacgtcagcaatggtcttgtgctgcataagtcgcgtcccttggcaaccccaatggcccatgacaagaatgcctacccagccaccaaaaaggctaaggagaaactgtttggcgatcagctggagttccgtgccacacagtctaagatgatgaacagcatctataatcactatgctcatgatgctgaaaagccaatgatcattgaggccggaaccggggtcggcaagactttgggctatcttttgccaatggtctatcaagcttatccagatcggcaaatcgtggtttcaacggcgaccaacctgcagctgcagcagattgagcaaaaaacgatgccgcagcttaatgcaatgctgccatttgaggttgccagcgtggttgtaaagggcaacgatcattatctggatcttgccaaatttgcgcactcgctgagcatcgtggaggactctaagctcgtgcagctgcttaaggcgcgcatcttggtatggcttttgcagacgaccagcggcgatatggatgaattgaatctgaatgctcagcagtcgccttattttaccgagatccgtcatcatgggctcagaactctgagtcgcgataacccgtttatcaaagatgattttttgatgcggcgcaaccgtcagcttcagcatgctacggtcgtgattaccaatcatgcctatctggctgcccacgcggctgagtttggccacgacgcgctgcggccgtatctggtggttgacgaggcgcagcacctaagcgacagtattttgaaaaaggcgcggcagaccgtggattttcaacgcttgacgacggcagctcacgttttggagggcctggttaaggaaggcagcgagcgcaatctaattgatgtcttcgcgcatctgccgctgggaatctacaacgttgagctgctgcagggtgatctgcagcagctggatcaggcattcttagattttcaaggagcgctttaccgcagctttatgttgaacgcagcgggcgaagacgatcagattatcgaacaggtcgttgataatgatcggctttatgcactcctggatacgtcaggaccggtcatgatgaatcttgaacagtcattagccagcgtccagctgcatttttccgcgcttgatcatctatttgcctcgcgcagtgacagctggctggccagtgatcgctacctgatgagccagtttgcgacccaattggcagcattgaacggggctgacgaggtgcttcacgagtttgtgtcggccttggatcagcatgatgaggccgcggttttctggctgacggttcagcagtcgcatgagcgcagcacgatgaaattgagcgggggactcttaaacgccagtcattacctcagcgaacaggtctatccattctttcagccggcactgtttgtcggggcgacgctgtttacctctaagcgctccaactatctgtaccagcagctggatctgaatcgtgataacgtcaaggtcaagcatttcaagtcgccgttcaactaccagcaaaacagccggcttttgattgccaaggacgcgccgatgccagccgatgccgataatggcgactacatccgctatcttagccaaaccatctaccgcctggccaacgagactcagtgtcagacaatggtgctgttcaattcactcgtgacggttgaacaggtctacagtcagctgcgcagtaccgatctgtttaatcagcgtgatattttggctcatggaattacgggcaatcgcgaaaagctgctgaaacagtttgcaacgggcgaaaattcagttttactgggcgcggccagcttttgggagggcatcgatctgcccaacagccagctgcagcttttgatcattacgcggctgccgtttgactcaccgcaagagattcttaaccgcgcgcaaagcagcctgcttaaatcaaagggcatcaacccgttttatcatttagagctgcctaaagcgacgatgcggatgcggcaaggaatcgggcgtcttttaagaacaccggatgattatggcgtggccgttgttttggatccgcggctgagcgatcggcgctacgggaaaacgatcctgaacgccttgccggaaatgatgccggtagcagcagcggcaactgccaatgtgattgaagagacaaaaaaattcttaaaaaaccatgaacgatccacgcagcgccaatagattttgttataatgcaagagatactgaattgaattaggaaggaaggccgctatgcaaagtcgccgcgaggtacaaagagaacgcagtcgtggaacatcgaagcggatgattcgtgatctgctgattctgatcatcctaatttttttggttggctggagcatctatgctgtcggcaatcatcccaaagcagaagcggaacgtcaggcaaccacaattgccaagcgttatgccaatttaaagacgcgcactgatttttacatctacaaccgagaaaatacttattacacggttgcaggcaaaaacaacaagggccagcggattctggtcatcgtgccgcagaaaaacggctcagtgcgggttgtcaagcaaagtacgggattaaccgaacagcaggcgcttgcccaggttaagagcaatgagcatccgaaaagggtactcaaggccgtgccggggatctttaatgacaaggtagtctgggaagttacctaccttaacagcaaaggcaatctctgctatgacctgatcaacttcaagatgggcagctatgtgcaacagatcaacaacttatagttacattgtttggaggaattttttgtggaaaccatcaacattattgatgcgccaaagcacgtcaacgaacgcgtgcggattggcgtttggctgactgacaagcgttccagtggtaagatcgctttcttgcagctgcgtgacgggacagcatttttccaaggcattctgcggaaaaatgacgtaacgccagaagtgtttgaaatggcacggcatgaactgcgtcaagaaagcagtttttgggtaacgggcgagattcatgaagatgctcgttccaagtttggctacgaaattcagattgaagacatcgaactgatcggcgaaagcgttgactacccaatcggcaacaaggaacacggaatcgactttttgcttgatcaccgtcatctgtggctgcgttccagcaagccacacgcgctgatgcggattcgtgaccgcgtcattcgggccaactacgagttctttggcgaacatggctttaccaagattgacgcgccgattttgacggccaatgcaccagaaggcacgaccgacctgtttaagactaagtactttgaccgggatgcctacctttctcagtccggccagctttacgaagaagccggagcgctggcatttgacagggtctacagctttggtccggttttccgtgctgaaaagtccaagacgcgtcgtcacctgattgaattctggatgatcgaaccagaaatggcctttatgcaccaagaagaaagtctgcagctgcaggaagaatacgttgcctacctgatcaaggccgtaatcaaggactgcagtcgggaactggaagtcgttggtcgtgatccaaagacgctggaaccatttacgcagacgccatacccacgcatcagctatgatgaagcaattaagcttttgcaggatgccggcatggacgttaagtggggcgatgactttggttccccagaagaaacctacctggccaaccacttcagcaagccagtgtttgtgttgaactatcctaagtcaatcaagccattttacatgaagggccatccaacgcgcgacgacgtctatgtctgtgccgatctgctggctccagaaggctatggcgagatcattggcggctcagagcgtgaaaccgactacgacacactggtagcatcagctaaagaggcagggctgaacatcgatgactatcaatggtactttgacctgcgcaagtatggcacggtgccacacagcggtttcgggctggggctggaacggttcctcacctggatctgcctgcaggatcatctgcgcgaagtcatcccattcccacgtctgttaaaccggatctacccataatcggtattagacgcaataatgtggcttaaaatctaaattaaaggaccgatggcagggagtcatcggtccttttgctcgatctggattggttaaggcttaatgagcgaacctgctttaagcaacgcgcggcattgtcatgaagaagacgtttgaatgaattgctgattgaacggctttgatacttgtataagtgcagcccgttattttaaaatgattgttgcatgaatgaaaaagggggatgcttatggcgaagcaggattttttgttttcctatctgcaggccggcgaaacttcaatcagtaatcttttgcttcatcattaccgagaaatcgggatgaccagtggtgagctgctggtctatctggaattaaagtcctacatcgatcggggaattgaaaaccccagcatcacctggattgcggaaaatctgcagactgatgagcgaaccgtttatgaccagattcatcagatgactgagcatcaattgctggtgcagcgaatgaagcgcgatgccgagggaaaagaaacggcctactatgacttttcgccactgatcagtcgtttggttggtcgtgagggacagattcaatcgcagcaaaaaaacgtcaagcagaccacggctcgtgaaaaattgtttgccgagattgaaagcgagtttggccgcccgttgacgccaatggagattacctatgtcaatgactggctggacaaggatcattatgagatagagatgattcggttggccttaaaagaagcagtcgtcaatggctcactgcggttccgctatatggattcaatcctgatgaactggcgcaagaacaaccttaagacgcctcaagaagtcgaacaggataagcagcgctatcagagccgcatggcacagcagggcagacagctgggcaaccggccgatccccaatattccaatccttaagctgcctgatgattaagcctcagctgcctgcttggtgatcatggccacgggaatcaactgcctgcccaagttctaatgagtgcttgatctaatctttaagttttggtcaagacagcgcttttaaaacgaattcaaggtataattaagaggtaaataatcagaaaggcggtttgctaaagatgaacaaaccaatcaaaatgctggctggattgatgctggcagtaacgcttgctggtgcggcagcagtagcggctccagcggtcgtatctgctgacgctgcaaccgagcagtcaagctcatcgtcttctacggctacgcataccttaagcagctcttacgtggtttatggtgctggtgcgccacaaagcgtctatgatcagctgaactcggtaatgggcgtggattcgtcttttaagaaattaacggctacggccagcgactacgccaaatacatcggcaatggcacgactaccgatgccgccatgatcagttcggtggcaattgcgccaaccgatccaggcagcggggtcaaggtcaacatcaaaaagtacaacgggcaaagcaacatcactgaggttacggctcagcagtacgcaatggttgctcagatggcaggggtaaccgacattacgatcgtggccactgccaatcgcgccgtatcaggtgaatctgctttaactggggtctacaaggcctttgaagaagatggtcatcagctgaacagtcaaaacacggcggcagccaactcggttctggatgctactcaagatgccattgatgccaataaggacgactcatcctacccaggtaagctgatggcggcagttggcgatacatccaagcagattgctcagcaaaaacagagcagtggcgagctggcaaccaaggcagatattcaggaaatgctgaacaaggccctggaaaaacgcggcattgctgatcaaacgactacgacgcagcaggaaaagattgctggcgcgttggtcaacttccaaaactcaccaatttcttccagcaagacctatatcaataatgtaaccaatacgatcaataacgttaagaattcaaccggcaacttgatgaataaggcgaagaattgggccaacagtgaagccggcaaggaaacggtcaaacaggcgcaaaactggctgactagatttattaattgggtcaagagctggttctaaacttaatataattaagcaaatcgttcgtgaaactttcatgaacggtttttttgctgaaaaaaagcattttgccagaagaatttatccaaaaatgttagaatattttctattgtgatttgaaataatttatgggtaggattttaagatgaataaacaaaaaaatatcgttaaagggatgctgtgggcaggaacggcctcaatcagctggggtgtttccggcacggttctgcagctgatctcacagaatctggctatccctgcacattggatgctttcaatgcgtacctcggctgcgggggcaattttattgataatcagcgcgattttataccgcggtaagatctttaacgtttttaagtcatggccatccgtaatctcactgttcagttatgcggtttttggcttgatggctaatctctatactttctattacgcggttcagaccgggaatgcgtccatggcgaccattctgcagtatctgtcaccattgtttattgtttttggcggctggttcttccagcatagccgtccgctgaaaagtgatctcttatcatttgtgattgccatggctggggtttttctctgcttgaccaaggggaattttggtcatttggcgattccgctgaattcattcttatgggggctgggttctggtattacggcagctttctacgttgttttaccgcaaaaggccgccgaagaaaattcgccgctggttgtgttgggttgggggaccgcgattgctggggtcttgtttaatctataccagccattttgggtcaacccgccgcacattaccggaacactggttgcatccgtttcaacagtggtcttatttgggacgattattccgtttgggatgctgatgcacgcgaccaagtttgccccttcagacgtggtcagcattatggacgcgctgcagccaatcgtgacggcaatcctgagtgtgattttctttaaggaatggatgaactggatcgaaatcttaggcattgtgctcgtgattctggctatctatattctgcaaaatggtcgtcggaagggtcatcttgaaactattgattaaaatgttatgagttgtcgaaataggtatctggctttttaagcaggatgcctatttttgtcggttttagataaaaaaacgatgctggcgagttatctgacggtccttgattattagattgtgattttcggactggcttgacggattgattcactttcatcagcagcgtgtcgcccaatgaaagtgcctgcggtttgaatatgacgatcattttaaagctgattgggccagatcgactttgtgaattacctactattattgaattttcggccaatagtaggtaatgttaggtctccctaaatcgatatatattgatatttacctactatgcatcgcttttttgaaaaaagtaggtaatgagttttttgaagatactattatgcaggaatttttgaataatgaccgcggctcagcactttgatgtccaatagaccgataccaacattaacggttattgttgagcccaatcgctgtcttaagcgcttggtaggataagcagcaatgtcttatcgacttgaaataaatgcatacagaaaaaacgatcggttccgctcttaaacgggatcgatcgtcttcttttttgagatattgaattattgaccaacggctggctgtggctgctgagccggctgttgcgttgagctggaagctgctggagccgagctggctgcgctggatgcacttgatgagctttcgctagaagaactggcagcgctggaactggagctggaagagctggattccgaactcgaatcagatgctgaggattcagatttggaatgagaactggaactagctgagttgctggagctggatgatagtgccgagctgctggttacgcctagagcccatttagaatctttaataaccaactgacgagtaccgtttaccgtaactgcttcaaccgtgcttggcatagaccagttcgtagcgtgattcttgctgtcaagatactgcatcaggtccttgtacagcaattgtgccgttgtctggtaggctttggtaattccgctgcctgcctgcattggatgatcatagccggtccagatggcaattgaatagttcttagtgtagccggccatccaggaatccatttcaccatcgggatggctggaggttggataatccgtcgaaccagtcttgccggcttggtagacgccagaaaggttggccttagtggcgcttccttgaccggtaaagacgcccttgagcatatcagtgatcatgtaggccgttgccttgctcatggcccgcttgccgcttggcgagtaggtaagcgtcttgccatcctgcgtcgtgatcgaactgatgtagtaaggcttgtagtaggtaccgccattagcaaaagccgcgtaggcagccgcaatctgcagcggcgatacgtagatgccaatcccgttttgtagcgtgtatgccttggattgggaaatacccaggccctttaagaacttggtagcccgtgaaatgccaacggtctgcagcgttcggatggctggaacgtttctggattgaaccagagcttcgcgcatcgtcatcgtacccttgtattggttgtcaaagtcatgcagaaccttgttagtaccagggtagacgaacttggtatcttgaacggacttataggttggccactggaggtattgaatcgctgggccatagtccatcaaaggcttaacggttgaaccagatgagcggtcagtctgaacggcacggttaaggccatagacaacgttgccagtcttgcggccaccaagcatggcaacaatttgaccattattaggatcaacgacggcaaccccagtctgcatcttatcgctttggaaggctaccgaattattggcagcattgtacaggtgcttttgggcgctcaagtcaagattggtgtgcacctttaagccgtctgtgtaagggttgtatcctttagctaccagctgcgacagaacttccttgacgtaggagtccaccactttttccttaacttggacggaattatcggaagtgttgccatggttaggatcaagtccttctttgatgctgacttttttagcagcattggcctgactttgtgagatgtacttgctgcgtaccatggcatcaagtacctggttgcgtcgttgggttgcatatgtggcattgccagttgtcgggttgtagtaggttggcgattggggaatcccagccagcattgccaactgagccagactaagctcgtttagatccttgccgtagtagtattgggcggccgtcttcatcccatagaccccgttacccatgtagaccttattgatataaaagccgaggatctgcgacttggaaaaatgcctttcaacgttaatagccagccatgcttcttgagccttgcgcttaagcgtgcggtcggcatcagaagttgagaagacggaaagcttgaccagctgctgcgtcagggtactgcccccttgcatgccgcttgagcgatgggtaatgtcagccacggcagcgcccatgattcggacgggatcaaccccatgatgcttgtagaaacgccggtcttcaatcgcaacgaccgcatttttcaaggtacttggaatctcgctgttgcttgcgtattcacgcttttgtgcgcccaagcgtgagatgacgttattatcagcgtcataaatcgtggtagtggtctggctggccaattgattgcgactgatcttgggcgcgctggatgcataatagaaaaatacgcatgctccggcaacgaccattaaaacgaacagtcccaagatccacaacagcacgcgcttgacaatgctgccgcgaccagtctttttcttaccggaccgttgactggaacggctcggccttgattggttgttcattgcttactcctttaaaattagtgctttttggcggcaatcagctggtcaaccgctgtcagataatgcaagcgcggatttaggccatactgaactggatagccgtcttgaataatagcggtcaagggaattgatttgcgtccgccatgcagctgccgttgccaatattcaaacaggctggtggctggaaagacatacatttgatcgagttcgacaaatctgattaaggcaaaacaaattccaccctgatcaacacactcacgcatatgacgaatctgatgctcatgaaagttctttaatggaaaagaggctttattgcgggtttccttggcgtcaaaatcaatgtaccatcctttatagatgccattgtaatcagtggttgaaggctgtttaaagtaggcttcgcgaataacggcggcacttcttttaggataatcaacctttaccaactgaactggagttggttttttatgaattacggcaatatgatttgccaggtaatactgattgctggcattgatctcagcttccaatgacattccgcgctgagcataggatgaacgcagcgcaacggatcgagactgcggtcgttcgtgaacagcgagtggcttttgaccacttggataatgaatgctcatcagtttttcctcccttaactaggtgttattataccagagtacgaaaaaaaccggttaaatccatacaataaaattaattgcaaactaaattcggaaaggaacatgattaaatgaaaagactgtggacgacgggctatcgggcatatgaactgggcgtctttgatgagaaggatcccaaagtcgcggtaattaaagaggtactgcaaaaggagctttgctatcaattggacagtacgtctgaggagttttggctgattacgggaccgcaaatgggtgttgagcgctggagcatcgaaagcgcgctggcaatcaaagacgactatccgcagctaaagattgccttaatggagccgtatgccgattttgccgcgcgctggaatgaaaacaaccaggcccgtttggcagcagttaaggcccaggttgattttgccggccgagtcagcgagaaaaaatatgagtcgccggaacaattgcgcgcctatcaaaacttcatgctccattacacggacggtgcgcttttaatctatgatcccgagcgtgagggcaaaacggtttgggattggcgtgctattaatcgctatcgtgagcagaacagtgattattcaatgagaatgattgattttgatgagctccaggaagcggctgaagaatacagtgagcgtctgcgagaaacagatgaagaataaaattcaaaattgactcttgcaataatttttgagtctggtaaaattaatcaatgtattacggattaaacaagcaatgaggtgtttaagttggatggcattaagtttacaccgcaagatattttgcaaaaacagttcaaagaaaaaagcatcggtaaaggttacgacgtttctgatgtagattctttcctcgatgatgttatcaaggactatgacacttttaataaagaaattacgcggctgcaagatgagaatgctcgcttgcggtccaaggttgatgagcttaatcggcaggtggaggttggttcttccattccacgttcagcaagctcgcagcctgtttcaaatgcaaccaatatggacattttgaaacgactttcgaatctggaacggcgggttttcggctcacagctgaacagcagcgaccgtgacgattctcatttgctctagtccgcaaataaaattgaaaaaactaatgcaggtcttgggcgatcgggcatgatcatgcatcatgtcaggaaggtccatgctcgcacagactgcgatgtctgtagtgtttgtgctcgctgaaaaaataaggcggggcaccgagtgaactcggtgacggcgggaaaaccggctaaggcgcaagctatgccctagtatccctgaaaagtgccacagtgacgaagcaggattggaaacagtactggtggaacgcggtaaacccctcaagcggtaaacccaaactacggtaggggagctttggatagcgaattgaagtgattccaggggagagtttttactctgagatagatgattgcctcgatgttgtcatgacctggtgacagcattacgacaaaacatggcctacagagatctgcattacaggtgcccgagtttatgctcgggttttttgttgccattaaatgtaaacgctttctaaaaaggctgcgactgaattacaggatggtttgatgtttgatctcatgcttgctgatttatgatgatcaatctaatcgtggcttggctggaccttaaattaaagacgcagcaactgcttgtcggtttgaataattgccaggcctattaattgatcatatccaaaatgaaattatggaacgatgcatttttataaatggaacgaaccaaataaattaaagaatattcatttaatgctgattaaatcctaagcgatgttgtcaaaattacaattcaaagggcatatgttgcaaaaaaaattgagaaaaaacacttttttgaaacaattcgccaaatctgtattaaattactaataatatattacatatttaactaagttcgtgttgttgaaagtatggaatcgttttatactttagatagttaaaagcagtaaacgaaatttcttttagaaaagatagttggctgattttattaattattttctaataattaataaaagttgcttttagctaataattagctatttttatgcatgaaatttacattcgattttgtaaaggggtgatcaaatgctgagtgaaaaggatttgtcagcctcgctgcaggcctttgtcgatggctctaattatcgcgcccaagatgttctaggcgttcatcgcgaaaagcgtgcggaaggtgagggattcgtttttcgggtctgggcaccgcatgctcagcaggtttggctggtcggtgacttcaatcagtgggatgagcattcgctgccgatgcaaaaggatcaatatggcgtctggagcatttttaccgaccaggcgcaggccagccagctttataagtttaatatcaagcagagtactggtcgcgaaatcatgaagattgatccattcgcggtctgttttgaacagcgacctggcgtggcggcccgcatcatcgattttcccaaccgaaaatggaaagacggcttatggcggggacggcaaaaacgcgaacatcattttaatcgtccgcttaatatttatgaggtgcatgccggctcatggcgctttcatgaagacggtactccctatgattttagtgatctaacgcgcgaactgattccttatttaaaaaagatgcattacagtcacgttgagtttatgccgttgatggaacatccgctgccggcatcctggggttatcaaattattggcttttatgcgctttgctccagctatggcactcccgaacagtttcaagaatttgtcgagagctgtcatcaagccaacattggcgtaatcgttgattgggtgcctggtcattttaatatcaatgatgacgcgctggcttattacgatggcacggcgacgtttgaatatgaggatgccgatcgggctaaaaacatcggctggggtgccttgaactttgatctgggcaagccgcaggtacagtcatttttaatctccagcgcgctgttttggctgaatgcctatcacgttgatggaattcgggctgatgcaatttccagcatcatctaccttgactacgatttcggtccttggaagccgaataagtatggcgacacgcgcaacctggaaggctatgattttttgcataaggcaaccatagccatcaagcttgagcatcccgagtcgttatggatcgcggaggaaagctcagctggcgtgcaggtttccggtcgaatcgaggatggtgcgttgggctttgactacaagtggaacatgggttggatgaacgatacgctggacttttacagcgaggatccaatctatcgcagctttgacttccacaagctgaccttctcatttatgtatcgcttggcagaaaactttatcctgccgctgtcgcatgatgaggtggttcatggcaagcgcagtctgatgaacaagatgtggggcgatcgctataagcagtttgcccagctgcggaatctgtatgtctggcagatgacgcatccaggcaagaagctgctgtttatgggcggcgagtttggccagtatctcgaatggaaatatgatgcgccactggaatgggttgatctaaaagacccgttgaaccagtcgatgcagcactttaccgcggttttaaacggcctgtatcatgacaacccatcgctttgggaactggatactaaagacagcggtttagagatcattgatgccgataataaggatcagacggtcttgagctatattcggcatggtaagcgcaagcgtgattttttgatcgtgattctgaactacacgccggttgaaagacgcggctttaagatcggcgttccttacgcgggtacctatcatgagattctcaatactgaaatgaaggagtttggcggcacctggactcgaaataatcctgcctgtcataccaagtcggattcatttaaggaatatgagtatacgattgaaaccacggtaccggcattgggggccttgattctgaaacctggcaaggatgtcaaaatcgcgcgtcgcaagcctcgaccaagaaagcaagttaagccaaccaataaacaacagcatcaaacggggagcaaatagaaaggggtgttggatggagcccaccatccatgattatgaatgatgaaatgttagggattgtattggccggcggtaagggaactcggctgggcaagctgacgcagaatcaagccaagcctgccgtaccatttggcggccgctatcgaattattgactttacgatgagcaactgtgtcaattcaggcattcgcaatattggcgtaatcacgcagtatcagcccctggttttggatcggcacattggtaatggggccagctggggattggatcgtttggactctggcgtgacgatcctgcagccatactccagtccagatggcagcaagtggtttgcaggaacggcgcatgccatctatcaaaacatcgactatatcgacagtatcaatccaaagtatctgctggtcttgtccggtgaccacatctataagatggactacagcgacatgctgcagcagcatattgacaacggcgcctctttgacggtagccgtaatcgacgtgccgtgggaagatgcttcgcggtttggcatcatgaatacagataagcatgatcggattaccgagtttgtggaaaagccggctgagccaaagagcaaccacgcctccatggggatctacatctttaactgggcccggttgcgtgaggtcttggtcaacaactttaccaaaaacgacaatatgctcgactttggcaagaacgtgattccatattatctggacagcggcgagccagtctacgcctaccgcttctcgggctactggcgggatgttgggacgattatgtcgctttggcaggccaacatggaatttctggaaccaaacaacggccttaacatgcaggatcgcagctggcggatcaattcccgcagtccactggcgccaccacagatgctgactgatacggctgaagtctcacagtcgatgatcgttgatggctgctacgtggctggtaagattcagcacagtattctgtcagccaatgttcgggtcaaagaaggcagtcaggtgatcgacagtatgatcatgccaggtgccagcatcggccgcgacgttacgattcggcgagcaattattggcgagaatgccgtgattggcgatggcgtaacgatcgatggcggagatgatgacattgcggtagtcggcaatggcgaaacgttagggggaacctcaaatgaagaataatcaaatgtgtgcaatcattgtcgacgagctcaatgatgatgccttaaagccattaaccaacgaacgaccactgggaacgctgttttttgactgcaagtaccgtttgatcgactttgagctgtccagtgtcgtcaatgccgggattcgcaacgttcagctgattgaagacgaagacaaggtgcggtccgtctttgatcacctgggtggcggtcgtgaatggggactggatgcgatcggctcctatcaatacgtcaactatttccaggacagtgaaaacaaaaaggccgctggcgaaaagtatttcaacaacacgattgagtttttggaaaaatcgcacaccgcctatacggtcatcatggggacgcggatgctttgcaatctcaatctgcgggcagctttaaagattcacaagcagaccgataaaccgctgacggtaatctacagtcgaaccgatgccgatgaaattgccacttacgacaacatcttgagttttgacagcctgggcaacgtgattacctgcaatgagtttgccaagctgcctgatcaaacaggaatcttcaacctgtcgatgaacgtctacattgctgatactcgttggctgatcgacgccctgcgcaagggacagcagctggatgcgccggctcagctggacgactttttaaaagcgcagctgcctaagccgggattggcaggcggctatgaatacgttggctatcttcagaacatctatgacctgccaagctattaccaggccaacaaagacatgcttgattccaacaaaatgaacgagctgctctataccaatcagcgcatcattacccggacgcgcaatgaggttgccacctactatgacaggcacgccaaggttaagaacagtcatctggcaaccggctgcgatatttacggtacggttaccgacagcctgatctcgcggcgctcagtcgttgatccaaaggctgtcgtaaccaactcgatcgtgatgccaaacgcaagaattggtcatgatgctgaggttcactgggcaattcttgataaaaacgtggtcgtcaaaccgggtgtcaaaatcgtcgggacccctgacaacattttggtagtgcccaaagatactcgggttgaggctaatttgagcagtacggaagaagaggcgaattaatcatgaaaattatgtttgcggccgcggaatgtgcccctttctttaagagcggtggtctgggtgacgtggtcggcgcgctgcctaaagcccttgctaaaaaaggtcatgaggtgcgggtggttttgccactgtggcgctggatgccaggcaagtttcaagaaaaaatggaaagctggggctcatttgaggtcaaagtcggttggcgaaccgagtactgtggcgttgagacgctttatcaagacggcgtgcgctacatgtttttggacaaccgctactattttgatcggcctaagctttacggctactatgacgatggtgagcggtttgcctggtttcagcgggcagcctgtgaattgatgggccgctataattgggtgccggacgttttgaactgcaacgactaccatactgcgtttatgccgtttctgctcaaggaaaaatatggctgggttggaccataccatcacatcaagacggttttgacgatccataatctggaattccagggtgaatatggccgcgaagtcatgaccgaactgtttggcatgtcgccggaacgctatgacgatggcacggttcgctatggcacggccgttaactttatgaaggccgggatcctgtatgctgatcgggtcaacacggtcagtccaagctatgcggccgagattcagacgcctgaatttggctgccatctggatgaggtgctgcgcatggaaaactttaagctgtgcggcattctaaacgggatcgactatgacgtcaacaacccggcaaccgaccataatctggctgccaattactcaattaaggatctaaaaggcaaggccaaggataaggcggccttgcaaaaagagtttggcctgccgcagcgtccagacgttccattgatcgggatcgtcagccgcctgacctatcaaaagggctttcagctggtcgtcaatgaaatggaaaatctgatgaaatttgatgtgcaagtcgtgctgctgggaacgggctatgccaattttgaacacgacttccgttggttcaacggtgttcatcatgataagtttggcgccaagattgagtttgatgttggtctggcccagcgcatctacgcaggagctgatatgttcttgatgccatctggttttgaaccatgcggactttcgcagatgatttcaatgcgctatggcacgctgccaatcgttcaccaaatcgggggactaaaagacagtgtcgagccatataatccgatcaccaatactggtacgggctttggctttgagcagtttagcggcttttacatgatggaggccattaaagaagccatggcaacctatcaacagccgaaaatctggcgtcatctgatgcaaaacgcgatggctaaggacttcagctgggacaagcagagccaggcctatttggatatgtataagtcactgttttagtttttgattgcgaaaaactgagaggggatagaaatttgagtttaacaaaatcacagtttaagcaggattttaagcggcgtttaaaagacgatctggccctggatattgatgaggcctcctattttgacatgtacaaggtcttggcaggcatggtcaagtcagcctacaaccaaaactggcatcacacctggcgcagctatgatcagcagcacaaaaagcagctgtactacttctcgattgaatttctgccaggccgcatgctgcaaagcaatctgttcaatatgggctggctggagatcgtcaaggatggcatgaaggaactgggcgttgattttgaaaaggtcgtggaacaggaaaacgacatggcgcttggcaatggtggcctgggacgcttggcctcatcgtttatggatgcattggccagtgatggctatgccggcaatgggaacgggattcgctacaagtacggcttgtttaagcagaagttcattaatggctatcaagttgaactgccaaacaactggctcaacgaaggcaatgtctgggaagaacgccgggaaacgcattccgtgctggttcggtttggcggtcaggtctacctgcagccaaaaaatggtcagctgaagccggtatacgaaggttcgcagctggttaaggccgtgccatacgatactgggatggtcggctatgagaatggcgtagtcaacacgttgcggctttgggatgccgagattcctgaagatgaggaaagtaagtatcggacgattgacgatctgcggcgagttgaggatctgaccagcgtgctctatcctgacgattcaacggaagatggccggcgcatgcggatccgtcaagaatacttcttcgtttcggctggtctgcaaagcattctcaatcactatctggaaaaatacgatcagcctttgaccaagcttgatcaatacgttgccgttcacatcaatgatacgcatccatccatggccatcgccgaattgatgcggcttttgatggatgagcatggcctgggctgggaggatgcctggcaggttacggtcaacgtcatgagctacaccaaccatacgattatggctgaggcgatggaacgctgggacattaacatgatgcaacaggaagtaccgcggattctgcagatcattcaagaaattgatcggcgtttcgtgctgtctttggaaggcaaatatgatcaaaacttcattaaccgcacgcgcattatcgccaataaccaggttcacatggcacacctggcaatcattggctcacacagcatcaacggggttgccaagctgcataccgagctgctgaaaaaagaagtgctgcatgatttctatcggctttatcccgaacgcttcaacaataagactaatggggtaacgctgcgtcgctggatggccatcgacaatccgcggctggctgccattttggatcaggaaatcggctctggctggcgcaagaacccgcttgaattggaaaagctgctgaagtaccggagcaacaacaaggtcttggatcagctgattgccgccaagcaggccaacaagcgcgatctggccaagtttatcaagcagcagacggggatcgaggtttcatcaaaagctatctttgacgttcagatcaagcggctgcatgcctacaagcgtcaactgctgaacctgctgcggatcgtcaagctttatcaagatttaaaggccaatccaaatgccgatatctacccacgcgtcttcatctttggcgccaaggcagcaccaagctatcaatatgctaaggctgtgatcaagtgcatcaatgaggttgccaacctggtcaacaacgatcctgacatccatgataagcttaaggtcgtcttcttggaaaactacaacgtatcattagccgatcggattatcccggctgctgatgtttctgagcagatctcactggcctcaaaagaagcatcgggaaccagcaacatgaagctcatggccaatggtgcgctgacggtggctacgatggatggcgccaacattgagatttatgactatgttggtgatgacaacatctttacgtttggtctctcatccaaggaagtctaccgctattacgccgataattcatatcatgccagcgagtactatgaaaacgacccggttattcatcgtgtcgtggatgcctttgttgatggcacgattccaaatatcagcatggaaggccgcgagatttttgattcgctggttcagtataacggcgatcagttctttgtgctgcgcgactttgaatcttacctcaaggcgcaggataaggttgatcaggcctaccgcaaccctaagcactgggcccagatgagtctgatcaatactgccaatgccggtcacttctcatctgacttgacgattgatcgctacgttgacgatgtctggaaactgacgccaaacaagtaaggggggactgctttggggcagatccattacaatgcctggcagctggagtttaaacggccttttggagcactgcaggcgggcaacaacgttcaattcagcgttaaggttgactgccagagcgttacgcaggtcgcggtcggtgttaccaagctggatgagaatacggttttttatccgctgactcaagatgaaaatgagccaggcaggtataccggcgagatcaagatcacgacttccggcttgtatcactactatttccgggtgcgtcgcgaaaacgataccgcgctctacttggggcatctgcatggcggtacggggaaagagactacggacatcagcaaggttgagccgtttcagctgacctgttacgatcgacaggtgccgcggccggaatggtatcgcaatgcggttttttatcagatttttccggatcgctttgcaaatggcaatccgcatggtgagattgatggcaagaagccaaatacgtttttatatgcaaccactgctgatcgaccaatgtatatctatgatgagaaccataagattgcacgctgggacttttacggcggcaacctgcgtggcatcattgccaaacttccctatcttaagcgcttgggcgtgacggcactttatctgaacccgatatttgaagcctccagcaatcatcgctacgataccaatgattacttaaagatcgatccaatgctgggaactgaagaagactttaagactttaatcacgatgctgcataaaaatgatatgcatctgatcttggatggcgtcttcaatcacgtaggcaaaaacagccgctatttcaacgctggtcatctctacggtgagcagaccggtgcggctaatgacaaaaacagctcttattatgaatggttcaattttaagcattacccggatcaatatgactgctggtggggagttgatgatctgccaacggtcaataaggacaatcccagctatcagcagttcatctatggtgagcggggcagtgtcttgacgaaatggaatgatctgggaattgatggctggcggctggacgtggccgatgagctgccggatgattttctgcgggccattcgtcataatctggaccgctatgatgatcgcattatgattggcgaagtctgggaagacgcatctaataaaatcagctatggtcatcgacgtccctatgtcagtggcgacaatctgtacggtacaatgaactacccattacggcagtgggtgatcagtcttttgcatcgtcatgaggaattgaccaaagttggcgaagatttgttaacgttggtggaaaactatccgcgcaatttcctgcttgattgtctgaataacctgggaacgcatgataccgagcgcatcctgaccgttttgaatcaaagcgtgccaatggtaaaaatcgcgtttgccctactatttaacctgccgggaatcccctgcgtctattacggggatgaagctggcgtggaaggtggcaaggatcccgataatcgccgctattttccatggggacgtgaaaataccgaattgcaaaaaacggtacactactggtcggatatccgccaagaatgcgaagcgcttaaagaaggacagactggggtcatggttgccggcaatgaggttttgggactgattcgctataccgaagacagcgcgactctgctgctggtcaatcgggaaaatcagtacgcgctggtgcgggatctgcaattcatgcatgtgccagccagtctgcagcaggccattgaaaaacgagtggctgggctgcgaatggcgccatttaccaccagattcactgagctgaacgtgatctcggtgatggctgatgaagacagctgaataagcgtaaaagcatcgctgcagttttgcggcggtgttttttagttgcagtcaaagcagaactggggagccgagaatagggacagatctgggttgactgatagcttttaacggcagcgtgaaaagaatctcggggaggtttttggaaactaaggatgtcaactggcctaaagttagtgatgccaagctgagccggcaatcgctgataaatttgactgcttggtactgttgctttctgagtgatgatgaaggtttttgctgagcagattaaattttattgagattcttgttgacagtcgtcgtcgattcagttaagatactttatgaaaaataaattaaaaagtgctgagaaaagatgagtatccaatgaaggccgcttagagagtcgttaatggtggaaagcgatcggtcaaagttggtgaagatggtcttggagcggtttgctgcgtgagcccttggtgagcgcagcacggggcgacgccgttatcaaagtcggggttttcaaataatcgagaactcgctgaggagaatgctgcaatgcgttcttgaagatgggtggtaacacgctgatcatgactgtcagacgtccctgaaaaatggctgaagagccgtttttaggggcgtttttaattttcaacagcactgaggaggatcttatgagaagaaagcgacgtcgaaactggattattgccatcgttgccttattaatcgttgcagcaggagcgattggcctaatctataaacggacggccaagccaaagacgaccacggtgcgattagggttggtcgggactgactcgcagccggtttggaataacgtcaaggcgcggctcaaaaagcaggggatcaatattgaatatgtggtctttgatgattacgttcagccagacaaggccttgaaggatggcaagattgacatgcactcctgcttgactaagtactactttgaatcttacaacaagtcacaaaacgcgcatctggtaagcattggtaatacggtgatctcgccattgggactgtactccaagaaatatagctcacttaaagatctgccggacggggccacgattgcgattccaaatgaaccaacgactttgggccgcggactgaacatgctgcagtcggcagggctgatcaaggtaaagaagagcagcggcatcaagccatcattaaacgacattaccagcaatcctaagaatctgaagtttaaagaagttgatccagccacggcagcccgggccttaagctctgtcgatgcatctgtaatcaacggtaactatgcggtggctgccaagcttaagccaggcaaggattcgctttacatggaaccaatcaacaaaaaggctaagccatacgtaaacatcattgccgtacaggaaaaggacaaggataatccagtctacaagaaggtcgtaaaggcttaccagactgaagaaaccaaaaagcaatccaaaagacttacaagggtgcccaaaaagctgcttgggatatctatggcacgaagtaatagttagtgacgattaaacgaaaggggcagttaagatgagttttgaaacggcaatttttgcaggaggatgcttctggtgcatggttgagccattcgatacctatccgggcattgaaaaggttgaatctggctatacgggcgggcacgttgagaacccaacctatgaacaggtcaaaacggggacgaccggtcatacggaggcagtccgcattacgtttgatcccgccaaggtttcttatgaacagctggttgagatctactggcaccagactgatccaaccgatgccatgggccagtttcaagatcgtggcgacaactaccgccccgtgattttcgttaaggatgagcagcagcggcagatcgcattggcgtcacggcaaaaactggccgacagcggaattttcgatgatccgatcgtaaccaagattgaagacgcccagccattttatctggcagaagactatcaccaggatttctacaagaaagatccggaacgctatgccaaagaggaggctggcggacgagaacagttcaaacaggagcactggcacgcctaatttttgagaatctagagtaactaaaaacccgact

SEQ ID NO: 1867 - DNA, 18652 bp, Unknown
  gut microbiota DNA sequence
cctgcatatacttgttgtcggtcatggcggccagaacattggcaaaattggtcgttacgtccgtcatggcttcttcggcggaaacgtgctggttttcgatttcatctttgatctgactcttcatttccgggtcggacaaaatggcgatgtgcgcgtcaaatacttccagttcctcgtcgctcaagcggctcttggcgttctgcttgatggtcgccaaatcagcaatcgaggcgctgaaggctttttcaactcgctcatattccgcagccggatcatcaatcgttttcttttcaaagctcagatccggatcaatcagcagatatgctttagcaattccaataccgtcactggcggcaattcctttaatgatttgtggcataatttttgtccccctcatcaattctctaaatgtcaaccgtttgacatatattaacttcgtatattataaaccgttatcattttcatttccaccattatttaagcgtttgcataggcgttactgcagcaccgaatcttaaaactcggtcaagatttcaatcttacgggctgaatgcctgatcaatccttgacgctcaagaaccttaagcttgcgcgaaatcgtttctggcgttgtaccaagataggtcgccaggtcttttagcttcattgacagcataaactcgcttgaatgttttgcctgcatctgttctttcaaataatccttaagccgttcttcaaccgaatccatccccaacagatgattttgcatcgccagctgccgattcctttttaaagtcagctgcagcagccgcatggcaatcgaaggatactggttcagtaacttagcaaaatcttcataggatattgtacagatctcagaagtttgctctgcctgggcaaaggtatcggtattctcaattccaaacagccaggcctcgccgtcgtgttcaccggctgccagcattctttgcatctgttcctgtccagatggcgaaagttgatagatcttgaccgcgccgctttctacaataatcattttccctgcttgagccggcgttaaaatctggtcaccacgactaaaccgatgatgacgcaccagactttcgactttctgctgatcagataaagccagctgattaaacaacggtacggtcgcaacacaaagatgctgttgatgatgatgaatgtgatttgtcataattgtcgccccttaaagttggtatcccaagtataaacgaagctgattcgataaaaaattgatttagatcaataaacattctttgcactgatatcgacctaaaaaatcgcaaaacaaaagccgcccgattcaaatgaatcgagcggctttcatattaaggttttagtcgagcgaagttaaattacttcagacccttccaagtccagtcttcaacttctggcaggtccttaccttcagtacggatgtagtggttgtgcttgtcaaccatgttgtccatttcgtttacgaaggcagcagccttttgttcgtagccaggtacgctcaggatagcgtccttagccaggtggaaccggtcaagttcgttcagcacacgcatgtcaaatggcgtcgtgatgtcaccattttcttggtagctgtggatgtgaacgttgtggttgtgacggtcaaagaacaggctttggatcatgtcacggaaaccgtgccatgcgaagataactggcttgtcagccgtgaagtaacggtcgaattcttcgtcagtcagaccttcagcgttcttgtcaggcgtcatcagcttcatgatttcaacaacgttgatgtaacgaatcttcagttctgggaagttgtcgtgcagaatgtcgatagctgccagagcttcttcagttggttccgtaccagcagatacgaagacaacatctggttctgcgccttggtcagtagatgcccagtcaacgtagcccagaccgtggttaacgatgttagtagcttcgtcgatggagaaccattgcagacgtgggtgcttggacgtaacgaagacgttgatgcattcgcggtcgttgaaggccttgtcggatacagccaacagttcgttagtgtcggctggcaggtattccttaaccaggtcagcacgttccttttcgtacaggtgagtcaacagacctggatcttggtgagtgtaaccgttgtggtcttgttggaataccgtagaagtgtcaacaaagttcaatgctgggtagtcatgacgccagtattgttccttagccttacgcatccacttcaggtgttgagtcagcatggagtcaacgacacgaccgaatgattcgtaagtagcgaagaaaccgtgacgaccagtcagcgtgtaaccttccagccaaccttctgcttggtgttcggaaagttgtgagtcgatcatccgaccttgacgtgccaagtcttcatcgtttggttcgtgaatgtcttccatccattgacgcttgtcgttgtccagaacagcgtacagacggttggacttggattcgtcaggaccaaagccgcggaagttgtctgggttcagcttgaacatttcgtccaggtacttgccccattcgatcatgtcttgcttcttaacaacaccatggccttgtacgtcaacagcgtacttgcggtagtctggcataaccagtggcttaggatccaaaccaccgttagtgattgggttcatagccatccgcttgttgccttctggcgtgttagccgtaaccttggcaactggagcaccgttttcgtcgaacagttcttctggcttgtaggacttcagccagttgatcagcatgtccttgtgttccatgtcgtcttgtgcgactggaattggaatttggtgagcacggaatgagttttcgattgggttgccatccaagtccttcttaggaccagtccaacccttaggtgcgcgcaggattaccattggccattgtggcatggagtcgtcaccagtttcacgagcgtgcttttggatagccaggatgtcttcaatagcagcatccatcgtcttagccatttcttcgtgaacttccatggtgtccttgtagccatcaaagccttcgccgttgtaagcggaaacgaagtatggcttccagcccataccttcgaagtacttagtaagttcttcatcgctcatccgagccaggatcgttgggttagagatcttgaaaccgttgatttgcaggataggcagaacggcaccatccttgattgggttgatgaacttgtcagagaaccaggaagcagccagaggaccagtttcagcttcaccgtcaccgatttcaacagctgcgatttggtctgggttgtccagaattgcacctacaccgtgggacagggagtaacccagttccccaccttcgtgcagtgaacctggcgtttcaggagcagcgtgtgaagcagtaccacctgggaaggagaagtgcttgaacagcttagccataccagcttcgtcttgggtgatttctgggtagatttccgtgtaggaaccgtccaggtaagagttgttgaccataacttggccaccgtgacctgaaccttcaatgtagaacatgtttacattgtacttcttgataacacggttcaagtgtgcataaatgaagttttgaggaacaatcgtaccccagtgaccaattggctttggcttaacgtcggaaggcttcagttcgcgacgcagcagtgggttgtgcatcaggaacagcgtaccaacagaaaggtagttggctgcccgccagtaagcgtcaacagtttccaagtattccttggaatcgtaatttactgccatcgatattacactccttaaataaaataactacgttctgactataacgtctcgtaaacctcaatcaatttacgctatctatgatataggattttttctaaaagtcaacctttttgaaaattgatacggtccaattatcaaaaatccatttcagcctttattataaaaggctttaccaaagctgctccgattgattgaacacccaaattttagcagaatttctgcgaaaaaggcgtgtttttcactctaaatttttgctaagaaaccaaaaaagcccgcctcaaatcgggccggcttttaaacgttcaaatcaaaacgttcaatgatcttatttaacacgccgttctcatcattgctgccgcagcggaatttggcggccgcaatggcttcaggagcactttgcgccatggcatagctctcgccggctaatttcagcatggtggcatcgttttgtccatccccaaacgccatcagctgactgggctgccaaccacgagctgccaaaagccgcttcaaaccggttgccttatccatcccaggaatgatcaagtccatgttgccatagccgcttgatacgggatgaacgatcttgccaaaccgcttgatgaccgcatccatccaaaatctggtttcttttggtggcacatccatcataaacttaactaccggatcatcaatatcagccaatgaattgatttgctgcatgtggatataatgcggctgaacgcgttttacaaataatgggtcttcatcggcaaatgcaaaggcatgatgccgtcccgaaataatcaaatggccgcctgggatagagcggaaaaacgcaaccagcgtctcaacctgttctttagtaaactgaccacagtagatctcttgaccacgatcaatcagctcaaccccgttttcagcaacgaaagccatgccatctgcttctttgggaaagcgtttttcaaccagctgatagattggattgccgctggcgacgacaaattcaacgtcttttgcctgcagctgagcatagactttttcaaacagcggtcgatcaaacgtgctttgtgaatttaaaaaagtaccgtccatatcaacggcaattgccttaatcaaattgatccccctaatcctggtttagattgacaaacgtattgtatttcatgtattgataatgcacgcgcatgtttgagacttcaaatggcgttccatcatccaggaaaaagacgccttccataataccgactggctcggtaggtttcagatgcagctctttttggtcctcatcattggaaggcgaaaccgaaatcgtcataaatgagcgcgtaacggttttattctgtgattcttccaaatagttgaagatcgatccttcgacaatggctggcgaaagcgtcggcatgattttaattggaatataacccgtttcaatcatgaacggctgatcgtcaatcaagcgcagccgtttgatttgatagacaaaatcattgtcgtttaaaaaaagatcctgttgaatttcttggctggccggcacgacttgatagttcaaaagcttgatgccctgtttcttgccatcaagcttgaaactgtcggtaatccccagattgctgccctcatagcgaaacatcgcttgattttttaaatagagcgggttgataaaggtccccgaaccacgtttcttaaaaatgatgccctgctgcgccaagattcctaatgcccgcttgatggaactgcggctgaccccgtagtcgctgctaaggctgcgttcatcgggaagcttcatattcgcatagtcgccattgagtatcttatgttttatatcgcgcattactgagcggtatactaagtctgccatgtaattacccctcggtcggtccatcgacccctgtcttaacttgtagtatctaaatcagttcatagtatatcaaatctcatgataattggttaccatttttacgttaattggtccgttccagatttgacaaaaacttgaaatttaatacccaatctttaattggacacctaatcattgccttatcaattctggcaactcatgtcataatgggcttgcggtttttgattaattacctggctgatatttcaatttatttaaggagacctttctttatgagtaagaaaaaacaacgcattaaaaaaactcaagtcgaacagattcttgataagcaccacatcccctatcagcaaatagtctttccaacatttgaagatggcgatgtccggtcattgcaagttgatcacctgggcatcgatgagcatctgatctataagacgctggtactggaagggccaaccaccggaccattagtcggcgtagtgccaattgacagccaccttgatgaaaaggccttagcgcgggtttccggcaacaaaaaagtcgacatggtgccgctgaaaaatctgcttaagacgaccggctacgttcacggcgccaatacccccgttggcatctgggaaaagcataagtacccgatctttatcgataatgatgccaaagtcagcgagcagatatacgtctcatctggtcagattggtcgttccgttgccgtcaatgccgaagcactggctgaattggttcatgcccagtttgccgacctgcagcagcattaaaagatcatgaacggctattttaaagtcttaggcgcgttgggactctttttggtaatgatcccagtactcttagggacattaaccgttatgatcagtcgccgcaacaaggccctgtccgttgtcatcggcggcttttatgcacagatcattcttggcggcattggcgttgtcattcatgagctgagtcatctgctgacggcattgtttttcggccatcagatcgtcagttttcggctgctgcacgtgcctgatccgcataatccagccgacaacgccctgggctatgtcaaccatgcttggaacgagcacagtttttatcagcgcgttggcaatgtctttatcgggattgcgccagttgttggctgtacgctggcaatcgttggtctgactcaatggctggttccgggaatctttacgctttggcatgccttgattactcagactgcggcgccgcagattcatctggcggccggccgcacgattctatggctgattttgatcggcaacattgccattggcggttttgatcttagcagtgccgatctggaaaactccgccactggtctgatgactttgcttattgcctttttggcagcggcattgattctttgtcagtttacgacgggaccagtcgttgcccagactttgcgaacctggctggctcctttttattggtcattggcatttgccctgttgatcaatctgctgatgctgggaattttgagtctgctgagccgtttgggataattgacctgctattcagatacgcttagaattatttttataatgcaattaggaatctttgtagaaaaaagaaggtctaaagaatgaagaaaaatctgtctgcctgcaccacggttttggtcggtaaaaatgctaccattgatggctcaaccatggctgcccgtaacgatgatacgtttggtcccctgactccacagcgcttcgttacctacccggcataccataaccagcccaaccaggttaaggcctaccttaacaaatgcgtggttgatcgtcctgccgatggttaccgctaccaaggaacgcccaacgtcaactacaaaacggaaggcgtctttgatgaaagcggctttaacgaaaagaacgttggcatgagcgccacggaaagcacctattctaatgaatgagtactggcctttgatccattggttgaagataccggcatcaacgaagatctgatcgttgccgccactttgccctttatcaacagcgcgcgcgaaggggttcagtacctgggacaattgatcaaaaaatacggctctgcagaaggcaatggcgtaatcttcagtgacaaaaacgatgtctggtatatggaaatcattactggtcatcactgggttgcccagcgaattcctgatgactgctacgcggtaaccggcaaccgcatcgccattcaagaagttgatttcaatgatcctgataactttatgtgggatgacacgattcgcgagttcgtggcagaacaccatctgaatccggatcgcgatggctggaacttccgccacatttttggtacggcgaccgtttttgaccagcactacaacacgcctcggcaatggtatggtcacaaggttctgagcccagacgttgagatggatcccctggactttgatctgccatttgttatgaaggccgaccacaagattactctggaagacgttgaagaagttttgagcagtcactaccaaaacacgccttacgatccgctgggccacggtacggatgaagaaaagcacatgttccggccaatttctttgaatcgaacccaaaactcgcacattctgcaggttcgccctgatctgccagaagcagcctcaacgatcatgtggatgagctttggaattccaacgttcacgccatacgttccgttctttggcaatgccgcggatatcgatgccagctacaagaacacgcctaaagagctcaacatgaatctgaagagcgcctactggatgtaccgggcactttctatgatcgttgaaagccatcatgcagagtttttgcaggctgatcttgactacctcaaagacgcccgccaatacttctacaagtggatcgatgaaactgccccacttgctgaaggaatggacaacaatgaagcaagtgacgttttaagcgagaagacgcatgaaatggttgccgaaatggctaaacgcaccaaagagctgatgagccagctgatcatgcacggtctggagctttcaaaactgacctttattatggacaagaatctctaacattactaaacccccgcatttcagccgagatgcgggggttttgactgtttttgatcaagccgtcgcctgctgttttttcgattttggcaatgctgctaaaagcagagtcaccaatggattaagcagcgggtagagcgtaaaggcaacgtagccgtagtcatgcaggcttaaggttccagcaatgaagatgccactgacgctccagggtaccagtggattgatgtcggccccgccagctactaatgagcgcgtcagcatgttttgggaaagctgctgttcttcgtaagctgatttgaaagccgtacctggcagaatttcagaaaggtattcctcgccaatcatcacattgacggcgaccccactgacgatcgttgccaaaaccagcttaaatggcgtattgaccagtttctgcagggcaatcagcaattgatcgacgactccgtacttcatcaaaagcccgcccatcgacaaggcacaaaggatcagtgcaatcgagttcagcatatgagtaatgccgccaccagacatcaacgagtcaagcagcttactcccatgcatctgaaagccattcatcaacaaactgctgatctgagcaaacgagagcgatggcgtccagatcttggtcaaaaccagggccgtaaacgagccagccaataaagtaggaattgccggcacctgtcttaacgacataaccaaaagtaccagaatcggcagcagcgaccaagcgccaacatgaaaactggatttgagcgcgctgctgataacgtcaacacgtgaaaggtccgcattgatatttttaaagccgattaccgcgtagatcacggcagccgcaattgctgcggggatcgcggatttagcggtgtttttcaaatgttccggaacgcgattaccgatcagactcgtggttagattggaagtatcggacagcggtgatagattattgcccaaaaagccgcccgcgacgatagccccagccgtcattgcatcgctaaagcctagaacgtggccaattcccataaaggccaggcccagcgttgaaatcgtcgtaaatgcattacccacgatgatgccaacgatgccgcaagccaaaaagacagtagggataaaaaatttgaccgaaaccaaatcaaagccaataaccatgatcgtcgcaatcgttcctgaggccagccaggtactgatcaacagtccaatcatcataaagatcatcatcggaataattcctggtttgatcccttcagcaatcccatcgataacctgctcccaggtaaagccgcgcaacctgccgtaaaataaaagcagcgtaaagacgcagagaatcggaatctgcgggctcattttgtatttgatgattaaagttcccaaaatcaaaaacataacgacgattacgccgaaactttctgtcattttcaaatgccgctgttccattgaccattcatcctttccaaaataaaaaccgccacgctgctccgtgacggcaaatttgatgaatcatcaatcgccacgggacggcccgcggcggcatcatgtcaagcttccgcggatacaagctgttgcgtgcctgcatccataacgaacacaaccactatcatttacagatagcgttgataagacgttgacttagcaaatgcttgaaccatggtttcatctccgttttccaagttattggcatcattataaaaccattaaattagaaattcaatataaaattagacttttttaattttagtaatggagctttggcttggcaaaacaatcagctcgtgtattccacgctgattgccctataataattaagataatctgttttagaggatggcgattaaaaaatgaaaatactgcttggactaaagggcagcagccaacgcgctcagatcgacgaccggctgcagcatcatcccgacgtctatgaattctacaccgacgcaagcgacttcacgcccaatggctatcagcacttatatgaagccgttcaatacgtgcagagccgtgacgtcagcaggatcgttctgcaccatccaatgaagtttggcgctacccacactgagatcgtagcccctgaaaaacagtttcctgaactgtatcgttttgttgaagaaaccacaatgcagctgatcggtttggctaaggatcttgacgttcaatgtctgattcacggcgcctatgctcaggaaaccaccaaatacatcgactgctatcctaatctggtggccgcccagcaagctgcatttgatcgcctggatcgttttgccaaagctggcggcagtcacatcatgtttgaaaactccatcgcgccggtatttgcctatggcgatccagcaatggaagacgagattttaagtcatcattatcggctggcctttgatacctcgcattgcttcatctggctgcacggcaataatcaaggcctgcaaaaatcgctgcggcatttaaaggaccagatcgttcattatcatttggtcgattcaatggggcaaacccatgacagtctgccactgggaaccggcaagattgactggcgcggtgtcttgccatgcttgaatcctgatgctaccagcatttacgagatcaatctctccaaccaggaagactgccaagaacagctgcagagtcatgcttatctaaccagactggctcaagcacttgattagcccttcttgacgtcgcgcggctgttgagtttcctgcatggtctttagcagctcggcagcctgcatccggttgaacagcgtttccacaacgtaattgatcagctggtcattcaccgggtcaagctgattgtcgaccgctgctgattcattatgcagccgggcattcatcaagtcgacgaagcgatcataggcctgctgcggataattattgatcgtaacctgtttgatgccctcatgaattgaaggaatcgaaaagctgcccttgagcatggcaatcataatcaccgcggccagctggtagcgcgagtacttcttttttactggcgccatgatgatgtcttttttaacatagttgttgatcatcgacttggtaatcggcgcgatgcccattcccatagcgcgatcattaaccaaggcaacaacctggtcgacataaagatccaagtctggcagctcatcccagtgtggcagctgaatcttgcccaggttagcctgccagcgttcaaaactcgtcattttggttcctccatttcgagtaattagatagtcttcgaaaccagtatacagcattactacatttgattggtcgttaaagcattcataatttagtcttcgatgcccacagattgattacggtattgatcagtcgtcaatgccatcttcaatacattggcagcctgagctaaaccaactgcctgtcccgttagcggctggccctcgccaataatctttaaggctgtttcgcgtggaacaattggcagcgcccgcacgatcacatatggaaactccagctcgtcaatcatcttaatcgcatattgatgagccaataccatatccaaagccgatttgccataccatttctgcagctgttcatcagtggcatcatcggctgtaccggcaattgaaagcattacgatctttgctggcgttacgttactgtcatcaatcaggtcaaccaggtcatagacatcctggtcaaccggatcgtcaggcttaggcagccagcacaagacgtcttggctttgcagcttaaaatgaaaacttggctctaccacagcatccggcagaaatgacagcaggcgctcgcgcaaaccatcattacgctgcccaatcaatacgattcgattcataatctcacctcattttactagtaggtcatcagttcgtctgctaccgtggcatcctcaatccgaacgtcagtaatcgtgctttgctccagcagcggcagaattgcttgaatattgcccgcgtataaaaaacgggtttcttgcggtgcttcttccagaattctggctcccagcttctgggccgtctcaatcggaaatccagtgccgaaaaccgtgactacgcagtcaacgccgctttggggatgcaaatggcgtgtcgaggtcaaatagccgcggctgaaataataaatgtcatcagcgcagctcatcatggtcgtcatattgctgctggtcatcaagatcaatgcatcagtcttttgagcataactgcgcaacagctgccaaactgcctttgcttcccgcggtgtcaagccatccgttgcgtggtcaagcaaaagaacagacggctgtttgaccagcagcagaattatgctcaactcaattttttggtttcgattgaggtctctgattacaagctgccaatccagatcaaactggcttagaatctgacgggcctgttcatcatcaattgaattggcactgcctttttgcgcttgacgaatcgcacgctgaatcgtccaacgatccttaaatctaagatcatccagcatcaccagcgacttttctggatggcgaaaagtctttaaaggctggtcgttgatctgaatcataccactggttggctgaccatgtttgcgcagcaatgaaaacagcgtctcaccaaacagcggatcatcactgcaaaaagctactacgttaggcgactgcagcgtcaggtcgatatttgacaaccgactgccattatcggcttcaatcgtcaaattatgcgtgactatttcgaccatggaaaatcatcctttctaagtcgtttgcttttattataacgtggttacggcaccaaaccatttttaaactaaaaagacagtgtcaactgctctaaaaatcggctaaaatataagttatcgactatgtaattaataagaaagaggaaatcaaacgacatgaacatcctttttatctctatcgagggcaacacccgctcatttctgacccgcttgcaggcatacgcccaacagcagcacagtttcaacccgcagctgcccaccatcaatctaaaggaaatcaccgatcaaacattgccggcagccgaaagcgaaccattttttgctttcgtgccaacttatctggatggtggcaatggttttgactctggcgttaaagaactgatgaccaatgctttgggtgaatacatcgcagaaaatgataatgccaaaaagtgcttaggcgtggttggcagcggcaatcgcaactttaatgaacagtattgtctgactgcccgcaagtatgcttatgaattcaaggtaccattcttggctgactacgagctgcgtggcaccagtcaggatgttgagcagatctacgctatcctgaccaagcgctggcaacaggttaatgcctaatcaacaatatttttggcatggcagtttttggccatgcttttttaatttttatatgtttcacgtgaacaaaccgttttataatagtattagtaatggtatcgatttcatgcagtaatggagatgattttttgaatcaaaatttgcagccaaaagttcggctaaacaatggtcttttaatgccgcagattggcctgggcgtttggaagaccccgcttgaaacaacccggcagatggtttgcgatgccctggcgaacgactatgtgctgctggacacggccaagcagtatggcaatgaaagcgcggttggtcaaggaatgcaggatgcctttcaatctaccgggcgtacccgagccagcgttttcttgactaccaagatctacaatggcgatcaaggcgactacgaccgcgtacgcaaaggatttgaaggccagctgcaagctctgcagaccgattacgttgatctgttactaatgcactggccggtcaacgacttatacaaccagacctggcaggcaatggaacgaatctatgccgatggtcaggccaaggcaatcggtgtctgcaatttcgatgttgagcgcatgcgtgatctattggaccatgcccaaatcatgcccgccattaatcaaatcgagttcaatcccaagattcatcagccagccatcgtcaatttctgccagcagcatgatatccaaatggaagcctggtcgccactggggaatggtacgctccttcacgaaccgattatcgaaaagattgcgcaaagtcatcaaaaaacgccagctcaagttgaactgcgctgggctttgcagcatgatctgatcgtaatccctaaaaccacgcacccacaacgcatgcgggaaaatgccgatctttttgattttgaactgtcaccagccgaatgcatgcagatcgatactttggataccgaagaacatgccatctggtacgataaattcaaatggtcaggcaatcctaatggcatcgataacgtgattgccgatcccgccagctttgaatagtaaaaagcgaatccagtcgtcaatgaccagattcgcttttttgcttcgtcaatttattcttgtgggattcctgcgctgatcagccaggtaatgccgtactgatcaacgatttgtcccagattgccgcccagttcatgcggtccaaaaggcagggttacgcgctgtgcgtcgctggcagccaaacgatcaaataattccttggcacctgcttcatcaccgccaaaatccaaaagcagggaaatcagcgaagaagtctggggattgcccatcgttgcatcggcacagacgattttctgtccgacaattgaaaattcaccgtgcgctgtcgtggcatccagatcatccaatgccaagccaagattttcagcttgttctgctgaaagcggctgacggtaaatgatctcggcgccaaattgttccacgtaataatgcatggcttcgcgcgcattttcaaaagtcaaatacggatagatttttgccgtcataattttcctccgataaagtgttcttttaaattatagggagccacgggtcattcgtcaaatcacgacttcgattcaaaaaagagctaggtaagcgctaatggtcgtttattgcgacgaatactgcattttgacgttcatatagattttgttgcatgtaaatcgttaaactttgtgcagattcatgttacaatgacgtggtcttagaaaaaagcggaaataaataaccaactattcattaatcaagaaaggaatgatattttgaacaacacgcgcaaacacagcgcctttctggttttaggcattttcctgctgggcgcctgcatgcggacgccggtaacctcgatcccttcaatcgttggcgagattgccgcctcatttcacgttgccactaccagtctggggattttaactacgattcctttgatctgttttggtttggtcgcggtcgtagtaccaatgatcggacaaaagcttggcaatgaattgacgattgccattgccctgctgatcttatttgccggctcttggctgcgggttctcaactatgcttcattaatgatcggcacgctgctggtcggcattgggattacttttttgaatgtgctcctgcctgccatcatcactgaaaacctacctgacaagatcggttcaatgaccagtctttataatgtttcattagcgctcttctcagcaattggtgcttatgccattaccccagttgcgcaaaacagcagctggcagttctcagtaatgctcctcagcatgctggtgctggcgacattggtattatggctgccaaatctgcgtttcaaccagcgtggaaccagcgaagccaccagtactggcatcaacatgtggaaaaacaagacggcttggctgattttggtctactttggtctgtcatcattcgtcttttatacaacggttgcctggctgccatcaattgcaatcagtgccggtttaagcagcaatcagtcaagtctgatcgcggggctgttccagctgttctccatgccgggagcctttttagcgccattatgggcaaccaagctgggcaaccgaacgccgctgattctcggtgccggtatcttcacgattctgggctatcttggcttgatgatgccatttcatagctttggctggtttgtctttgtcagtttgatcttggcaatcggaacctcggcaacgtttgccctgatcatgacgctgtttagtttaaagaccaagactccggttaacacaggaaaactgtccggcatggctcaatcattaggctatctgctggccgcatttggtccgatgctcgtcggtaatcttaaggctgccagcggttcatggtttgccggtgagctgactaccatgctggttgccgttgtcttcactatttttggcgttttgagcgaacgcaagccttacgtcgactaattactgatcatcaaaaacacgcgtgcttgaagcaggcgtgttttttttactaaaaaatcagatatgtgcaagcgattgctttaacgttagatcaacgctaaacgctaaaataaaattttattttcggcctataccattgtctgataagcgtttgacaaaaccccagaacgcgctttttttcggcgtggtccatttgagaattccgcaaaaagtggggacgctttctagtgcagttttgaacataaaagtatataatttaagcgttagagtgattttctgatattttcagaaggagtgaacattttggctaaggaaaataaagctttaattacgctgttcggggcagccggcgaccttgcacaacgcaagctgtacccatcattattcaacctttacaagaaaggctacctggcagaacactttgctctgctcggtacttctcggcgtccgctgagcgatgaggacttccaacaaatggttttgaagtccgtcaacggtatggaaaacgaagaagggcaagctcaggcatttgccaagcacttcttcttccaatcccatgacgttaccaagcctgaacactacactgtgcttaagcaacgcctggaagaactggacaagcaatttggtgctgaaggcaatcgcctgttctacatgtccatggctcctcaattctttggcacgattgccttgaacttgaagaagcaggacctgctgaccaaggatggcttcaaccgtctggtgatcgaaaagccatttggtcgtgactacgaatccgctaagaagctgaacgacgaactgtcacaaacgttcaacgaaaaccaaatcttccggattgaccactatctgggtaaggaaatggttcaaaacattcaagccctgcgttttggcaacacgattatcgaatcgctgtggaacaaccgctacatcgacaacatccaagtaacgctgagtgaaaaactgggtgttgaagaacgtgccggctactacgaccaatccggtgcactgcgtgacatgctgcaaaaccacatcatgcagatcgttgctcaactggcaatggaacaaccagttgcctttactgacactgacgttcgggttgaaaagattaaagcactgcgttcactgcgggtctacaccccatccgaagcggctgccaactttgttcgtggccaatacggtgctggcgatgacacgcatgcctaccgcaatgaagacggtgttgatccaaactccattacggaaacttttgtcgctgccaagctgatgtttgacaactatcgctggtctggcgtgccattctacgtacggactggtaagaagctggctgacaagtttacccgtatcgacgttgtcttcaagaagccgctgatcgacatctttgccaacccacggatgaagagcgaacagtcattgaactccaacgttctgacgatcttcgttgaaccaaactctggcttctcactgcgtctgaacgctaagcgcgccggccaaggcttcacgactgaaccagttgacttgaagtacctgcaaagcgacgaagccaagaacgaatcaccagaaccatacgaacgtctcttccacgatgcactagaaggcaaccacaccaactttgcatcatgggctgaaattgcctacgcatggaagttcgttgacgttattcgcaagctttgggacattgaagaacctcaattccctaactacacgcctggttcaatgggcccagctgcttctgatgaactgctggctcgcgatggccgtcaatgggtttaccatctgaatcactaaaaatcaaatagtattaattaaactaatagcgtt

SEQ ID NO: 1868 - DNA, 8014 bp, Unknown
  gut microbiota DNA sequence
agtcgttaagacagttaatgcgcgacgccctaagccatgctatctgattggattcggggccaagccattggtatttgcccacgctattttaccaacgcgagtgttcgactttatcatgatgcacgcttcttaaaccaggaaatatcgcttctaaattaaaggttcttaatcttagcttgataaaatctaataaaattcagaataatggttgacatttatcgttatgccaagtattatgattacatcaaaattagaaattgcttagaagagatgagtagtcgcgggcagcctttaaagagaaccggggtaggtgagagccgggatcgtgaaacgcgatgaagatggtcttggagcaagtcggtgggcgagccgtttggtaagccggccgcggggtgacgtccgatatcacggtccgggtcttctaatttttagagtactcagtaagggctagattgtgaggtctagctgaatcagggtggtaacacgttgaataagcagtcaacgtccctgggagaaagtgcaggatgtgcttttcccagggatttttaatttcctgagaagtcctgccaaacaagcattttcgaaaggaagttatcacatatgacgcaagcacaaactttaacttttaccaaccgcacgacttcaccattccgttatgacatcgtgggcagtttcctgcgcccagccgaactgaaagcggcgcgggaaaaatttgccaatcatgaaattgaccatgacgaactgaaaaacgttgaagacaagtgtatcaaggaactggtcgaaaaagaggcgcaagcaggcctgcacgcggactgatggcgagttccggcgttcttggtggcatctggacacgttctggggctttgaagggatcgcacacacgaatccagagcatggctactttttccatggtgaagaaacccgtgcagattcagcagctgtgacaggcaaggttcgctttaacggtacgcaccccgacttggaagccttcaagtaccttaagcgcttaacagatggtacggacctgatcccacgccaaagcattccggcaccggcacaatgttatgaagaattagtactgggtgaggggaagaacgaggccatcgctgaattttactcatccaaggcagagttggccaaagacgtttcgcaagcttaccatgatctgattttggctttatatgatgccggctgtcgtgacttgaaactggatgactgtacctggggatcaattgctgatgacgaattctggcatgtgtttgcggaggatggtcaaagccgtgaactgttgcaagaacaactcttaaagatcaacaatgatgccttggtaaacctgccagctgatttggtagtgactacacatgtctgccgtggcaactaccactccacctgggcaaccaagggcggttatggtcccgttgctgactatgtactggcaaaagaaaacgtggcagccttttatctggaatacgattcagaacgggcaggcggttttgaacccttggcgaaggtcccagctgataaatacgtggtgctgggtctgctaacctctaaatctggtgaattggaagatcgtcaagcaatcttggaccggattcaagaagctgcacagtatcatgatctggacaaactatgcctgagtacgcaatgtggcttctcttcaactgaagaaggcaacattctgactgaagaacagcagtgggctaagattgccttagtcaagagcattgctgaagaagtctggggcgcttaaaacggtcttgattgatctccttaattgacatttttcctaaaaaagcagcatatgccaaaagatcaaaaatcgtgggctgagatcattttgatcaagtatgctgaaatactttcaatatctcctcaaatacaacaaaactcctcgcagtcaagcggggagttttgttttgggattgaaaagtcagcttagccttggaccgtggcagcttgcaggtcgctggcttccttgatgttgtgagcgtccatgtattcgatgatttgattaatggtaatgtaaggaacgttgacgcgcttagctatctttgccaaatcgtcacggcgagccatgtggccatcttctttaagcacttcaatgattaccgcagccggttcagcgcctgccagatatgccaggtcaactgaagcctcagtatggccgattcgcttgcgcagcccgccgtccaaagcataaagcggttggatgtggccagggtgattaaagtcggttggcttggcagcagggttggcaatgcggttgatcgtagcagcgcggtcaaatgcggaaacgccggtcgtgacgccggttgcctcaaaagtaccatccgtagtcgtcataaatggcgtttggtgaggatcagtactgtgttcaaccatcttggtaaagcccagttcatgtgctcgttggatggtaatcggcacgcacatcagaccattggcttcgtgcagcatttcgtagaccgtttcgggagtgatgcggtcagccaaagccaccagatcgccttcgttttcgcgatcttcattatcggaaagaattacatagccgccgttttgcagttgttgcagtgcagtttcgatcgtgtcaaattgaaccataattttagcctctttctctgtttgccaaatgtaaaatcaactctccgttcgaacgtggccttatcatatcctgttatcgttagtttgtaaaccgtactatctgcctaaaacggctttgtttatcgaatgaatcacgaacaataacgttaaaatgtaacgaacgttcgagaattgccgactgaacaattgaacaagaatttgattatccaggcagacgaacgttcgtaaagcttttggattactttagtcgcctgctctttgaaacaagtgtcgtttttgtttagtggtgaactagaaaatgaacaaaaaatgccatcaaaaactttttcaaaaaatttctgatgactttcatttattaaatatctaaagtcgattggttgattatttgcaatgagatcaaacgaattaattcaataattaaggttgccggttttggcattccgttcttgggcagcctggggagccatctgttcacgcagcgcgccatagattggccgtccccctaacagatcgttgactgtgtaggcaatgaacgtaaccagcagcattggcagaatctgctgaatcgtgccgaccatttcagtcaaaagacaggtggcagtaaacggggccatttcaattgcgccaaaataagcagccataccaatgaccaccagattgatgtaggctttggcaggaatgagaccaaagcggatcatcaagcagccagcaaagccacccaagatcgcacccagtaccagaatcggcatgaaaatcccgcctggtactgcggcaccataagaaatcatcgaaaaaacgaatcgaattataaaataaactcccaaaagcatcatcatcgcttgaaacccgtgtacatgacgtggcagctgggcgataacctcgacgaaaacatgactgccgcccagcatgctggcatcccacaaaccgattggaaccaccagcagcaaggggatgatcgagcgccgatttcttggcagccaggaaatcttgccataccaacaatgaatattaatcagacaatattggtaaaaccaagccagaatgcccagcaagatgccaaacaaagccaagggaagataggtagccggtggcagacgataggtaacgggcagccacatgcatggtcgtgtgccaaaaagagcagggtgacgagatcggaagcgatggctgcggttaatgccgtcagccaggtttgcgactcaaacgtataggtgatctcttcaagcaggaaaagcgcaccggccaatggagcggaaaatgctgcggaaaggccggccgcgatgccacaggcgatcatgaccttggtttcgtggcgagacgatttgaagcatttttccgccagcccctgaccaactgccgctcccatctgaatgcagggtccttctcggccaagaaacaatcctggacagattgccattagaccaatcacgtatttgcgccagagcacggaccgccaggacatccagtgttcatcatgcagaatgtcttcaacttgtggtaccccggagccaacgatgtcaaaaagatgatttttcaacagacgtgacatgatcagccataagataaccgtgccgatcagatatgcgcccagtgccaaataatgggttcgcatataaggatagataacattgagtccttgcggcgtatcgtcgatgattttgcgaaacgtggttacgatcagaccagttgccattccgacagcggtgccgcgtccaatcctttttaaaaagtttgaggcaaagggccggtgcagaatttcgcttgcgtcaatttctttcaagatacaatccccttttcgaatttctgtctttgttattgtggcattctgattggttgccattttgataacagctatcaatcaatcgttaaataatgaattacttaataattaacttatggcgaaaaaacaaaatgcagtctgtctaaccacgaaaaatatagcacaaatgaaatcgctttttaagaaacattcattaaaattagttaatctaaagtatatttttatcgaattttacaaaaattaagttgttattttattaaagatgttatacttttctccaatatcaaaaagacggtttatttgatgaggagtcgctcaatgccgtcctaggatatccttaaaagttgttgttgattacctgtctgcaaggataaggaggaatttatgatgactaaagacttggaaaataaaacggcgatcgttacggcagccagtcgcggcatcggcctggcaattgctgaaaagctggttgagcagggggccattgtctatatggctgtgcgggacagtgaaaagaaccgtcagttgacggcacgcctgcacgagcaaaatgaaaacttccgcagcgttttttatgatgcgtttgactttgcaacctatgcgcccatgattcaagaagtagtgcaagacgcgggccatttggacattctggtcaataactttggcacgacggatgttaaaaaagatacgactttggttgatgacgacagtcagaccttctttgatatcgttgacaaaaacatcgcaagcgtttattacacttccaaatatgccgttaaagtaatgcgcgagcaggaaagcggcggcaacattatcaatatttcatcagttgccggtacgacgccagatatcagtcgcttggcatatggcgtctcaaaagcagccatcaactcgctaaccaaacagacagccgttgagtatgcgcgtgataagattcgggccaacgcggtactgcctggttttgtcggtacggatggtgccttgcggaacatgtcaaagagcttcttggatggctttttgaaacacgtaccattaaatgaggtcgttaagccagtggatatcgccaatatggttgccttcctggccagcgataaggcgcgctatgtcacgggtgagctgattacggttgccggtggctttggcctgccaacgccgatctatggtgatgccatgagcggcagcattaaaaaaggctgataataactaaccagataaaaaggactcgtcgattttggcgggtccttttatatatgatttaaatcattagcttagttggcttgattcagcaaggtccgcatcgcttggatcggaatgcggctgtaattgacgtctaagcgactgacatagttcaaatcagccagccatttttcgattgctcgcctaaacttgcgattggaacggttgcggcgaatcaggtagcgcaaatgatgctcgatctggccttgggataattgtccattgataatgatctggcgcaaaattgcatgacgctgaggtgtggttaatccaatctgggcattgacgttgtagccgaggatatgtagaatcgactcctcgttgccaaacgtcgcaacaaaatgtttgttggtgtgttggggtggtaatttgggtgtccaaaaactttcatttaccacattgcagagcagccgacagtcatttctgatttcttgataaactggctccttgatcatgatcctgtcgcattcttgacaataataagcgggaaaacgaacaagatgatggtcgggatgccttttgaaattagcattggcgacagcgtaaaacttgattatgttatgttttttacccagacagggaatctttcgtatacgtgtgagataccagtcatcttcaagtggatattgacaaaatttcttaccgtctttaacgattattgttaatttgtcagaagtttgcgtaacattatcagttttaggcagtggatttgcagtgagttgatccttttttgaatccatgcttggcagttcattggttgaattgtcggtagagacggagcttgtcgacttttgcctaactgtttttttgattgttggtcgcttatgtgacggttttcgaaaattattaacggattctttcgctgagcactctgcaggaacttggactgttggtattggcttagctgatttattgattactggctttgaatttgatgatttcagaagcggtttatttttgatcgcttctttttttgggccatattttttgattaggtattgaacaataatgatcaagataagtaataaaataaaaacataaatatttatgaaaacactcccccaataaatactctcccaaaagtattgctgttttctattatagagcgttttcaaagtttttgaaattgcgcgtacgcagctaacttatcgatggttcaggtaaatgcgaccaaaataggcataaaaaaattttttatttatttttagtaagcgcagtcgttacggttaaatagatactttagcgtgattttgtttaagatagatgaagaaatttgcattggcaagtgaatcgatcttttggtaggatatacaagttgctcaaagccaaaacggctgatttgttttattttatgggcccgtaaaataagacagctggcgagaaaacgagcacttctcgtcaaccgaggtgggggtcgccccacggataagcagccgcgcagttcgcgtggtaaaagctactgagaaaaaggagaatcgattcatggaacgtaatgaaaattactttgtctggctgttcaatcaactgaaagggtggccaatgcagaactatctgttgtttttctttgccctgggatttcagctggctttgttgatcagcagcaaggttacgtcggtcacgctgattacgtttatcggcacgatcttggggacgctgtgcgtgttggccatcaatgctaccaaggcgatcaatggctggctggggttgatctcggctgcctgctttatctacgcgggtttggcagctaagaactacctgtcgatttttgaacagattgcctatgcattgacgcttgatctgccggtgatctttgccgtacgcagctggaacgacgataccaaaaatcatctgcgccgtttcggaaccaaacaatggatcgtagccattattggtacgctgctggtctacgctatcagtggttatctgattggcagtttcactaatgatccgcggccatggatcgatgccatcagttttgccatcagtctgactgcggggatcatgtgctttatgcgctacaataaccaatactactggtggctggcttctgggatcttccagctgattctttggggcgtgacctttgcgcaaggggatgccacgctggcaatggcaatcaacagtttgatctatgtggtcaatgacattctggcttttacggtttcgccatggtttaatcgcggccgtcgtcaagctggtttaacggaaatggaataaatcaggccggatgttatcggcaccaactgctttcagagcgatctgaaggcagtttttttgtgaataaattccgcatgagcagccattgattcctgtaaatacctactattcgccgattttaggccagaagtaggtagttatatattcgattttgtcatatgttttatgcaggatttt

SEQ ID NO: 1869 - DNA, 1413 bp, Unknown
  gut microbiota DNA sequence
ataaaaatagggctacgaacattgaaaagggagtgtaaaatattttgtgtaaatttaaaggaggtattgaaaaagggaaagccctccccgtatgattgaactgctaaaaccaatcagaatacggaggctttcctcatggaagattctatcaaaaatatcattaccgcgctactggcagatgacgattcggctttaaaagagctgtttcgggcccaggtcgaagataccgtcaatcagttcctgcaaaatgagatgacggccgtactgggctatgagccttacgcgcaaactggtcaggatgggcagcgaaactatcgcaatggctactataaccggtcctttgactcaacgctgggcgacctcaccgtcaaaacgccacgcgatcggctggggctgtttaagaatgccctgtttgagccctacgcccgccatacctcaacgcttgaggaaacgatcatcatgatgtactccaaaggcattacgacgcgagaaatcgccgaactgattgagaagatgtatggccagtactattcgccagtgacggtgtccaacattaccaaacagacagcgagcctggtcgaagaattccacaatcggaagttcaagcagtcgcagtatgtctgtgtcttcctggacgcgacctacattccgctgcgccgcgataccgttgagcgagaggcagtcaatatcgcgatcggtattcgcagtgatgggaccaaggaagtgctggactactgtatcgccccaacggaaaacggggtcgtctggtcggagctgcttagcggactgcgccagcggggaatcaccgacattcagctgtttatcgccgatggtatggtcggactccaaggcgccattgagcgaagctaccctcaggccaagtttcagcggtgctgggttcatcttgagcgcaatctttacggctacgttcgcaaggcagaccgcggtgatgtcgtcggtgagtttaaagagattcgcaaggccaaggatctccccgcggctcgtcaaaagctgaatgacttcattgagcactgaaagaagcgttataagcgggttgagcagctggctgagttaagcgggctctttacgttctacgactttcctgaggcaatccgctccacgatctacaccacgaacgtaattgagtcttttaacaagcagctcaagcgtcagatcgataagaaagagcagtttcccaatgaagatgccctggatcgtttcgtcatgacgcaggtagcgacctacaacgatcagaatgtgtccagaatacgccgaacccgcactggatttaccagctgtaaggacacgcttgactcaatgttttaaaaaccaggcttcatcatacgcagaggaagatccctttttacacaaaattattgacacacccacaagacatgctgtttttgtttggag

SEQ ID NO: 1870 - DNA, 18449 bp, Unknown
  gut microbiota DNA sequence
tggccccgccagtgacggggatttgacgtggataccaattttctcggttcgcgcctataatgcaccctcaacgagtacgtttcgctgcccaaaatgactccgcaatgcgtccatcaacgatttacgaattccgtgcgacacaatggcttctgaaatggatgacaaacaaaatccctgcctcgattttgagacagggatttcattttttaagatttttaggatagatatgagtaagcgataaatctcttcaattaagcattcggctgttcttgaattcggccgacaaatagcgcgccactggcaaaaacaataccggccaaaaggagcatccccggcatggacttgccaatcaatgggaagatggcaaagctggcaacggaagcaatgatttgcggcaggcagatgctgcagttgaacaatcccagatatgccccttcatgcttaccggccagcgcagtcgtcagcagggcaaacggaatcgagttcattgaaatccagccaatgccgatcagagcgaaagaaagaatcaaaagtatcttgtcgtggatgaagaacactgacataaagccaagtccgccaagaaccagacctaaacgatacatcgtcttgcgctgatttggcttggtctttgacagaaccattccccacagtacggctgaaatcgactgaaccgcggacagaacaccgaaccagttgccggcagcctgatagccagccgttgacggatcagttacattccagacattctttgcaacagcgccagtaccgtaagtccaaaggtattggaacgcgaaccagcagaacatctgaacaagtgagatctgccaaaatgccttaggtgcgttcttcagcaaagttgcgaaactaagcttttcttgattggctgcaatatcaacgccatggtacttggcatagtcttgagggttgtattcatgaaccttggccagcgtgaagatactggttaagagcagtacagctgcgccaaggtagaaggtccagatgactgagttaggcaaggagcccttcttagcagtattggaaacccctaaaagcgtcatgatgaatggcattaaggttgcgagaattccacccatgttggagaaaatctgttgccaggaccaagcaaagtctttctgatcctcgttaaccatatcaccaataatcatcttgaatggctgcatgcaaacgtttgaagacagatccatgaacagaactgcaattgcaccaaaccaaagcgcggccaatgaaccatatccgaaaccaaacgatcccgcgttgggcagaaggatcagaaccaaagccgcaattggtgcaccgaccaaaagataaggcattcgacgaccaaatcgattccatgttaaatcggaatacttgccgactaatggttgaacgatcatccccatcagtggcggcaaaatgaagaagaagccaagcttggtcgggtcagcaccgattgtttgaaagattcttcccatttgcgagctttgcagcgaaaatgccatgttaacgccaaagaaaccaaaagtcatggcaaacagggtacttattggcagactcggcagtcccgtagttgttttttgattttccatattacttgttacctctttgaactgaattcatatactttagcttcatatggacgcagagtttctcccatgtcatcctcgtagttgcttaataagagcttgccttgaccagccgcgtattctcgcttgattgtttccttagtaaagttggctactacaagcagcgttgtctcaccgtcatcacgcgtgtaggcaaagacctgctcatccaattcattgccattgaccagcgtaaactttccttctgtcattactggcaggtcatggcgcatttgaatgagtttctggtagtgatagaagacggatgatggatccgccagtgccgcctttgcgttgatctctgaatagttgggattgaccgcgatccaaggttcagtatccgaaaaaccggcattcttgctgtcatcccattgcattggcgttctggcattgtcccgagaatgaattgccagatatctgctcattgtctttccatcaaccagatgctcttcgtcaaccagctgatggtaggcattaatgctctccaaatcacgatagtcagacaaagagttaaaggtcgtgttggtcattcccagttcctcacctgcgtagatataaggagtcccttgcagacagtgcagcattgttgccaacattttggccgaaacgacacgatattttggatcatcattgccaaaacgggatacgacgcgtggctgatcatggttgttccagtaaagcgagttccaggccttaccactcagctgagtctgccatttcaccaggttctctcgcaattctggcagactgacttttttgtcgctccattttcctaaagctgggttgtcgttaccatctaggccgacatgctcaaactcaaaaaccatgttcagctcagtctgttcaaggttggcgtacttcttggcatcatctgttgtggcaccaggtgtttcgccaactattaccaaatcatgcttggccattacagcctgatgcatttcttgaaggaattcgtgcatccgatgaccattggcaacaaccggctcgacatcgccatacttcattcctggcgcggtcggaatgtctttataaacagctggctttgagatcaaattgatgacgtccattcgaaagccgtcaacaccaaggtcagcccaccaattcatgatgtcgtataccgaatgacgaacggcttcattttcccagtttagatccggttgctttacagcgaacaggtgaaggtagtattgaccgcttgtctcatcgtactgccaagctgaaccagaaaagtatgatccccaattagttggttcatggccatcgactggatcacgccagatataatagtcacggtatggattttcttttccttggcgactttgcttgaaccattcattttcatctgatgagtgattgaccaccagatccatcattatttttaatccaagttcatgagcctttgtcagcagctccttaaagtcggtcaatgagccaaaagttggatcaattgcccgataatcactgatgtcatacccattatcaacgtttggcgaacggtagattggattgagccagataatatcagcacctagttttttaatatagtcaagccgactgatgataccttttaaatcaccaatgccatcatgattgctgtcttgaaaactccgtgggtagacttggtagacaactgaattttgccaccaccattttggtgtatatgccattattatcattccttgtaaaaaaattaaaaataaaagttacgcaaacgtttgagtaaatgtctaaataataaaaacggtatcagtaaccgttttcaaagtgtattatagaatgagtactacaaaagtcaactacttttttccgaaagaaggttctccatggccaccatcaaagatatcgctcgactagccagagttactccctcaaccgtttcacgcgtattaaatcatagtgggggatatagcgaaaaaactcgtcatcgggttgagcaaatagcgaaggaactacactatcaaaaaaacgaagctgccgttaatctggttgcacagacctcaaatctgattggggtaatcgtaaccaatgccacaacgagctttgccgcccccattatcgacagcattgaagattgggcctaccaaaatggcggaagaattctcttggctcactgtggcttaaatgactctgaacgactgaagacatgcctaaatctaatggctgggcgcaaagtcaacggtatcatttcagtttcggttcaatttgatgaggacaatctgaaactgcttgatcaactgcagctgccattaatttctctaggcgtcaaagtttccaaccaaccaatgatttccatcgacaacctaaaagccgccactacagggaccaattatctaatcaaccgcggataccagcggattgctctgattgccgtggataccagcgacccgcaaactggtagaacgcgttgcgcaggatatcaaaaagcaatggaatcagctggacttacaccatccatcattcccggcgactactcgtttgcagcaggaaagcaggccgtagaacttcttttagcaaaaggagaacttcccgaggcaatttttgcagccagtgacgatgccgcagccggggttatctatgccgctcaggaacacggcattaaagtacctgagcaactggcagttctaggctttgacaactcatcagtagccagtatgatctatcctggaatcacaacgattgatcagccgtttgaacagatgggacggttggcaattgaacatttgaccaaccagaatgtttcttcagttgagctgccgtatcaaatcaaggaacgtggctcggttgccaaatacaattcagctcagtcatagtgcagttctgacaatcaaaaaaacaggctcgcggaatctccacgggcctgtttgtcgtattgttactttcaaaccctttatcatcatttccatctttacgaacacttattcgcatattataatagaatgcaaacagaagttcgaggagggcagcaagatggacaattcagaagagccgcggggattttcttggttattgacaacaaatcattctatgccacggttgagtgcacgatgcgcgggctggatccgctcaccacgccgctcgtagttatgtcggaagccgaaaataccaatggtgggctggtactggcatcatccccaatggccaaaaaactttacggcatctccaacgtcaatcgtcagcgtgatctgccacgcgacaaccatttgatcgtagtgccgccacggatgaacacgtacatcgaaaagaacattgaggtcaacaacatctatcgcgagttcgtggccgatgaggacctgctgccatattcgattgacgagtcgattctggacatcactcactcctggaagctgttcggggatgatccaatcgaagtcgttaaaaaaatccaaaagaccgttcatgaccgcttgaagctggttaccacggtaggcgtgggcgagaatccgctgcaggccaagattgcgttggacgtctatgccaagcatgatctgcgcttcattggcgaaatcacctatgacacggtcaaagattggaatcgatttctttatggtaaaattaaataaatgaaacaattattaaagattgttcaattacgagcaaaaatagccgtttttccttgaatttgttgaaaagctatgtgattatggaaacgtattcaaatgtcatgaggaggctactatttatgaatagacaatttgatttcttaatgccaagtgttaacttctttggtcctggtgttatcgccaagatcggtgaccgtgctaagatgcttaacatgcacaagccactggtcgttacccaagagagcttggaaaagatcgaaaacggccccgttgttcaaacgattgaatcactgaagaaggctggcgtggactacgccatcttcaccggtgttgaacctaacccaaagattcgtaacatcaaggctggtaagaagatgtacgaagaagagaagtgtgactccatcatcactgttggtgggggctctgctcacgactgtggtaagggaatcggcattatcctgactaacggtgatgacatcaccaagttggccggaattgaaacgctggataacccactgccacctctgatggctgttaacaccaccgccgggactggttcagaattgacccggcacgcggttatcacgaacgaagaagaccacctgaagttcgttgttgtttcctggcgtaacattccattggtatccttcaacgacccaatgctgatgctcggcgttccacaatcagttactgctgctactggttgcgatgccttcgttcaggccatcgaaccatacgtttccgttgaccacaacccaatcacggacagtcaatgtaaggaagccattcaactgattcaagaagcattgccagaagctgttgccaatggtcaaaacgttgaggcccggaccaagatggttgaagccgaaatgctggccgggatggccttcaacaatgccaacctgggttacgttcacgccatggctcaccaacttggtggtcaatacgacgccccacacggtgtttgctgtgcattgctgctgaccacggttgaagagtacaacctgatcgcttgcccagaccggttcgctgaactggcacaaatcatgggctacgacaccactggcctgactaccatgcaagccgctcaaaagtccattgacggcatgcgcgagatgtgcaaggccgttggtattccggcttccatcaaggaaatcggtgctaagccagaagacttcccattgatggctgaaaatgcccttaaggatgggaacgccttctccaaccctcgtaagggtaccaagcaagaaatcatcgacctttaccaaaaggcttatgatggcatctactaattaatggtgtggacacatttaattagcaacgaaaaagtcacccgcaggtgaaaacctcatctgcgggtgacttttttagtattcggtagattgtaaaatttaagttgaacatattagtggatagaaaaacccataaaggtctttaatggtgtcaccacaacattccattagaaagaaggatctttatgggcaccactattttatcatttgaagaccgcgttgtcatcgaaacacttcatcatgaaaagcactcacttcaatatattgccgattatttaggctttagtaaaaccactatctttaatgaggttcatcgcttagctggtgagtatcacgcagttaaggctcaaactgaccatgaagttaaacttagtcatcgtggtcgtaaaaccatcttaacgactaacctaaagcgattgattgaagaaaaaatcaagattcaaaaatggtcaattgaacaagtggctcatgtagttagaattgcctacaaaaccatctataactggattgatcagggactactggatattaatgtgactgatttacctgaccatggtattcgtcgcaaacgatctaaagaaacccgtggtagttttagtcatggacgttccatcgaagattgtccagctgaaatttctgatcataatacttcaggtcacttcgaagctgatacagttttacctggaaaacgtaaaggtcaagcagtagctacgtttgtcgagcgtaagagtcggcttaccatcgttaaacggcttaatggacgagatagtatttcaattattttagaattggctaaccagttaggagataatctcaagacccttactgttgactatgggaaagaattcgccaactacaatttgattgaagaacagaccggtgttccgctgtactttgcgcacgcttattcgccacatgaacgaggcagtaatgaaaatcgcaaccgagtactacgccgcttcattcccaaaggtcaaccgattgatgagattaccgatgatgaattgattcaaattaactggtatttgaattcccgaccacttaccacttaaatgtttaaattggcgaacaccgattgagatctttttgcgtaatctgcgttactaaatttgttcaagttatttcttgcaatctgccaaattgagtttggtatccctaactttacctataaattgaagaaaaaataaaaatagtaggtaaaataaagttttgcacagttttggcttaggccgttcgaaccaaaaatatacaaaattacctactattgaggcaaaaaatctgcaaagtaggtaaatttcaaaaaattgcttatacagttacctacgattggctaaaaaattcaaaatagtaggtaaagctgcggttgacatcttatcagtggcggagtggaggttaattagagcgggaatctgtctatcattgagttgcggcgactgcagaaacggctaactgaaacatcattgctccacatcagctacggaatcaattaaccgaaatatcgttgacgcatgccggtcggggaatcgcagctaatcgaaacagttctgaatactaaaagcctaaaatatcattctcaaaaaatcccggtcacagcttttaaccgtgatcgggatgatttcgtatttatgccttttaattagcagtttcttcgcttaaacgcttttcctggtctctaatcagctgcttggtatgggcccagacatcagggtgcttggtaccattaacccaatagtcgacatcagcaaatatttcggcttgactggcttgatcatagtcatggtgcaaaaagttggcagtggtctcggcagactgtttttcccacattgcggccatgataaactggctgcgcgtccgttgcagtttttcttcagttggaccgaaatcacgagcttcgacatcgctgaccttggccgtagcaattggcggctgaaccgagttgcttggcagatatggtgctactggcacgttcatcaaggcattttgcattacttcattccaactgttgccataagtatccaagcgatgctgcagaccgggttcaacatcattagcaattagatagtcgcgcttttcaccccagctgagcgtgacatgagcaacaaaaactttttcggacataatcgttcaccttctgattgtttacatattcacaataattataacgcgaatttaaatttatgaaagtccttaaaagtaacctttgatctcaaatgtagattaaaggtttaactttatttttttaatataataaaataaaaaaataaattttaaacgctgattttcgctataaacagcggtattttaaccaatgacttacttaaatcaagtgcaggagttagcgatttatgttagattgaaagcgcttagatttaaccattgggggaattaaagatatgcgaaaaagaaactatatcttcttatttggttcggcaattttaggattaacgatgtcggcaatgccgattagtgccgatgatgcaactgcggcagcacctgttagtcaagccagttccgttcaagtggttaccaatcctgatccggccagtcagccgggacaggctactgattggtcggaccctgccaaatatcaaggatacgtaccgattcaaattttggggatcaatgactttcatggtgggctttccaataccggtaccgctcagatcggcgatcagacctatcaaaatacggggacggcagaaagactggctggctctttgaatcaagctgagagtgactttaaggtggccaatccagcggggacaacgattcgtgttgaagctggtgacgtggtcggtgcctcaccagccaactcggcacttttgcaggatgaatctaccatgcatgcactcaaggcaatgcatattgagtatggcacgctgggtaatcatgaatttgacgagggactgggcgaatttaaccggatcgttaccggtggtcagccaaccaagcagtataacgacgccgaaatggcctacccacacgaagcttccgacattaatatcattacggcaaatgtgattctcaagggcaccaagactgatgacaattatggcgagattccatatggtttccagccttacatcatcaaggaaatccatactagtgataataaaatagttaaaatcggctttatcggcattgagacgaccgatctgccaattttgacactttacgacaactataaagattatgagcttcttgatgaagccgaaaccattgctcattatgaaaagattctgcgcaatcaaggcgtcaatgcgatcgttgtcttggcacatactggggtagagaccaagaatggcgaaaccaagggcacggcggttgatattatccaaaagctctaccagatcgatcccgacaattctgtcgacatctacctggctgggcactctcatcagtatgccaatgccacggttggttcagtcaaactggtgcaggccatctacaccggcaaggcttatgatgacatcattggttatatcaatccggcgactaacgactttgcacctgacagcatcgtctcacatgtcttcccggtcctttcagaaaaagacaatccggctgccatcagcgacccgaccgttgcgggaatcgttgaggatgctatcaagcgagtggcgccagtcatcaaccaaaagattggggaggcagcaacgccagaaaccatcaccggccgcctgcataatacgccaactcgagaaaaccaggctggtgagctggtagttgatggacagttggccgaagccagaaaactgggcgttaatgctgactttgcaatgaccaatactggtggggtgcgggctgatctggtagttgaaccagaccgcacgattacttggggggctgcccaggcagttcagccatttggcaacattctgcgggtagttgagatgactggccagcaggtaattgatgccttaaaccagcagtatgacgaagatcaaaagtattatctgcagattgctggtctcaagtactactacactgacagtgacgaccctaaccagccatatcgcgtagtggccgcttatgatgaaaacgggcagccgttagacatgaacaagacttatcgcgtggttatcaacgactttttagctggcggtggtgacggctttacggcctttaagggtaccaatcagattgcagtgattggcgcggatacggaagtctttatgagctacattactgatcaaaccaatgctggtaatttgatcaaggcgccagttactgatcgcaaaaactatctgacgccggcagaagctgaagccttgctgcatcctgttgtgccggatacgccagcgaacagcgaaactggtcagactaataccgaaaataatggtaatactaatggttcagcggctgatgcaaaacagagccaggaaattacggttgacaattcggcagcgccgcaattaaagatcgttaatggtcaggaccagacagctccagttgcgatcgcggttaagtcaaccgaaccaaaagccagccagaccgcgctgccacaaaccggtaatgacgaaaaatctgccttggccttgcttgggacggcgctgatcgggttgtcaggtatgtttgtaattcgtcgtcggccacggcggcaaaaatagcctggttaagcagatatgaatttaggatcgaatagcggaaagattcaaagcggttcgtcaaccatcatcgactaaagtcacgagattttcggctagacataacgatgatgtgaatggcttgatcagtatgtcggtcctaggtttagtgaaccgattgcttttcaaactaaaaaatattagatagcgttatacagagcttttaatggttttgcataacgctatttttttgaaatactagatttttttaaaacatgcaaattcttaattttattaacttattagcttgttttatttattttattaagaaaaaattaaatggctggtcacagttgaaaaagcaaaataaatttgttgataaactgtgaatataaggatggttgacaagtccggtcaattccaatagcatgaaagttactctaatcattttataatggtcaatttaaaaatttaagtcactggctaaaggggggatgttcagtgaccagttatcagattataccagttggtgatcaggctttagccattgagtttgccaatcggatcgatccagttgtcaatcggcacttgcaacagattgggcgttatatcttaaagcagcatttatcggcagtcaaaacgattattccagcctatcggacgctgactgtaacctttgatggtggccagaccggctttgaagaactaaaagatcagcttgagccgttaattgaaaaatcgatgaacgcaccactgccgccatccaagacctggctgatcccagtctgctatggcggcaagtatggtcctgatttggaggatgttgcgcgttttgctgggctaagcacggcggatgtcattaaagagcataccgcccagtcttatctgatctactttttgggctttttacccggttttgcctacatgggcagcgtcgaccaaaagattgccatgccccgtctagaacagccacgcttggagatttcggcgggcagcgttgggattgctggtgagcagaccgggttttatccagtcgcttcaccaggtggctggcgcattattggacagacgccgctcaagctttatgacgaaaaaaatcccgctagtttttatcatgctggtgacagtgttaagttctttgccgttgacgaagaggagtttcaaaagatccagctggctgatcggcttggcaagtatcaagtaaaggcggtgacatcagatgccgatgattaatgtaattgaaccaggactgcagaccactgtacaggatctgggacggccaatgcatcagattaatggttttccggcttctggggcaatggatcagaccgctttgcaggttgctaatttgttggtaggcaactcgccgtatgccgctgctttagagttttcactgactgggccgacattgcgttttatggcgacgacgttcattgccttaaccggagctgaatttaatgctcagcttaatggtcagccagtcaaaggatatcgctgcctgcaagtgcatactggcgatatattgaaaatcggacccgcaatcagaggacggattggctatctggcagtggcgggcggtctgcatttgccattagtacttgacagtcgttcaaccacgctgcgtttaaaactgggcggtatggatggacgagcgttagtcagtggcgatcgcttgccaatcgaagctaagcctactttagtcagttattatcatcgacacgcaccaatgccggaattgcctgatttgaaaacaccagttaagattcgcgtcttaaaaggaccacagtgggaaaagtttgatgaaaaagatcatgagcgatttttgtctggaacgtatacggtgacgaatcaatctgatcgaatgggttaccggttaaaaggcgatgccatgcagaccaaacaggaaagcatgttatcggcagccacggtaatgggtggtttacaggtgccagccaatggtgaaccaattgttttaatggctgatcgacaaacgactggtggctatccactattggcagtcgtggcgacagcggacttgtctaaactggtgcagtgccgtccaaaacagcagattaaattcgaactgatcgagctgaatgcagcccaggaactgttaaaacagcagcagcaaaatttaaaagagctgcgtcatcgcatcaaaatggcacgctatcaaatgccatatggaattacgcgagaggccagccagcgcattcaacgactttttaaggagtgatagatttggataccaaaaatattgaagaattgatcaatctgctcaaggaaaacgatctaactgaactggaatatgaaaaagatgacgagcatatccgcattaaacgtgccaatagcgaatcgtatgcgcagccggtcagtgtcagtccacagcatagcaatcccagccatcacatcatggccccgaaagaagtcgtcactagcagcaatacgatcaacgcgccaacgatcggtgtgttttatacggctaaatcaccacaggatcctccatacgtcaagccaggcgaccatatcaagcaaggcgatgtcgttggggtgattgaagccatgaaggtctttaccaatgtggttgctgatcgtgacggcatcgttgaaaaggttttggtaaataatgaagagggggttgaatatgaccagccgcttattcaaattaaataattccgttagtaaatggccctttcataaggtgctggtagccaatcgcggtgaaattgcggttcggatcgttcgtacctgccgagtattgggactggcgacggtggccgtttattccgaaaccgatgccaaatcgctggccgttcagcttgcagatcaggcagtctgcattggtcccgacaacgttaatgccagttacctcaacattgcagccatcatctcagcggcccagctgactggtgctgatgccattcatcctggttatggctttttgtcagaaagtcctgaatttgcggatgcctgtctggaaaacgggattaaattgattggcccaagtggtgatgtaatgcgactgctaggcgataaggaacaggcgcgtatgacggtggctaaagctggtctgccggtcgtcaaaggtagcagtacaacgattgacaatttggctgatgctttggaccaagctcaagagatcggttacccaattatggttaaagctagtgcgggtggcggcggaaaaggcatgcggatcgtcaattcgcctaaagaaatggcggctaagtttacggttgcccaagatgaagccaaagccgcgtttggcagcggtcagatgtatctggaacagtatctggccaatccgcggcatattgaggttcagatcgctgctgatcgatatggtaatgcaattgcattgggcgagcgggactgtacgattcaagcacgccatcaaaaagttatggaagaagcaccggctgtggtagtgcccgcgcgaattcgtgatgagatgctgcggcgctcagcagatgcggttgcccaattgaattacgagggcgtcgggacgatcgagtttttgtataaccatgatggctcttattactttatggagatgaatacccggatccaagtcgagcatccgattaccgaaatgattaccaatgtggatttggttgagctgcagctgcgactggcggctggtgcggaattagagccgcagttggttgtcacgcacggttttgctttagaatgtcgcatcaatgccatgacccctggtaagattactggtttgcatttgccaggcggccagggcgtccgtgtggatacggcgatctatcaaggctatgtcgtacccaacagctatgatggaatgatcgctaaaattattgtttatggtgatcgacgtcagcgggttctccaacaaatgcaggccatcattgatgaaaccgtgattactggaattcagaccaatcttggattattggctcagattttaaaagagccatcattccaacgcttaacagctacggtcaactggttggatgacttgcagaagcagaaacattagctaaggtatttaagaaaggggctgcaaaatgaaagttgatttgaacagtgatctgggtgaaagctttggtcattatgtcctgggaaatgatgaacagattctgccgctgattactgcggccaacgttgcctgtgggtttcatgctggtgatcccaacgttatggctcaaacggtagcaattgctgaaaaaaatggcgtggctatcggtgcccatcccagttatccagaccggattggctttggtcgtcggcacatggacatgcagctggaaaacgtggagaacatgattacctatcaagttgcggcactgcagggatttgtcaagggacaccgtctgcatcatgtgaaaccgcatggcgcgctttacaatgccgcggctaagagtctgccattggcactggcaatttgtcgcgggattaagcgcgttgatcctgaattgccaatttatgggctggctggcagtcaattgattacggcagctcgtgaaattggtttgccttatgccagcgaggtgtttgctgatcgggcttatcaggctgatgggacgctggtgcctcgggtcaagccgcatgcagtgctgcatgatccgcaagaagttgccaaacgtgcggtccatatgattcaagatcaggccgttactgcaattacaggtgagcacgttgagctgcaagtcgatacgatttgcgttcatggtgacaatgaagaagcgttggcaatcgtacgggcgctgcgctcagcacttaaagatgcagcaattgaaatcgcaccttttgatccccaccatgcttgattttgtaactaacgacagattacataagggaggaagatgtctatgcaaaagcacaataagaatggcgcctctgagctgccggtttctcatgacaacaaactgcgagcggctgcgatcggtggggcgttcttaatggccatgtcagcagtcggtcctggctttttgacccagacggctacctttactggacaattaggcgctgattttggttttgctattttaatttgtattctggttgatattgtcgtacagctgaatatttggcggattatcgtcgttgccggcaaacgggcccaggttgttgccaatgacgtttttcctggtctgggctatctgctgagtgcgttggtggcaattggcggcttgttcttcaatattggcaacgtcggcggggctggcttagggcttaatgttttgtttggcatctcgccgcaagccggggcggtgttgatcggcattttttcaattattgtcttggtaattaaagatgctcttaaagccgttgatcggacggttcaggtactggcggccatcattgttctggttttgatctacattctgtgcgttatgaaggtgccttaccaaaccgcggtcgttcatacgtttaggccaacccatattgacttttactcgattttgacgatcgttggcggaaccgttgggggctatatctcgtttgccggtggtcatcgtctgttggcgggcggtgccagtggtcaaaaagacatcaagtacgttaatgaaggtgccttgacggggatcgggctggcatcaatcgtgcgggtaatgctcttcttagctggtctggcagtggttacggctggctacaagctcgatccggctaatcctgcggcctcaatctttaagtatgcagccggtaattttggctacaagttctttgggctggtgttgatcgcggccggactgtcttccgttttaggctcaacgtttacctcggtctcatttctggactatgccgtcagcaagaagggcaatgccaagtttgatcagttccgcagctggattacgatcggatttatcgtttttgccacggcaatcttctatttcatcggtcagccagccaaggtcctggttgtggttggcgcgctgaacggctttatcctgccaatcgccttgggtattctgctggttgccgcgcacaagtccaagatcatggggagcgattatcatcatccggcttggctgacttggacgggctggatcgtggttgccttcatggcctactccagcattgccgcggttatgaaactgctttaagataatttatgactgatgtgcttaaccgtgcatcagtctttttatgtcaaaaaagtacaacgttatacatcttttaagcacgggcttggaaacgattgctaaaacgttacgaaacatgttatgatggtatggtaagatatcagatggtttattttcaaggaggggataacaatgaagaaaactcgcatgatgatgtttagtctggtactgtttggtctgctgctggtggcggtacccgcgaaggcagccagcatcgatgctacggaaagcactgcttcagcgttatcctctttagccagtctgccagtcgcgacggccttagatgatggctgggccgttttaggagcgttggtggttgctttgccaggtgcattctattttggcaagaaaaccgacgagaagaatcgtcaaaatgccaaatcaggccaatcaaaccagctgctgcttaactatcgcggtcaacaaggcacggttgagcaaatgagcggcaagcagggactctttggtcatattgttggcgttcgtcacctggtattatatgaaggtcgcgattttgaagagctggaaaatgattttcacgaagcggtcgatgaatacctggctaaatattaaaaaaaccgagcacggtcgcaaaaagcggcggtgctcttttattacgttgattattagagtataatgagaaaatgttatcaatttatagggagtggcattttggcaaagcgagaatcaatctataccaaagacgtgattttagtcatgattgcgtctttttgctttatgttcagcaacatgtactgtaatccgctgattaatggctatgcgcaaaagctgggagccagcagcacgtttgccggcgtgatcgcggggatgatgagtctggtggcaatgtttctcagaccaattgctggtaatctgacggatcggatttcaaagtatcggctggcttcttggggcggcctgctgagttttattggtgtgactggctatatttttgtacccaacagtggtctgctgatgttgtttcgcttgatcaacgggacggggtacgttttatgtaccgtctgcatgacgacttggctggccagcttggtgccattgtcgcatgttggggaggcgatgggactgtatggaatcatgaatgcactggcaatggcgtttgcaccggcagtctccattaatctgtatcatgtaatcggctaccggcctgccattatcgtctcggccgcggcggcgcttttggttgcggtaatcgttcagtttgtgagtgatcgttccgtatctgtttgcgattccttactttgccacgcag

SEQ ID NO: 1871 - DNA, 23485 bp, Unknown
  gut microbiota DNA sequence
acttaacggttgccgtgggcgcgtactttatgatctatgcggctgttttgctggtaatccggctttgtctgcgcactaaattcgacacggttcgtttcggtaaatggctgatcgtcagtttgttggccaatgttttttatttgatcatgctgtcaattatgaaaaccaattgggaaatggctttggcggccgctggcatggcaatgggatatggcatcatctactcagtctgccaatcaacggccctgatgctggcgccacaaggagaacagggactggccagttcaacgtttttcctgggcgttgacattgggatgacgctgggaccggttttagggggcttgattgaccagtatctgccgcttaaagctttttatccggtcatgctgatcatcgtgccaatcattttcttgatctatttgggagatcgcaaagagttaaacggcgcggtcgcaaaacattaaaaaaacgctgggttgtcagatgcaatccagcgttttacatatctgttgcttaattatcagccaggtcagcccaggtctggtgagtataagccatttgccaaaagcccagctcatagctgctgctgcgcaaaaaggccgtcatcatctgttgtttgacggtttcactactgttggcggccagttcatttaccaagccgatcagctgttgagtactggtatcaaagccgactgtctgatagctgtcaaaaaatgcttggtagacgggaacgggactggtctgatctttccagtagtcggcaatctcatcataaagccagtagcagggtaaaagagcggtcacggcagcagcgggatcaacgctcagctgatgctccatatgggtaatgtaagcgtagttgttaggagcgatgggagcttgctgaatctctgctggactgagcttgagctgttgcagcattggactgcgctgaacgtcttctccggaaccgttagccagctttaagagcagcgcgccctgtgattgaggaagcagggcggcagttttttcgtgcagcttttcaaacgcggttaggtatttggtatcctgcgtcagataatagcgaaaggttgccaatggcagtttaccgctggccagttcagtgataaatggatggtgaatgcttttttgccagagtggtgcagctgcttgatgcagtttttcagaaaatttagtggtttttgagtcgttcataaaaatttcacctggttgatttagtataaagaattgatatgctgaacggttttttgaatgtcagcgctttgcagaatcattgagatcattgaaaggccagcgactccggcagcaagcgtctgggtcatgttggcttcggtaatgccgccaatggccacgattggatgggtgcttatcgtgaccaacccatgcagtttttcaagtcccatagctggatcagcatcatttttggagctggttggaaaaatcggtccgctgccaacataggctaccggcagctgattagcgtgcttgatctgtgctggctgattgcatgaatagccgacaaacatagtgttgccaaccgcggctaagacctgttcgacacgctgatccttttgaccaacgtggatgccgtcagcgttgattgcctgggccaattcaacgtcatcatcaacgatcagcggaatatggtgctgatcggccagcctgcgcagtttcaatcccagctgcacgcgctgttcttggttgagttggctggtgcctttttcgcgatactgaaaggcggtaatgccgctgtccattgcgattgatacgtcatttagaaaccgttttggatcatgattgacgtcttgggtgccgccaaccagatagcagtgaagcatttcttctctaaattgcatactgccctcctagactgcccagtgattcaaaggaccatgcccgtgaccaacctggatgccgtcgcgaatcgtggcttccacgtaggccttgccgatgcgaatcgcgttttccattgatacgcccttagccagctcggcggtaatgcaggcagagatcgtatcaccagtcccatgcgtgcgtttggtgtcgatccgaggcgagctcatccaaaagctggatccatcagccagcaatacaaagtcactggcctgtttttgatcattaaaatgaccgcccttaaccaagacattcttggcgcctaaagcctgcagccgctgcccagcttttttcatatcggcgttgtttttgatcgtcatttcagccagtgcctctgcttccggcaggttgggcgttactagatcggcgaggggaagcagcttggtcctgaccgtgctgatcgcctcatcggtcaacagatgcgcgccgcctttggcaatcatgactggatccactaccagtggtccaaaatcggattgtctaagattggcgacgacggtttcaacggtttcagtatcagccagcatgccggttttgcaggcacgaatttttaaatcggcttttaatgaagcgaactgttcatcaatgatttttttaggcagcgacatggcgtcttgaacgcccagcgtgttttgtgccgtaatggcgactaaaacagtcgtggcaaaaacatgccgcatctgcatggtttttagatctgcctgcatgcctgcgccgccacctgaatcagagccagcaatcgaaagggcttgtggaaattcattaatcatctttagtcttctttctgtaattcggtttgccaggttgcaatcaattgatcatcggcttggtaaagattgtccaaaaacatgtcataccagcggcttggcatctgggtcttgttagcagcggcctggccggctaaggcaaagacctcgcaagccgtggcggccgcttccaaaacactgccgcccagaccgataaaggccgcgataatactggaaagcatgtcgccagttcccacatgaacggcaaacagcggcgagccaaacggaaccttgatgactttttgaccatcagtaatgatatctacggctccagtcatcgcaacgacggtttgatgtttttgagcacatttctgcgcaatggcggtcagatcaccatccccagatcccgcgtcgatgccatggctttgccagtcaatcccagctaacgcagcaatctcgccggcatttccgcggatgcaggcaaagtgatacttgctcaaaagctcgttggcgacttgagtacgataggcgctgccggcacaggcaaccgggtcaaaaacggctgggacctctaaaaactgcgcggcatccataaccgccagcatctcttttctttgtgcggcttcaacggttcccagattaatcgtgacggcctgggcaatcttaaccatgtcttcggcttcttcgggtgccttggacatgattggcgaagcgcctaaaacgtttaagccattggcaacgtcagcgggcgtaaccatattggcaaccgttaagacgaccggattttgtttgcgcagctgtgcaatcagactcatatgaattcctcctttgattggctgaaataaaaaatccgcgaactagttaaaacgctcgcggatctggttgattccaattcaaaaaagaagcactttccttcgcaagcatcgacttaacaggttcaaagagtttacgcgtcactgcgcgcgtctcagtccagaacatggactcccctagtgcggaaaaatattcaacttagtttttagtatagcagaaaattcaaatttaaaaagacttaattcattcaattaagctgggatgctcaatttcaatcaataaagtcgtttgctatgcaattctgtttttgaaaacttatcaagtagtcaattcagtgatagattaattataattatattaaaaaggggggatggatatgccaaatcatcaagcaggtaaaatcagctttgcctcggtgtttttgtttggcatcaacagcatggtcgggtccggcatctttttattgcctggcgtgctgtttcaagatgccggcaactggagcctggccttgattctgctggcggcattggcagtcttggcaatggcctattgttatgccgagatggcgcatcacttttcggggaatggcgcgggctggtattacacctacaaagagtttggacgattttggggctttgagatcgggctgtttacctggctgcagggcgccgcggcgattgctaccgagatcgcggcttttttacgcgggctgcgaccatggctgccaagattaagtgagattacggtctatcgctgggccggattgggaatgattctgattttactgacgatccggttactgggcaaaaaggcgtcaacctgggccaataacttttcaacggtcttgaagctggcagttttgggattgtttgtcgtgctggggattttttacgtcaagccgggcaactttaatgcttcggtccataattcgcttagtgactttgatcatgcatttatgctgatcttctttatgtttccaggattttcgtttctgccggtacaggcatcgtccattcacaattccaaaaagaacctgccaaagcttttgattggcgtggtcattagcgttgcagtcatctatgtgattaccatgggcgtggcgatcgggatgcttggcaatcgaatcgacaacgtggacgcaccgctggcttgggcgtttggtcagcagtttggcaagctgggcgaggccgtgattatgatcggcatgttaggatcgattgccggcgtggcgatctcaatgttttacagtacgccatacgtggtctcgtcgctggcaaatgaaaaggcgctgctgcccaggtttatcggcatcaaatcacaaaatggcgttccatacgttgccacgcttttaacggccggcatcgttttgattttggtaatgacaggagattatctggcgctgattccttgcagcatcatgattgccgtcgttcagtacgcattcgtggcgatggcaaccatcaagcttgaattcgcggatttaaagcggcggcatgcacaaggcaagattgaccatattgatatttatgaaatggtgctggccgtgatagcgttgctttgttgtttgtttttggcccgttttgtaactcccttggcaatcgagatcacggctggcattgcattgatcggagtggtcagctatctgggacagctgattaagcggccgccagctggaaattaaccaaagacagcgctttccatccgcgttataatcggattagatgatttagaagcggagggatttttaatgacggaaatcaattcatacgtggatttaaaatggctgccggtcgttgaaaagtttcgccatgaagccaaaataaatgacgacgcgcgtgatgccgggctgaatccgtacccagaaaacgttgatcgctttgacaacattcgctatggtgatcatggtgatgacaacctgctcgatttgtatcggccgcatcgccatcaaggaaaactgccggtgatcgtacacgtgcatggcggcggttttgtctatggtaccaaagaaacctatcaattctatggactggcaatggcgcggatgggttttgcctttatcaactttaactatcgaaaggcgccagaagttgaatacccaagcgagctgcgggaaaccaaccaagtctttcactggctggtgcagcacgccgccaagtatgatctggatatgaacaacgtcttcattgctggcgacagtgccggtgcgcagatggcagaacaatatctggtcatgtataccaatccagaatacgcgcagctgatggaaatgcagatgccggatttaaaattgaaagctggtctgctcaactgcggctgctactttttggaacgacagctggctcagccaagcgttctggatgcctattttacaggacatgctcgttcgctgcatccacatgatctgaaagtagaagactatattaccaaggactttttgccggtctttgttatgactgccaaccaagactttttgcatgatacggccgtccgctttgatcagtatctgcttgatcgaaaaattccgcatgagtttagaagctatggcgattctcaacatccacgcggtcatgttttccatgtcaatcaaaaggatcctgaaatcgcggcccgctgcaatgctgatgagatcgattttttgcgacgttttattgattagtgtcaaatgtttgcttaaaaatcggcgaagaaatgcctaatgttgaaatgaaatcttcggctcaaagtttgggtcggagattttttgatgtttgctgcgggtggctaattaacctataatgaaaaatagtctatcaatgggggaatgagaatggatcatcagccagacatgcgagactggtcgtttgccaagcgggcgttagctgagattcagcaggccaagcgcaaaaagtggtacagcttttgggtgcaagttgagctgccagacggcaaaaaacactggtatcaattgcccagagacgttcagtatgcaatgcggcagcacgaaaaaaagcatcgtcaagactggtttttgatcattaaaggggctttgatcaacgtaccggtttcatcatatgatgaacagggcgatgttgagctaaagaccggcgtgattcgtcgagccgagcgtcgtcatcagcatacgtctgatccagcgcagatctcacgcagtcaatttgtccagccgcgctacagctggtgggggatcagcaatcaaaaagaaatgatcgtctacctgcagcatgaccataatcaaggtaatcgtgaacaaatcaaacgcgatgtcaaaatcatcaatcgaaactggcaaagagcacgctggcaggagccttgccgcttgatgctcaagtacagtttggcggtcagctgcctggtgatgctgtgcagctggtcgatcatgcgcgggctgcttttggttggtggactgattgggctgatcttttcgctttggctagactggtatctcagaccagccgcttagcagattgccaaaaagcagcggatggcttgttatcacgttcgctaaaatcgtttagaatagcaaatgacgctggatcaagacttgacccagcgtcattttttaattgaaccgcgattttgaggctttcaggctatttgtagttattcagcgcgttttgcagctcggttttaatctggtcaaccagagcagtcggttccaggatcttgacttgtgagccagcactgagcaaccagatcaaagcaccttgaatattggccacgtgggcttcaatgacgacgttttcctcatcggcagccagctgattaaagtcgaatgattcctgttttctggcgtcatagatcggcgcagtaaggtcattttcatgatagaccttagccgcatagggaaatttgtcgagtgatggctcgatgatgcggcgcgcacagcggaacacgattttttcaactgttccgttgatgctgccaaacatgttggccagactgttgatgttggcgctgcggctggtttcaatagcatcgggatcacagtcgatcggcaggctggttaaactggcctgttgaatgcggtcgattcggtagttgcgaatgttgttagctttttccggcacgttgtataaaattgcgcgcagataaaagtaatgatcgttaaagtcgatgcttaatggatccaattcgcgctgagcaacttgaccatgcgcgtcttggtagacgatttttaagacgtgctgatccgacaaggcatgacagatcgtctcaaaaatattgacgtcaaccagcgattgaacgggttggtactcatcgcggctaggttttaaaagcaccttgaaaagctcatctttattgacgaccttaaatggggccatcaatcccttgataaccgcggaaaggtcggctttgctgaaggcacggctggcaatgatgatcttggcgataatcaaggtgcggcggaaatcgattgtcttgggtgccgtgtttaaccgaaaaatccgatcatgatcattgaacgactggacggtgatttccattggggccagccattgcttgattttattgaagttcttgttgatagcatctgatttgacgttggcagcggcttcgatctcgctgctggttaccatcccttccgtcagcagtttgatcagcataaagcgtgcggcttttcctttcgtatcagccattgaaaactcccccttaatgtaagcaaaaatattatagcaaatgaggagctgccgggttaatcacctgatgaccaaacgaattgattgatgagagctgaattaatgaattgctaatacttttcaaagatgctattttgccaggcgatcattatttggtgcaggctgtagctgcatttcaaaatgctgactgttgatcagttccacactcgtcaatagtaattatccgcgtttgacattaacttattttaataaattaaactaattaatcttaatttaaattaaaaaatatattgacattctaatttaattatcataaactaacaccattaaatcttgaccaggcttaaaacagaaaggagccgtttaaaatggaatttcaattaaaagttcaatttaatcaacaaacggctctcaaaaaacaagccctgctgatgctgtcaatcaaggacccgattattattcagtgctgactgaaaataatttggcccttctttagcttggctgggggcctcaaatgaagctctcattcaaagcgaatgggagcttttattttgccggtcataggtttgctaaacgattcgacataagatacatgaaagagggaatctaccatgatgttttcacaatgtggaccacaacgttttatttctaccaatgatgcctatgattacctgccaacctattttgaggaaggcggcatcaagaaggtgctgttcctgcatggtgaaaagtcatgggccgcggctaagccttacatgccagagatgccagccagcgtagcaatcattgacgtgcccttcaatggcgagtgctcctatgaagaaattgcgcgcgtcaaggagatcgcaacggaaaaccaggttgatatggtaatcggtctgggcggcggcaagtgtctggatacggtcaaaagtgttacgcagggaaccaactttaagctgggcctgattccaaccttggccagcaactgcgcgccatggtcggctttaagcgtccactaccatgaaaacggcgagcatatcaatcacgagatctatcatgaaacggccgacattatgctgcttaatcctcaggtgatcgtcaactcgccaatcaactattttgttgcgggaattggcgatacgctggccaagtactacgaatccgagatgatttttgaaaacatgcagccagaacagttcaacacgcagctgacgatctcgcgggcaatggctcaggcctgccgcgacgatctgctggaaaactcagaacaggcaattgctgacatgaagaagggcgaggtgacgccggtctttcgtaaggtggttgagacggtgatcgtaacttccggcctggttggcggctggggcgactactttgcacgggcaaccggtgctcattcagttcatgatgctttgaccgtctttccagaaaccagtgattcgctgcatggcgaacgggttgcttatgggattctggtacttttggctcttgaaaagcgtgaggatgaaatggctgagcttttgccgctttaccgcagcatgggtctgccagtatgccttgcagatctgaatcttgatggctcagaccaggacgtggtggcgcagattgctcacgacacttccgcagacggcacgcagattcatttcctgccaatcgatacgggcgaacaggctgttgcacgggcgattacccgcgttgaagaaattacggctagtgaaacggttgcttaaaataaaggatcggctggcggtataatcgtggctgaaaaataaataaacgaaacgatgcggcttgatggcggattttccgtagtcaggccgtttttttatctgaatcttgaaattagaaaaagcccatcgaataaccagctgaatttttggattcgcctggattttcggtgggcatcttggcaatgaaccgattatggatttttagagcttatttaagatagtcgcgggcaatctgcttgtagatgtcaatcatgctgagatactgatccaagtcgatatactcgtcgatcttatgggccgtggtgttgccgggaccaaataccaaaacgtccatgtcgcggttggctttggtcatttccgaggcatccgtgccaaaagcaatgccgcggacgttaaagctgtggcccaaatgatcggcggcagccttttgcgcaatggcgacgatttcggcattacgctccgtcgtgacggcgatcttgctgccgagaatctcgatggaaagctgcgcgtgatcctgatcgttgagattggcgatgatgcggtttaaatgagcgatgatttcgtcattgttcgtttcggggatggttctaagcttgacgaaaagttccgcatgatcaggcacggcattcagctgctcaccgccatcaatcttggtaactaccggcacggcgcgtcctaagacgggattttcgtatttagcgaccagttcgtcaaaatatcgttcctgttcctgataaaaatgaatcaagggcgtaatggcgttaaagcccagatccggccgtgagctgtgcgcggctttgccaatcgagtcgatgcggtaggtgattgatcctttatgcgcgtaggcaatgtcggcattagtcggttcggcaaagattgcggcggtcagatcgtcaacatagccgtcttttgcaaaccgctgcgccccttgcatgtgattgatcttggagctttcttcggctacggtacccagtagttccagcttaccgtttaaacccgcgccttcatcttttaattcggccattgcaatcaccatcgccgccagaccgcctttcatatcagccgtcccgcgtccatacatgcgattgttttcaatatgagcactgaatggcggaaactgccatttggcgggatcctcagtctttaccacgtcttgatgaccgcaaaacgccaagaccttgtcattgtttccatcgcccagttcagcatagaaattgctgcggcctttcatgactggcaatagccggcagttgacgtcatgttcctgcatgaatgactgcagaacaacggctaagcgatcctcaaaaccgccagccgtgtcgatttcaatcagctgttttaaaaagtcgatacgtgcctggttatccatggaaaagactcctttaaatcatttttaaacaccatcttagcgcgctgaacatcagctgtctaaaaaatttttttaaaaagcaaaaggcaacagcgcccacgtgtttcggtttatcgatttcctaaatttgactggaagcgttgacaaaacatgaaagcgcatttattatactaggtgtatcgataacctaaagcgttttcaataattattgaagataagggagagttgaagatgaactatctaattggtgtggacgtcggcacgaccagcacaaaagcggtcctgttcgatgagaaagctcaggtactggattcttataaagaactgtatcagctttatcgtgacggcaatgggatggcggagcagaatccggatgacctgaccgtggccgtcgaaaaagtgattcatgacgcggctgatcgggccaagtcattaggtggtcaagtattggcagtctcgttttccaatgccaaccaaagcgtgatcttactggataagaatcatcagcggctgacgcgggcgatgacctgggctgatacgcgggcgcgcgaggttgcggctaagctgaaggccaccccggatggagccgacatctacgcgcaaaccgggacgccgattcatccaatgtcgcctttgaccaaactgatgtggctaaagcagacgcagcctgaaaaaatggcagctgccgcatatgttgctgatatcaagtcgtatttgttctggaaactgttcggcaagtttagagtcgacatctcaacggccagctgcactggatttttcaatatgcacacgcaggattgggatgatgagattctgaagctgacgggcattacgcgctcacagctgccagagatcgttgacgggacgacccgggaaactggattgacaccggcagccaagcaggcaacggggcttgatgatgagacgccgtttgtctatggtgcgtttgacggcgcgctttccaatcttggcgtcggggccacgcggcaggacacggttgccattacgattgggacttcagcggcggtgcgcgtggctactgatcatccagtagtcgatcccgaacagcgcctgttctgctactcaattgatcggcatcgctgggtagtcggcggtcctttgaacaatggcggtgatgtttttcaatgggcggccaatcatttggtcgacagttcggctgccaagagtgaggacaaatcggtttatgacgttgccaatcaagtaatcgccagcgttccggccggtgcccatggcttgttgttccatccgtttctgggtggtgagcgggcgccgctttgggatgccaacgcgcgcggcagcttctttggcctgaatccgctgcatacccgtgccgacatgttgcgggcggtaatggaaggcatctgcatgaacattgccacggtctatgatgcggtatgcgatctggttggtaagcctgccagcgtaacggcaacgggtggctttgcccgttctgaggtctggaagcagatgctggcggatgttttggacgtcgcggtcaacattccagagtcctatgaatcgggatgtctgggcgcggttacgatggcgatgaagagtctgggaatgattgatgatctggacgcggtacaagacttgattggcagcgttggtgcttatcagccggagcaggccacggtgcgggtttatcaaaagtacctgccattgttcaaacaggttgaaggattgctcaagccggcctattcaacgattgctcggctccagcaggaaaattaaaattgagggggaaacattatgccactgctcattgttttattaggggttttgattctgatcttcttgatcgttaaattgaagctcaacacattcgtttcactggtcgttacttcatttatcattgcgctttgtctgcagattccggttgccaagataccaaccgcgattgaaactgggattggcggtcagctgggccacttagcaattattttcggatttgggtccatgctgggtcaactggtttctgatgctggtggcggctaccggattgccacgactttgatcaataagtttggacggcgctggattcaggttgccgtaattctggcatcgtttatcattggtctggcactgttctttgaagttggtctggttgtcgttttgccaatcatctttatcattgctcgtgagctggacatgccgctgatgtacctggggattccgatggcagctactttgaacgtctgccacgccttcttgccgccacacccggcaccaacggctattaccgacattcttggtgctactttgggtcacgtgctgcttttggggatcatcgtcgcgattccaacgatcattatctccggtccggttttcaactatttcctgcacaaggtttatccttccgtttaccgcaaagacgttgatatctcggtccttggcgaatacaaggaattcaagctggaagaaacgcctggctttggcatctccgttttgacggccatgatgccggttatcctgattgccgttgctacgatctgctcatttgtactctctaagaccaacccagtcaaccagttcattcaattcgtcggtgctccggatgcggccatgctgctgtcgctgctgtttgcgatctggacgatggggctggcccgcagtgaaaagatgagcgagatctccaagtcaatgacgacttccgttaagcagattgccatgatgctgctgattatcggtggtggtggtgcctttaaggaagttctggtagaaggcggcatctccaaatacgtttccacgctgttctccggtaccagcatctcaccaatcctggctgcctggctgattacggcattgctgcgggtttcgcttggctcctcgactgtttcttcaatgacggcagctggtctgatcgcaccaatggccgcccacatgtcgccaacgatgagtgctttgatggtgctttcaattggtgccggttcggtattctgcgatcacgttaacgatgctggtttctggatgatcaaggaatacttcggcctgtcacttaaagaaaccctgctttcctggtcgacgctgacttcagtattgtcactggctggtctggcaagcgtctgggtcctgtcgttgatcattgcctaactgattttcttagctaaagattcactcttaaaatacctataaaagtgcgtggatccagttgtggttacgcacttttttaattagtgccgggttatgataaaataaatcttactaagcaaacaggctaaaggaagaggattatgtcacagcatgtaacaatcagcgacgttgccaaagcggcgggggtttcggtaacgaccgtctcgcgctatctcaacggccattatcaaaaaatgagcgcgcagaccaaagagcgcattgacgccacgatcaatcaactgcattacgtgccggctgcttcggctagacgactgcgccagacgcagagccatttagtgggggtattggtcggggatattgccaaccatttctcatcactgctcagcaagggaatctatgatatcttgcagccagcaggttatgatgtattgttgatgaacaccaacaactcgcaagaaatggagaaaaaggccttagatgatctatatcagcagcgcgttgacggcattatcgtgcagccaaactcgcgcagctttgaacagtatcaatcaattctgcgcaatcagacgccgctggttttggttgaccgggaagtcgacgatcagccgctgacggtgggcaaggtaaccagcgccaactttgacgccagctaccggttgggacggcagttgggcaaaaaaggctatgccaatgtaattacggtcagctcacgatttgccgaggcttctgggcagcatccccggatcaagggctttcagctggcggccagtgagacggggcttacctatcataatattgaaattaaaggtcatgatgatgactggctggcaagagaattgacacgtgtaacgggacagcttaatggacgaacggtcgtcatctcattgatgggcccgatcctgtttacgctgcttaagatctttaagcatgaaaaagtaaagtttcctaaagatctggggctgatcagctttgatgactggagctggtcacagtacgttggtgaagacggcatctttttgctgcggcaggacatggagctgatgggtaatctggcggcgcaaaagctgctgactcaaatcgaaaaccactcaacgatcagtgatacgtcgattctgccggttactgttgatatgcattcctcaatctagtcagtaaaaacggttgatccgcaaattagcgatcaaccgttttttaatcgttaatttaaaagaaagcgataacatttaactgtcaatccattaaaataaaaagaaaagccttttgatgggggatgacagtatggcactgattgaagttcataataataccaagatttatcaaacagggtcagaaaagctttatgccaacaaagacatcagcttttcaattgaaaaaggcgagctggtaatcattctgggcgcttctggcgcgggcaagtcaactttgctcaacatcttaggcgggatggatacgaactcaagcggcgaggttatcgttgctggccacgacattgccaaatatgatcgtcgtgagctgacgacctatcgccggctgagcgtgggatttgtctttcagttctataatctgattcccaacctgactgctaaagaaaacgttgaattggcttcagaaatcgttccccaggcgctggatgccgttgaagcgctaaaagccgtggggctggccaatcgcatcaacaactttcccgctcagctttccggtggcgagcagcagcgagtggcaattgcccgtgccgtcgctaagaacccacagctgcttttgtgtgatgagccgactggtgcgctggattatgaaacaggtaagcaggtgctgcagattctgcaggatatgagtcgcgagcatggttcaacggtcattatcgttacgcataacgcggctttggctccgattggcgatcaggtgttgcatattcacgacggtcagctggtcaagcaggaacgcaatcagcatccggctgacattcagtcaattgaatggtaggtgagaactttgagcaagcgaattttatggaaagatgcctggcaggctatttcccgctcgctgggccgatttatcgcgatctttctcttaatggccgtcagcgcgtttgccttgattggcttaaaaattacaggaccagatatgcggcagacggcaaccagcttttttgcccagcatcatcttgccgataccacgattacgtcgaactatggtctggatagccgcgaccgtcagatcattcgacagcaaaaaagcgtcaagcaggttgattttggttatctgcaggacagtacgattgatcagacgaagcaggcactgcggattttttcacaaaccaatggcgtctcaagctggcagatggtcagtggacatctaccgcggcatgataatgagattgccgtcagctacctgctaaagggcaagtatcatattggccagtggatcacactcaagcaagcaggttcgttgaagcatcgtcagtttaaaattgtcggcttcgtacgttccagcgagtatctggatcgcagcgacattggtcagacaacggtaggaaccggccaattgagcggggtggccgtcgttaaaaaatcagcctttgagaccgggactgcctatgcaatcgcacggatcacgtataaccagacggcgaaaatgaatccttattccacgcactataccaattatgttgaaaaacagcagcaattgaagaaggccttgaatcggcatggaaaaaccaagcagcaaaaacttgaacgtcagctgaaggcagctcagcagcaacttgcccaggcaacgcagcaggccgctttgcttcagcagaaaaatgcaggggcaggcaatgcggttctcattcagcaggctgctgcgcttaaaaaacagcaggccaagctcaagcagctgggttcgccaacctatacgctgagtgatcggacggaaaatcccggctatgccatttaccgttccaacgctgaacgagtcgatatcctggcaaacgtctttccggtgctgttgtttgcaatcgcggccctggtcagcctgacgacgatgacgcgttttgtggaagaagaacggatccagattggtacgctcaaggctttaggatattcaaatgccgatgtggccaaaaagtttgcgctgtttagtctgttggccagttcagctggggtggcgctgggagcttggggtggttttatggtactgccaaagatcatttttaaggcctatgctgccaactccacgctcagcggctttcagatccacttctcatgggcgctgcttttgacgacctggctgattgccattctctgtacgacgggcgccgcgctgtgggcattgcatcgtgacttgaaagccaagccggccgcattgctgctgcctaagccgcctaagggaggatcacgcatcttattggagcgttggcattggctgtggaaccggctcagcttcaactataaggtaacgatgcgcaatctctttcggtataagagtcgggcgttgatgacgatctttggcgtggcgggttgtacgggacttttggtaatgggctttggcattcgcgattcgctcagcggcatcagcaacattgaatacagtcggatcatcaagtacgatctgatcgccgtccaaaattcgaacagctctgccaaacaacggcagcagctgaaaaatgagctgaacggcaaatcagtgaaaggacataccggtatctattttgaacagctgaccaagaaggccggtgatgatgatgccacgcagtcgatctctttaatcgttccaaacaatgaaaaaaactttaagcagtatttcgcggtcaagaaccggcagactaaaaaaacgcttaagctgccgcaagatggcgtgataatctcagaaaagctagcacgattgctcaacgccaaaaagggcagctcaatcaagcttaaggacgcgagtggaaaatggcggacgatgaaggttgctggcatcatggagatgtatatcggtcactatgtactgatgagtccccaggtataccaaaagattttccatcagtcatatcagaccaatgcgcaattgattacgcttaaaaaaggcgctaagctgcagcaggagtcgcaacgtctgatggcaaccggcgccgtaaaggggatcaatcaaaacgtcaataatcagcggacgattgacaacatcatgggcagtttaaaccgcgtcatgattatcttgatcggtttagcagccttattggcactcgtggttatctacaacctgtccaacatcaatattgaggaacggatgcgcgagttgtcgacaatcaaggttttaggcttttacgatcaagaagtgacgctctacatctatcgcgaaacgatcattttgtccgtgatcggcatcctgctgggctatctggttgggattggtctgcatcgctttatcatcttgagcttaccgcctgccaacgcaatgtttgatccaacgatgacgctgatcaactttatcgtttcggcactgattccggcggtcattacggcgggagtagcaatggctatgcaccacaagatccgaagcgttgatatgcttgatgcattgagttcggttgactagatgtgattgacgaaaaccgtctctttatgggcggttttttttattggaaaatatgaacagcagcaggtttgcggctgtccgcagaaaaagttgccgggcttggaattggtttattggaaagatcgtttttaaatttgcaaatgcttttacagattaatttacagaaagcagcacggtttaaaaacataaaagttaatggtgtagaccattattgattaagatatcaagcaattcttagaatattattaaaaatcggctgatcttgcgttatgattatcagcaccaactaaagctgagggggttgataattcatgttgagtactttgatctttgccttgattccgattttcgttacgattggtctgggctatctggcagccaggcgcggcatttttaatgaccaggacagcaaaagattcgttaagctggttttgaccttcatgctgccgctgcacgtgtttggcggtctatggagcacctcgcgccggattttgattgccaacgtgccgctgatgggctggctgatgctttcgatgactggctgctacttgatgatgatcctgatctatcggtttggtcttcataattcaagacagctggccacgcttagagccatgtcgattgccaatccatcggtaccgtttattggctcggccgttttgccattattgttcagtaccagcaacagtgcgattacgatcggcatctgttccttgacggttaacatcatcatgctgccgattgcctttgatgctctgagcagtgaccgctcaccctggaaacggctggcagccacgtttaaaaagccattggtgcttgcggctgttttaggatttttattaacgttgtgcggtacccaaatgccaactcagctgaccagtacgtttgatctattgggtaaaggtgccggcggggtggcgatttttgcagccggcatcgtcttagggacgcggcacttgtcgtttaataagaccatttttggtaccgtactgttaaaaaacatcgcctttccgttggtcgtgctgctgattatgtggatcgcgggaacaccggctgttttaaggcgcctggtcgtgattgccttagcgatcccaacggcaacgatgccatcaactttggccatccgctttggtgtcaatgaaaaggagctggcatcaacgcaattctggagtacggcattttctttggttacgctgtcggcattcgtgctggcgttggcctagcatgtggttggacgctttaaaatcagcgaatagtcaagttaagtatgattaattcaaaaatttacaatagagaaacagcgctgcaataaattctttacaatgattcgttagtcttaaccatggaaacagaaaaacacctcagattgatccattgcgtcaattaagatccgtttcgtgtgattcctcgcctattttgagtcgttttgaggggtcggggcgactctttaactggattacaattggcagggcaccaatttgaaatctgctcgttttgctgcttccgaggcaagtcaagaaagttcctagaattagacaaaatagccttaagcacgcatgtttcttaaagaggcggcgtgcttttttgcgttaagcttgaatggaaactcagtatattttaattaaaatagttaacgaccggttcagataaaatagctgatcagcaaaaaggagtgatttttttgagtgcattgattgaaatgaagaataatcgtctaatggttcctgataatccggagattccttatttacaaggggatgggattgggcctgaaatctggcaggccgcgcagccagtgctggatgccgccgtcaaacgcgcctatcaaggacagcgtgagattgactggctgccgcttttagctggcgaacgagcgcatgagctggtagacgaatggctgccgcagcaaaccattatggaattaaaacggcatctggtcgcaatcaagggtcccatgacgacgccggttggtactggtcatcgctcaatcaacgttgccctgcgacaaacacttgatctgtatgcctgttggcggccgattcgctattttgctggggtgccgtcgccagtcaagcatccggagcgcgtttgcatcgatctgtttagagaaaatacggaagacatctacgctggaattgaagcaccagctgattcaaatgctgctcagtctctaaaaaagtggctgcaagaaaccaatcagctgcagcgcgtacgttttcccgacacggccgcgtttggtatcaagccgatctcaaaagaaggctcacagcggctgattcaagctgcagttgactatgcgctgaaaaatcaccgccattatctaaccctggtgcataaaggcaatattatgaaagaaactgagggcggctttaaaaaatggggatatcagctgattgagcaaaaatatgccaaacagacattgacgatgccgcgacttgagaaaataaaaaaagagcagggagaagcggtggcgcaacaggtccgccaacaagcccaggcacaaggaatgctgatcgtcaatgacatcatctgcgacaactttttccagcaggcattgttatttccagagcactttgatgttgttgccacgatgaacctcaacggcgactatctgtctgatgcattggcggcgcaagtgggcggcttgggaattgcaccgggcagcaacattaatttccagactggctgcgcgatttttgaggctacacatggtacggcaccgcagctagccggaaaaaactgcgctaatccaacctcgctgattttatcaggcgcaatgatgttggaatatctgggatgggggaaagcagccgaaatgatcagaaaagcagtcgcgcaggctattgccatgcagaaagcaacgccggatctagtgccggcagctgcagcgctttccaccagtcagtatggtgagctgctggttaagctcatcaattcttaatcaaaagcctagttggcaaaagttgcttttgatgaaacggacggtcagcaagacgccgattagtaatctgaaagccgaacatttcgggctgattaaggctgattattctttctaaaatcaaatatttttaaaaatttaaaaaataacgcaatagtttgactgattttaaattttaaaataaattcgcaaatttaaaaaataaggttgacattatcttgaacagggattattataataatcgtaaattaaaagttgataagaaacaaagcattcttaacggaaaagattcgcttagaactgcaatcctgtaagcattaagagtccatcttatcagattttaattcttcattaaaactacgcataatctttaagatcgcgtacgaaaaaacgccagtggcttaccagtcactggcatttttgttttcataatggctaaatcacggtccagttcttactcagctgtctgacgatttacaataataaaacgctgcctgccagacgtctctgacaagcagcgttttcaattaacgaccatctagtagcgaatctcgttgcgggagcggccgccattggcaattgtaatggcatcattggaggcaatctgcaccatgttgcgggccgcggtctgagtaaagaaggcgacgtggggagtaatgactacgtttggcatggctgccagctctttgtaatcggcaggaacgtttttttcggccacgttggtttgaccaaagaaagtcgtctcgtcagccagcgtatccagaccgacaccggcaatctcaccatcttttagggccttgatcaaagccgttgtgtcgattaaagcaccccgcgccatgttgatcagataggcagtctttttcatcttctttagttctttttcgccaatcatcccccgcgtgcttggcaatagtggtgtatgcagggaaataatgtcggcttccttgaagatggtttctcgatcaacgtattcggcaaatggttccagggcggggtcataggcgatgtcattgactaaaacgcgggctcctaaggctttgtagatctgtgccgtagccgtaccgatgtgaccggcaccaatcaagccaaccgtgcagttgtagatttcattgctgatgagcgtttcattccagctgaaatcgtggttttggttcatgcgggcatcaaaaatcccaatgcggcgcagcaggtacattgcctgggcgactcccatctcagcaattgcacgtggcgaatagctggcgacattggtaacgatcaaatggttggccttggcggcgtccagatccaccatgtcgacgccgaccatgcggcagctgatctgcttgatgccaaagctggcgagtttttcgtaaaccgcaggactgcccattgaagcagtctgcagaaccgtgatggcatcgaagccttttgccagatcaaccgtttcgtcattgagcggctcatcaaccatcttgagttcggtttgcgtctgttgggcccatttttcagcgtagggcttttcatatgggtgcgtaccatacattagcactttcattttaacgattccctcctgaatttatttataaaacgactaatattatcatatcacgagttgcatcgaataaataaaacgaattgccaaatgtgatgaaaacatttacagatgggattttgtttaataatctttaatattgaaaccgtatgtcgaattgataaacgatttg

SEQ ID NO: 1872 - DNA, 27077 bp, Unknown
  gut microbiota DNA sequence
aaaaacaaagcaaatcaagtctagttcagacgatcggccgaaaaatattgcggatcaacggtctgaaacggttaaagcagcttgcttaattttgttaatcgttgatcaagggctgatgcgcaataattgatgtttgtttaattttacaaatattagttttaaatgattgacattttaaggcgactaaattaatataatggcaattcaattagaaaaatattagaggaatggaggcattcattatggatttagtcgttgtaaatttcatggaagataaccaagcaggtgtcagccgactgattagcgagtttctgcatcgtcccgttacggatctgaatcaggaaatcgtcaatctaagtgggcagacgatggacgaactgacgatgagccgtggtgaagaaaacctccgtcaaatcgaacatgacgttttcggtgccaagctggcggaacgaaatgtcgttttaaccgcgcctagccatgttcttactcgctacgaaaacctgaagatgctgcaggaaacaggagcattcgtcgttgtattgaaagatcaaaaaaacgcggacaaaacgtttgaggtgatgctggaacagagctttggacatgatcgcatgattgacgcggctgagctttcaaccaaagaagccgcccgacgcgttgctgcttgttggagtactcaaaaggctgcctagccagataattcgatttcaaaaaagactgatcagcaaaatgctggtcagtcttttttggttattgttgatcgttattgatttttaaaacttcaggaaaaagcgagagcagatactcgcgcggtccaatttggtagtcaaacgttacgtggatggggaagatctcttcatgttctttaagctgcagatgcaagtgatgctgatcaagccgcaccttgatccccagctccacggcttggcgaatgagtgactgcagactggcagagcacttgcctttcaatgccgctaatggctcggtatattcagcaatgcgcttgcgatctgccaaagcggttgtgagaccgaattccaaaagatcgccttgaggactgatgtgatcgagcaattggccactcagcgtcagtgcaggattttccaagcgctgttcagccagatccaggctcttggcatatttatccggcaagttcagctgggcagcagtagcgcgcagctgtttaatcaatggggcagcaagcggctttacccaggcaaagacttcagccgggtgctgcagagcaatctgctcattgcgttgggcagccagttttagctgttccgctagtttttcaggaagcggctgcagcagagcattgatcaagaataattccaagaagtttaatgccgctgggctgacccgtgccggcgtaaacggatccaggtcgaacgaacgaaattccagccgttcggtaccgttattctgcaggtcggccagactgtcgccacgaccctttaagcgaacgggaccgtaaaattcatgcatcgagaagaactgatgctgatcaattcgctgcttgagctgagcaagctgttcttcaaatgagtcataggttatctcctcgcctttttggttggcatagccatatgagctgctgcgaagactgcgaaccggaaaacgcagatcacgcggtagattgcttggcagattgccggcaattggactggccccaaaaaagtaggtaaacagccagcgccacaacacaaaactctgtgccagcttgaagtttaaagcattcttaaagtcggccagcgtggcgaagtcttcattaaaaccgtggtcccacagtgattgcaccaacgtttgattgatgctgtagttgatatggacgccggtaaagatctcccgagccgtgccgtatttttgctgtagatagtcgtgatattcagccatccaaaagcgagtgttgaatgaaccggcaaagtctaaatcatcttttgaaaaagcaggtgcgatgcttagcggccagatgatctcatcagcctgcagatgatcggtcaccagctgctggagcattgcaagattggccagattggcatcggtacccagcgttggcgtgccggaaatctccagcatgttgtcggcaaaatcagtttttagatacggattatgccggcgtgacaaaaattcagctgggtatgggtagcggctgatgcgaccgtcttttagcaagcggtgctcctccagctctaatcccatgtagttttttgtcaacaggctgcttagctcgttttcggcgatgatttgacttaacttgctcataaaggttcccccatatcgataaatggatgttcggagatattataacgaaaaaaccaattttgtctaattatttactcattttattttaaagaagctggtcagctgccgttataatcaaaaaactaagccgtcttgccattccagatggtgacaggcagaaccacggatttaacgttttcgccgttgatacgcgcctgcagcagctgcactgccagatcagccatttcatcaataggctgctgaatcgtggtcagtcccggtaaaagcaggcgggtgacgttgcttccatcatagccgacaatcttgaggtcttccgggattcgcttgccatattcgctggccagattgatgatcgtgctggcatcggtatcgttggcggcaaaaataccgtcgacttcggggtgttcttcaaagatgcgccggaaaacccgctctttatcaatggtactgatgttgaagtccagatggtaggtaatggctggcagattgtttttggtcatcagatgctcataggcctcgcgccgtttttgcgttggcgtgtctaatccaagcgggccattggtgtggatgatgtggcgacaaccgtcatccaacaagcgctgggttgccagcagaccaccctggtagttgtctgaagaaaccaccggaatatttttaccaacaacctgatcaatggccacgactggcagattggcatgctgatagccgatcagaccacgattttgagttccgacgatcaaaccatcgacttggtgcgtcaacagctgctggagatagttttcttctttggcaggatcgttttgactgttgccgatcaaaaccttatagccattgcgataaagctgacgttccatctcggcttccagctgactgaaaaacggattatcaacggtaggaaagatcatgccgaccagatccgtccgctgcttatacagctgccgagcgatgatgttggggcgataatcaagttcctgcattgctttttggaccttggcaattgttttttcgcttaggtagccgcgatggttcaagacgcgcgagacagtggtcttggaaacgccggccgcggcagctacgtcttctaatttaggccgatgattggcttccatattaggcattcctccattattcgtaaaattgcttaatcttcatgttacacgttttcatgaataaaagccattcgggagcggatatttgctgtcgactgatgaaataattactgacaaccggttgacagtcctactggtaagcgttaacattatagctgtagagaaatgaaagcgttttaaaaagatgctcaaataaggattcagaggtgacatttatgttgttaggaagcattgaggccggtgggacaaagtttgtatgtgcagtggggaacgaagactatcgcatcatggacagtaccaagtttccaacgacgacacccgcagaaaccttgcaaaaatgcattgactactttaagcaatttaacgatctgcaggcgatttcgattgcttcgtttggcccaatcgagattcggcgcaactcgccaaagtacggctacattaccaacacgcccaaaccaggctgggctgatactgattttgtcgggacactgaaaaaagcctttaacgtaccgattgcctggacgactgacgttaacggatcggcatatggcgaatacgtcttatcaacgctgttcaaccagcggctgcgctctttagtctactttacgattggaaccggtgttggtggcggcgcggttgtggatggtcattttcttggcgatctgggacacccggaaatgggacacattcgcgtaaagcggcatccagatgatcttgattttccaggcatctgtccgtttcatggcgactgcctggaaggtctggtcagcgggccgacttttgaggcacggacgggaaagaagggtcaagacgtgccgcttgatgatcatgtctgggatattatggcctattatgttgcgcaggctgccctcgacacgaccttgatgatgcggccagggaagatcatttttggcggcggcgtagtcagtgagccgtttttggcaaaagtgcggaatgaatttgccaagctgttggacaattatgttgaagtcggggatctaacggactacatcacgatgccgctggcgaagaacaatggctcagcgacgatcggcaactttgcgctggccttaaaggcaattcttgaataaataaacaaaacgtttcgtaaagatactctagcaaactgaaatgctggagtatttttgttttttcggtaatccaataatgatattattactctttagaaaggttgaaaaggtttaaaggacggaggaaacgttgaatgaaaaagataattgttcgtgctgacgatctgggatactcatgtgccgtcaactacggaatctatgaggcaacgcatcgtggtattgttaataacatctcgctgatggtcaatctgccattcagcgagcatggctgggagctgttaaaaaacgaaccagacattgatgttgggcttcacgtcgtaatctgtgcggggaaaccgttgagcgatccaaaactggtatcgagtctggtgcaggaagatgggagctttaagcgttcgcaggtctatcacgatgcttttgaacagggaaaagatattgttgattacgaagacgcggtcagagaagtcgaggcgcaatacgaatgtttcgtggaaatgaccaagcgcgagccggactatctggcaggtcacacggtactaagccttaattttattcgagcgctgcgtgacgtggccagtgagcatcagattccatatttaagctttgacgttgagcatgaggttgagtttcaaggccagaaactgacgccatttatggaagatttcagtttggattatgatccagtggcaacgctggcgcacgtgctttcagcagctgacaagcgtccacatgtgattcctgaactgattttgcatcccggctttttggatcagtttatcctgcagcattcacatttggtttacccaagaacgctggatgttgaaatggcaaccagtggccaggcaattgaaatgattgagcgacacgatgttcaactggttcggtattccgagctggtcgactccgccaaagcatgacgtctagactagggataagcgttggcaaagcgaaaaatcgtttgatagattgggagttaaaatacgattcagctggaaatcgctgctgaatcgggcttaaatgttcaatcaaacagcaatcataccagatccatttgactgtatattagctgagcatatgatgagttgggagattcatcggctgctcagtttttttatgcttaaattttggtgatgctgtatttcaatatagtagtattaatttaccttaactaaaaacattatctaaatcgatcagcagttgctattgatagaatgccaattattaccgagcaaaacgacttgatttatcaactgggagttttgttgacaactgcgattagtaatgctggtgattggcgttaatggcttgatctgtgacatttaaagcagctatttcagcaaaattgattggttcgtcctatcgcaggcatgcgagcgtgtcttgctaccagacaattacgcctccgtgggtatgcgggtgtgtcaattgtgaagcaaagcgagtcttggtcagtttggagggcggaaattacctactctagactgattttgagccggaagtaggtaatgaatattttggttggcctaactttacctatttttgatggtttttcctcaaatcgtaggtaaaaatgtatattttgggggtgattgggccagaccaattttgtgaattacctactattgcgggatttttgttaaatagtaggtaatgttggagatccctaacttgatatacactgacttttacctactatgcatcgcttttttgtgaaaggtaggtaatgatgattttgtcatatgttaatatacaggatcttttgtataatagctgtaatttagaaatcagtcattgccagcacgttgaattatctgctgccaatagcgtatcttcagcagatgatgagctgattggcagataaaagtactgcgacaataaaagagggcacctcgccaagcagcgggatgccctctttttaagccttagtctcaataatatttctaatttagtacggctttttggctatttttgattttcctttgccaaacggtcaattaattgcagatcgtctgagaagaagcgatggtaggcgatgtagcatgagcataccgatcccagactggtagccgaaagcagcatgaaaacgaccataatctgatatttgatcgcgtataccggatccacaccggcaaagatcaagcctgacatcatccctggcagactgacgatgccataggtttttgcagagtcgatcgttggctgcatgccggttttaatgcaggctctcacaatgtcgccgcaagcttgaaaggcagtcgcgccaagggcaagtcgttcctcaaccgcttgatgcatgtcatgaaatttagttttcatctgccggtagcaaagaccaatggcaaccattgaattggaggcaatcattccggcaatcggcacgatctgcgaagggatgaacttgatggctccagaccaaaccaaaccacccatcgtaatgccggtactgatcaagattgccaaaaaggatggccaaaacagcttgggaatgccactgccacggccggccgcgttatgagccgcgttaaagatgatgatgagtaccatggccccggtaaccagaacgttattgagcgcgaaaatgtatttgaggagatagccgacaatcgttagctgaatgattgcccggacgacgctgatgatcatgtcgcggttcagtcccagcttttgacgatatgagataaaaagagcaatcagtaccagtccggcggcatagaccaggctgatgttgttgacgtggacgctattcattgatttggcctcccttaacggtaatgatcttttctgccttggccagttcatcaggatcatgggtaatggccaaaatagtgccggtttgacgataattggcaatcagctgatggacgatctgcttgttttgcgcgtccagaccggtcgttacctcatccagcagcagaatcgctggtttaaacatcagattacggatcaaagccacgcgctgtttttcgccgccggatagactggcgatgcttttggtcaggtagtccttaggcagattgacctgatctaaaagttcctgctgtcggtttcgatcaggggcctgattgcgaatctgaaatgggaaatcaagattgtcgctgaccgtttcgccaaacaagacgggctgctgaaaacaataggagacgtggcggcgatattcctggggcggcatctgaaaggcgttttgtccttgatataaaagctcaccactgctgggcgataaaaggcgcgcacagatttttagaatcgtgctcttgccagctccagaaggcccggctaatgtgatataggctcctttgggtacgcttagattgatgttttttaaaagcgtttttccctgcatggtcaagctgatttgacgcagtgttagtatgtcagccatttttttcacctcatatggattatttaagcatatttagattctatctttttcagatgagcagctcaacaaattgaacctgtaggcgctgtcaaagaattgcgatataatatctttaattatgcagataaagttttgggggaaatcatgcgaaaaactactaataaaagtacaggtgaattgccaatcaatcttaaccaaaagcccgctgagccattgcagaatctggatcaaaatcccagtgagtatgatcatgtctacgtacgggcattttcgggcgttgagtttattattttaatcagcgtgatgatcttatgcctgttctatcgatttgggctggcactggcagtgttgctgagcggtctgctgttttatcaaaaagtcggcattcgtgatcctaaaaccggtcagtcatgggtcgtggcacgcaaaaaatggcaccaatactgtcgctataataacatcgactggaaaaggtggcgtgagcaaagccgagcagaggcagttgcggcgcagatcaagaaacgacaagccaaacaatagttgataaggagttattatgttacagtcaatgaatttaatgatttatgttgatgatgttgaaaaagtagccgctttttttgagcaggcagctgggacgccacgaatcagtgaagaaacgatgattgacggttcaaagatgattacggtcccgattcttccagaagcctgtctccagttttacagtcgcgcctttattcagaaatactcaccggaagttgcgctgaactcgccttcaatcatgttttatgttgacgatctggcgtccgcgcatgccagactgctgcagatgggcgcgaccgttaatgaaatcgttttagtaggcagccagcagacgtttaattttgccgatccggagggcaattggtacgcggttgccgaaaaagacgtttaagagctggctgcctttagccttggctgaatgctgatcacgacgacggttgacagacaaataaaacgatattcagtatattcatccgtacaaatatccaatcttgagctataattaaagtacaaataaagcttaggggatggatatcatgaataagaataagctaccgctgcaaagcgatgctacgatggaatacgatcggccgtttgagcgcttgattccggttggtcagtttctcttttggatgctggccttggcgtttgcgctgttcatgcagtttgctctggctaccgttttattggtattgggtctggcttgcggaattcgcgtctcaattcgtgatcccaaaacggggcggtcatggagcgtgccacggcaaaactggcggcgctactgtgaatataaccgaatcgatcgtcacagcctaagacagcagatgaacgtggccgccattaacgaagcaattaggcagcgaaaagcgcaagccgctcgctgaatgaaagtcaaataaagaaccgcaccgactcaaccagtcagtgcggttttacttagttcggctttaatttggattggctttgggcgggatgctttgctggccgttttttaggcggcagcagccagcagatcaggttcatcaacgcaatgattgccaagacgatcagcagtccgatccaaaaatcatgagccggatgaaaagcagttaataaagtcatcatgatgatcaccttccttaaagcagctcgccatagtgacgaatataagctttcttgatgctggtggctaaaagcatgtagcagattacacagggaatcaagtaccagaagtagctgtctggcaaggcaacaaagccgattgcccggccaaccgcggtgaacggaatcaaggttgccagggcaatgccgatcgttgaaagcagaatcagttcagctgaggcccggctttgaataaaggggatcttaggagttctgatcatatgaattaccatcgtctgactccacattgactcgacaaaccagcctgcctgaaacatgccgacgtatttaagctgcatggccgccaatacggcaccggagaaatgcgccggcagatcggtataaagaatgccatgggaaacgaataatggacagaagataaaatacataaacaggtaggttgtcaaatcaaagacggagctggtcggtcccatccagatcataaagctgccaattgaagaagcatcccattcacgcggaattttgagatagtcagcatcgacgttgtcccaaggaatggcggtacagcagcagtcatagatcagattgagcagcagcagatgaatactcttcatcggtaagaatggcagcagcgcggcagcaatcaaaacagaaaaaatgttcccaaaattggaagaagccgtcatcttgatgtacttgatcatgttggcatacgtcttgcgcccttccacgatgccgcgttccagaatcatcaggtctttttgcagcaggataatgtcggccgattctttagccacgtcaacggcattatcgacggagatgccgatatcggctgctttcatggcttccgcgtcattaatgccatcacccatgtaggcaacggtatggcctttagcgcgcaaggcagcgacgatacgggccttctgatcgggagtcagtttggcaaagacctgcgtttgttcgacttgcgcggctagttcttgatctgacatcttgactatctcttcacccaaaagcaggtgggcgaccgacatcccaacttcctgacagacggtggccgtaaccttgtcgttgtcgccagtcagaatcttggtggtgacgccatgctccaataaggcttttagcgcgcgacccgttgattcttttggaggatccaaaaacgccaggtagcccattaaaaccatgtctttttcatctttggcgcttaaaacgtcaattggtgccggatcggttttctgtgccagaatcagaacccgaaagcctttgtcgtttaaacgatcaactgtggccttaacttgtttttgcagggcgtcattaagcggctggataccgattttggtttcggcatagctgcagacgctaagcatttcttcaaccgcgcccttggttaccatctgccgcttgccgtttggatccttgacgacgatgctgagtcgccgccgcttaaagtcaaatggaatttcgtcgatcttaacgtagtcgttttccagatcctgcagttcgggatgcgactcggtgtcctcggctttggcaatgatagccttatccattacgtttttataaccagtttgaaaatagctgtttaaaaaggcatgtcttaaaacacgatcatcggcttggccatcaatattccaataacagtccaagacgatcttgtcctgagtcagcgtgccggtcttatcagtacaaagaatatcagcggccccgaagtcttgaatcgaattaagatttttgacgatcgtttttttgcggctcatcgcgatggcacccttggccagacaagtggtaacgatcattggcagcatttcaggcgtcagcccaaccgccgttgagatcccaaacaagaaagcctcgagccagtcgtgcttagtcagaccattgatcaagaataccaatggcaccatgaccatcatgaagcggatcaaaacccagctgacggaattgacgcccttggtaaagttggtagtgaccttttctttggcaacggcccctgccattgagccaaacattgtgtctgagccgacttcaatgaccagtcccagcccgctgcctgagatgacgttgctgcccatcagcgcgatgttttcgtaatcagtaatctgagctttaggcgtctcgtcagccgcgcttttttcaacggggcggctttccccagtcagctcggaacgattgacgaacaagtcggtgttttccagaattctcagatcggcaggaatcatgttgccggctgaaagatgaacgatgtcgccgaccacgacgtcattgagatcaatgtctttttcctgaccattgcgcgtgacggtacaggttgtcttgatcattgccagcagcttggccgttgcgttgccgctgcggtattcctgaacaaagcgcagcaagccggaaagcatgatcatcgtaacgataatgacgaccgtggcacaggtgaagttttctggccggctgccaaacaaggaaaagtaaggaaaaatcatatcggtaaacgtggacacgattgccaaaatcaatagaattgccgtgaatggattgacaaaagcgctgatcagacgcttgccaattgacggctggtgctgctgctgcacgtggttggctccaaactgcttgcggctttgcgctacctgcgaatcatttaggccctgttgactggtgttgaaatgtttgaaaagctcggctggcgaatgcgttgctgcataatcaacgcgtttttgccgagctttttgcgccgcgacttgatcggaggcggcgtcagcatgatttttttgcctgctcattatcaaagcctccttactgataaagatcgctttcatctgattttgcctttattttagcgcgttttttcgcaagcggtttcaaaaaatctgaataaatagacagttatagggaattgtatcaaaatatttattcctatctgatgctcgatagtggggacagttgatggcggctttcatttagtaggctatttttaaaagcgcggctttggtaaaattaaaggaaatattaagagatggggggcaggcaaatgaaaaagcagaatacctggctgctaggtcttttgactttgctgctgatcttgctggcgccagtcgtgggtcatgcggatggcgactttaccattaagcattaccaagtgaacgtcgacgtgttaaaaaacggcgacgcggatctgacgcaaaagattacctatgattttgacggtgattttcatggcgtttattataatcaagacctgcaaggcatcggcaaggctgatcagatctcggcagccgtggagcagaatggtaagctgactaacctggcgctcagccaatccggtcagaataataccgttaaggccacgcagagcgcagactggcttaagctcaaggtctatcatcaaatcagcgatgcagaagcaacctttatctatcactaccggctgcatggcgtgattaccagttaccaggatacggcagagctgaattggaagatcattgggacgggctgggatgaagcgctgcatgacgtttcaatcaccattcagctgccggctaaaaacgttggctcgcttaaagcctttacgcacggtccgctaaacggcaaaacgtcagtcaagaagcggcagggtcaggttaagatgacggtcgaccgcgtgccggccaatcagtttgttgaaagccacctgctgtttgccaatgccgtcgtaccgcaaaatgataaccgagtcgctaaaaaggtcctggctgctaagctaaagcaggagcagcagctggcaaaagcggctaatgccaagcgcgcccaggaaaaaagacggcgacagcttttcaaaatcggctacagtacaatatgcggcatcagtatcttagcttatggctggtggttgattaaaaaacatccccagcgatccaagcagccgccactggttcattcttttgagattccgccctatccagttgaacaggcctacgtgatcgataaaaatcaacaacccgacgcgcgcgtgctcagtggctatctgatgcagctagcgggtgaatacaagattgcgatcagcaagactgaaaatgatgactatcggtttaccgtcaaaaaaccggctgtccttaccgaaaatcagctgctcaagattatgtttaatgaatgcggggacggccaaagctttacgattcagcagctgaaaaaatggagcaggcagcgcaagcacgctaaaaagatcgcgaaagcctttgatcaatggtcgcaagccagtctggaaactgccagaaaaaccggctactatgatgctgacgcggatcggttcaagcagattggcatcttttggctgatcggcgagcttttgctgatttttgggatgatttttatcgtcgctggctggattttcaaaatgatcatggggctgatatttgcaggcggctttggctgggggattatatactatcgccagctcctgccatatacgccaaaaggacaaaaaatgaaatatgatttggactgctttattctcatgctcaaagatattggcgacttcaagctcaaagaagttggcgacattgttttatgggaacagattctgccatatgcgacggcgtttgggctggctaaaaaagttattcgtgaattaaggctttcgtttgatgaagcagagctcaatgatacgcttttaattacgtacccatggatttttgccagtgatccttggacgggcgcgtttgaaagcacgtttgaaaaagccttggataccggcaactcatcttcggcaactggcggctcgggtggcttttcggccggcagttccggtggctttggcggtggctcgggcggtggtgctttttaggccttccgctggttgaaagttattgattaggataagcggtgtcaagctgtgcaattaaaatcagaaagaaggaatgatcttgaaaaaaatcgaagggcacattcatttaattcgcgcaatggccggctctaaaggacaagggcgcttgagtccattgggcaatggctatgcgatctgggacgatggtgaaatcattcatctgttgcctgagggatggggcgacgatgattttcgtgtagaaaaatatctccccattatggaagcagaagatatcgaaaaggccgttatattgcaagggacactgaacggctatcaaaactattacacttatcaagtcatcaaacgctatccggatcgctttatcggcgcgtttgccgtggatccattcgctgagcgggcgatggcaatcgttaagcggcacgttgaagaactgggctttcgggccatcaagtttgagatcagtcaagcaggcggcctgcatggttttcacacgcctttccgcttagacagtgacgtccgtgttgggcagattatgcattatctggctgactatccgggttttgtcgtaaccgttgattatggtgacgatactcagactagctatcagcccgaagccatcgttaatctggccaagcgctaccccaaaatggattttgtcgtttgtcatctgtcatttcccaacgctgatcatctggaacgcttggcaaacgtcttgcagcagtttgcgccgctgaaaaatatctatttggacatttcagcaatccaagatatcgatggagaaaagccggctgattttccttatccgcgttgtcaaaaaacggtcgcactggccaagcagatcgttggagcacagcgtttgatctgggggactgactcaccatggtcggcaacgtttaatacctatcatcaactggctacttggctggagaataccgatctgttcactgctgacgagttggctgacgttatgtacaataatgccaatcgggtctactttaaagccgccaacgttgctgccgcccaagctgctgaagatccagtcgctgctcggtttaaaaaatcgcactaaataaaacgcgctgccggactgttgagccgatagcgcgtttcttttagttatggataataagcagcttgctgatttttgaccgtcaattatttagtcaatgctctggctgattgacgttccacagcggtttttcgccattcaaaacgcgaacgacctcactggcggcatcaacggccatgcggtccatacattccttggtgttgccggcacaatgcggcgtcagcaagacattaggcgtgctgaaccagggatcatctttgggcagtggttcttgatcaaagacgtcaacggcagcagcggcaatcgaaccggttttaagcgctgtctgcattgccgcttgatcaaccagagcagctcgaccaaaatttagcaggacggccgaatctttcatcgtgtcgaattcgcgctggccgacgcttctggtagtttctggcgtgactcgcatgttaagcgaaatgatgtcagcctccttaaagaccgtgtcgcgatcaaccatttcggcatttccgtctgaacgattggatggcgtgtaggcaataatcttcatgtcaagggcactggcttttttggcaatcatgcggccgatgcgaccatagccgacaattcccagcgttttaccggccagatcaaagccaagatgattaaacgtccatccccagtcaccctggcgcaggtgctcagtggtggggaccagatttttggagattgccatcatggctgccagcgttgattccgcaaccgttgaggcattggcatttttggcgatggttacccaaacgcctcgtttagcccagaactcaggatcaatattgtcatagccaacgccatggcgagcaatgacttttaatttcggcagctgatcggctaaggtgttgggaaatggttccgtcatcagaataatgccatctgcgtctgcggcttccttaaccaaggcagcggcgctttggcttttggtttcaatcagttcaaaaccgcggctggtcagataatccttaccagcctgtgacataatgcttggtacggcaactttcattctctctcactcttttcttggttaaggtggttagaatcaaatatcagcggccaagtgcagccgttgtttgcgtaaatcttaaagaaaatcgccttaaaagtcaatttgcgatttacgctgttagtgcggcgctcagctgataatgatctgtctaaaagcaaattagaaactttacaaaaacaatacccaaaactcgaatgaatctttacaatgcgtcgttagactgattaatgttgagaaagcttctagcggtctcacaatccattcaggttctctctaataaactgcaggtctcgctgtcaatggcggggctttttattttatccaacaaaaaaccgccgctgcttttggggaacaacggcgattaagctgattgagacatgaatttaaagtatcagcggcatggcactgtctaacgccatcaccgcatcatagatattatcacgatcggttctggtatagacatggtttttcaatttttcatcgactaattgacgaaattctttagcctgctccaaaaatttgacatattgtgcggcattttcaacctcactggtatggtacataaattcattcatcgtattgacgttgcgctgaaaagcatccagatgagcccagagccgttccttgacgccggttgacttcatggcatcaacgaacagccgctgcacgttgacggcttcttgataggccaggcgcatgtagtcgcgaatatagttttccgtcatgatctgcctccgatagatgatcttatttttataatagcagtttttggcgaataaatggtctaaatcagatggaaaaacgattaccgatgaatatcgacaaataaaacccgttgccaagcattttgcttagtaacgggtttttgatcagcgcgccttggccagactttggcaaaccgtggtcgtttctttttcaaccagcggcagaatgtccattgccatgcagtcgtcaatatgcagcttgatttggtagtcgcggtcgttagggaagaaagcatgatcctgaacgtagacgatcgcgctttgtacggaatccaaatgccgccgctcgattacttccgacagttcaactgccagaagttcgatcattttttgattgtggtgatatttgaaaaagctgcgcaaagtcacgtttcatgcctcctaaaatttattaaagcgaagatgcttttttcgattgctcacgagatagtattttagctgaatagctctaaaaagcaagccttttaccacgaaaaaattattatattttgatgggaatctgaattgcgaaaaatcattgatagatcaaggtttctgcgcttttcaaagcaaattttaaaaattaaatttggggatttgaagtcgctaggtaaaatgttatactagttttacaaatgaaaacgctttatcgaatggaaaggcaggaaaatttatgacgaaaaaaattatcctcgattgtgatcctggtcatgacgatgctttggcaatgacgctggcggtggcctcgcctaaaatagagctgctggcaatcaaacaccagacaagacactcaacaacgccatgcggatgcttaagctgttgggcagagaggatattccagttgctggcgggaaccgaacgcctttggtcaagccattggaaacagccggtgaggtgcatggtgaaagcggtctggatggttatccgctgccggaaccggattttcagccagttgagctgaccgcgatcgagctgattgccaaaacgcttaaagagagcgcaacgccggtaacactggtagtcactggaccaatgaccaacgcagcgctgtttttgcgggtctaccctgaactggccaaggcaaaaattgatcagatcgtctacatgggtggggccatgggacttggcaactggcagcccagcgtggaattcaacatcttcgttgatcccgaggcggctaagatcgtcatgaatttcgggattccattggtgatggcaccattaaacgttacgcatcaggcgcagattttgaaaccagaaattgaggcgctgcggcagattaaaaatccagttggccaggcattttatggtctgctgagcttttttgagcgttatcatgaaaatccaaagtggggctttcaaggagcaccgctgcacgatccttgcacgattgcctggctgattgaaccagagatgttccaaaccgaaaaaatgaacgtcgatgttgaaacgaccggtgagctgacgcgtggcgaaacggtctgcgactactatgagctgaccggcaagccgcagaacaccgaggtcatgctgggaatcaatcggcagcgttttattgagctgattatggaagcactgcatagctttgattaattgttaatggagctgggattggctaaagccgatcccagttttattttttgaaaaaatataagtcagcggtgcagattaatgaagtattcaatcagtcgcgaagataaacgtttatcaataaattggtctggacgcagccatctgacaaccggtacgattgagtttggaattttgccagatgttgactgatttaagccgatatcaatcggaaagaaggaacttattcatgactaatccacattcacattcagcacattccattaccagcgaaaaattcatcagctggctgaggcgctttgccagcgtaatcgcaattctcatgtacatttcctacattgctcagatcattaataatctgcacggccagtatggctcaccggtacagccatttgtcgccggcatcaactgtacgctgtggagcatctatgcgtactttaaataagatcgggactggccagttttttgggccaacttccctgggatcttcttcagctttgcaacatgcctgactagttttgcctggtaataaaacattgattcctaaagttttagatgagctttaggaatttttttgttgacagcttattttttgtaagttatcatacagttactaactttttcaaaggagaaatcagcaatggcaaacttcaattcattaaccaaccattcatgttgcagcggaccgcgcttaggctgtccgcttattgccgttgctcagctggttggctgaaaacggccggatcagcatcaagcgcagcctggtcaatcccgactgcgccttttttattgcatttgaaacatttaacataggagggatatgatgtggcatacgattcaaagctcgctgccagaactgttggcggccggctttaaatacacgattccgttagccctggtatcttttttctggggactgctgatcgcgcttttcgtagcattgattcgtttatccagacaaaatggcgcgtttaagatcttaaagggaatcgcagtcttttatgtctggctgtttcgttcaacgccattattggtccagctgttcattgtctttttcggtctgccgcatttggttataccaggagtctttcctgacggcgtgcagctcaagccgtttaccgctggggtgattacgttctcacttaatactggtgcctacgcctcagaaacgattcgggcggcgattgcttccgttcccaaaggccaatgggaggcggccgaagcaattggcatgaccagactgcaggtgctttggcgcatcattttgccccaggcattgcgagtcgcgctgccgccgctggccaactcatttatcagtctggtcaaggatacctcgctggcagcttcaattacgattgccgaaatgttttcggtggcacagcagatcacggctgaaaactacgagccgcttttgatgtacattatcgtggctttgatctatgccctgtttacgaccgttttatcgcgtctgcaggcctggatggaaaaatccctggccaagaccgcgcctgttcaataggaggttttaatgaaactcgctaagattaacaaatggtttggcgaaaagcacgttttaaaagatgtcagcttagagtttccagcggggcagacaacggttttggtcggcccttctggatcgggcaagtcaacgatcctgcgctcgctgaatctgttggagcagcctgatcgcggcacctatgatttcgatgagctgcatttgaactttacaaagagcgtcacccgcaagcaaaaactgctgctgcggcagaaaacgggcatggtttttcaagactacaacctgtttccgcatctgacggttctgcaaaacgttacggaaggtcccatccgcgtgcttaagcagtctaaagaagctgccaatcaggaagcgctggaaatattgagcaaggtcggcctgcgtgattttgccgatgcctatcccgcgcagctttctggtgggcaggcgcagcgagtggcaattgcccgcgcattggccatgaagccggaatacgttttattggatgagccgacttcagcacttgacccggaactggaattagaggttttgcgcgtgctgcttaagctggctcaggaaaatcaatcgttgatcatcgtaacgcacaatatggtctttgccagacgcgttgccgataagatcgtttttgtcgaggatggtacgatcaaatatgatggcgatccggcagctttttttgcgccggataatcctgatgagcggattcgccactttattgcggccatgacaatggaagaactggaaatctaaaagaaaagaataaggggaaaacaacatgaagatttttaagaagattgccttaatgactgctgcactggcattgggaaccgtgattggcacgacgatcagccatgctgactcggtcaagtccgagctgaaaacgcctgatacgctgacgatcggtctggaaggtacctacgcgccgttttcatatcgtaaggacggcaagctgcagggttttgaagttgagctgggcaaggccgttgcgaaaaaaatgggcttaaaggccaagttcgtgccaaccaagtgggactctttgattgccggattaggcgctaagaagtttgacgtggtcatgaacaacattgcgcaaacgcctgaacgcgaaaagaagtaccttttctctgatccctacatttcatcgcactttgtcatgatcgttaaagaaaacagctcgcttaagacgcttaagtccatcaaaggccacaagtttgccgcgggtgtgggaaccaacaacgctacgctggttaaaaaatatggcggaattacggttgacgacagcgactttgccagcggactggacatgatcaagcaaggccgggttgaagggatgatcaatagtcgcgaggcttggtacgtttatgctaaaaagcacagcaccaagggactcaagatgattgacgtttccagcgaagccaagccggtcaaggttgcggcaatgtttaacaaaaactcatcggcgctgcaaaagcaatacaaccaggcgctgcaggaactgcaaaaggatggaacgctccaaaagctttcccaaaagtactttggcgctgacattaccaagtagccgctaaaacatgatctggagtaatccggatcatgtttttttatttggatatagatagaataagtagcttaaaatcaaaatcttgttaagcgtctcactaagtcagccagagattgtggtatattaagttactggatgagcaagattaaggagtgaacttatgggagcactggcttttttgattgcagaacgggtgggattgattatcctgctggcctttattctggtcaacattcggccgtttcggcggctgcttttagatgccacgccggccaatctatttaaattggcgctgattttttcagcctttgcaattatttctaatttattggggattgaggtcgatcctgacaatcatattatgcgcgaaactattttatggcacgtcactcctggctattcagtggccaatgtccgcattctggccgtaacggtagccgggatcgttggcggaccgggagttggcgggatgactggtctggttgccggaactcatcggatgatgcaggaaagttggtcggttgatgcgtggttctacattgtcagctcgactttgattgggattttgtctggaatgctgtatcgcaaaaatcggcgtcgttttgtcgtgatgccgccatggcaaggctttttgatcagtctggtgatggagtcgattcagatgatctttgtcggtttgtttagtccgacgcatctgaaactggtgaactttatcgcactgccgatgattgttatcagctcaacggggacggcttttttcttgatgattctatctttatattttcgtcaagaagttgacacccgtgccgttcagactcgctcggtaatgaagctggcggttaagacgctgccggcatttcgccatggcctgcaggcggaatcggctaagcaggtggccagtctgattttggagtatactgactttgatgcggtcggaattggcaataatgaaaaaacactggcctttgttggagctggcagcgaccatcattatcatgacatgccaaaagtcgatgtaccacggtttgccaagcaggcgctgcagtatcgacagacgcagctggcctataatactgcgcagattggctgtcgtgatgaccactgtcctttacaggcggggatggcgattcccctgacgttgggcagccgcgtgctgggcgttttgacgctgtattttaaggaaaactggcagctgacccccgtcgagattcaaaccggtgagggactgggcgagattttggccacgcagatcgtattaggtgaaaaagaacgccagaccggactgcttagggatgctgagcttaaatcgctgcaggctcagatcagtccccactttttctttaattcgatcaatacgattattgccatctcgcggtttgacagtgaaaaggcacggtttctgctacgggagctcagtacgtttttccgatcgaatctgctgggcgccaatcaatccaagattccgctcaaacaagaggaagcacatgttaaggcctatctgaacctggaacagacgcgctttcctgataagtatgacgttgaattctacagcagcgtggatgatcaggtgctggttccgccatttgccattcaagtcttggtagaaaacgcgattcatcacgcctttggcaatcgcaagaccggcaatatcatcaacatttggatcaccaaatcaggcaagtatctggaaatacgggttgctgataacggcgagggaatcgatcaggcggtcatcggcaaactgggtaaggagaaaatcgcttccgaacaagggagtggtacggctatgcaaaatctgaatgcgcggttgaaaggtctttatggcgacagtgctaagatgcagatcgtaaccggcaagacggggacttccatctcgcttttaataccttatgcacaaactagacaggatcttaatacggaaggagcatccatataatgaaagtactgattgtcgatgatgaacctctggccagaaatgaactgcactatctattaaatgaaaatgcgttggtcaatcagatcgatgaagcggatggggtgatgacggctgatcaaaaagtcaatgccgagcatcccgatctggtctttttggacatcaaactagatgatggcaacggcatggcactggctagacgctggaaaaagctgccccagccaccggcgatcgtttttgccacggcttatgacaattacgcgatcgatgcttttaatgaagcggccgttgactatgtcttaaagccatttgacccggatcgaatcaacgaagccgttgccagagtcgccaagtttttgggcaataaggaacagttagaagatgttgcggaacagactgcctggcagaatccgcggctgtcaattacgattgatgacaagacgatggtgattcaaaaacgcgatgtgatgtatattgagacccaaggcggctacacgcatctgcatcttagaaacgataagctcttgatcagtcggcagacgctaaccagtattgctcaacttttggatccgaagcattttttgcggattcatcgtggttttatcgttaatctggatgaaattgacgaaatgcagccaagttttaatcatacctacgagctaacgttaaaagatggcagtaaaatcccagtcagcaggtcatatgtggctaaaaccaagaaggcaatcggactgcagtaacttgaattgtctaatatttacacaagcattgaatgtcaagataatgcattcagtgctttttattttgtcaaaaaagagcactcagggcatctcagcggctgataaaggcatttcatcgtcaaattcggtcaatcaatgtgaaaaccaacacaaaaccaataagattaactacaatgcattgtgtaatcgatatcaaggatggccatcttaaataagattaactgcaattattttattgatattttcggattgatttgagggaaggaaaaaacatggataagaaggaaaaacaagcgccagccaaggaagaaaaaaaggcagcgccaattctggtacaaatgggcatttttgccgctattctgtttgtctcacagctgatttcagatttgttcccagctagtttcgtagtaccaacgccactgattgggatggtattgctctacattctgttggcagctcatatcgttaaactggagcaggttgaaaagtttggcgactttatgatcagtttgattgcctttctgttcgtaccatctggcgttcagctctgtggcagtctgggactgatgaagcgggaaggtctgcaggatatctgcgtcatcatcatctccacgattatcctgctggtcgtaattgcttacgtgggcaacttttttgttaagctgcatgaacgcttggtacataagcagtcaaatacagcatcaagctcaaatgaaagtcacgcgggcacgcagcatatggctcactaagccgtgtacgagaaaagggaggattaaaaatgtttagtcaatcaatggtattgccttataccggtatcttaatctcactggctggttatcttttagggatgtggctgtttaagattagtcatgggttcttcttgtttacgccgcttctggtcgggatggtctttggaattgcggttctggcaatctgggccaaaggcatcggctccacgacggctgcggtctacactaagtactacctgccaggcggaaacatcatcttctggttcttaaacccggctacggttgcgtttgccattccgctgtatcgtcgaaatgatattttcaagaagtactggcttgatattgttttgacgctgtttgtcggtggctttatctccttgtttgggattcaactggtttccaagctgtttggtctgtcgcgagtttcgacggctgccatgctgccacaggctgctacgactgctgttgccatgccaattgccaagggggttggcggtgatcctgccgttacggcgatggcctgcatcttaaacgctgttatcatctacgccctggccaacttcttgatcaaggtcttccgcttgaagaagatttccaaggttggtactggtctgggtctgggttctgctggtcacacggttggttctgccaaggccctgcaattaggttcgattgaaggggccatggcttcggttgccgtggtaatcgtttcgttggcaatggacattctggttccaatctacgtcaacctgttcatgaaataattaacaaaggggaattacaatatgtcttatcgacaacaaaaagtcgtgctgatcggtgacggcgcagttggttctgcctatgcatttgccatggttcaacagggattggccgaagaattcgcgattatcaaccacaccaagagcaagggcgaaggcgacacgctggacttggaggatgccacggtctttacctcgcctaaaaaagttgagtcagctgactactcggtctgccgcgatgctgatctggttgtaatctgtgctggggctgcccaaaaacctggcgaaacccggctgcaattgatcaacaagaaccttaagatcatggccgatgtcacgcaaaacgtggttaagtctggatttaacggcatctttttagtggccgccaaccctgtcgacattctgacctatgttgtccaaaaaatctctggtttcccaaccagtcgtgtaatcagctccgggacgctgctggatacggctcggctgcgcgtggcattggcaaaggaattcaatgtcagccctgctgatgtatcggctaacgtattgggcgaacatggcgattctgaatttgcggcctactcatcagcagcaattggcggtaagaatctgctgcagattgctaaagaagagggcgtttcagaagaacgtctcaagctgattgaagatgaaactcgtcacaaagcctacgaaattatcaaccggaaaggcgcgacctactatggcgttgccacggctttgatgcggattaccaaggctattctgcgcaacgagaatgccgtcttgccaattggtgcttatgttaacggcgagtacggcgttcacgacctttatctggggacgccggctgtcatcaacgcgcatggggttgaacaggttatcgacgttcagcttgatgagcgcgaacaaaaggcaatggctcattctgcggctgttttgcgtgaagcagttgatcgcggcatgcgtgaaactggtttgaacaagatggttgtctcactggctcattaatgcgcaaaaaatcacaatctagacagagaaaacgttttcttaaatcgaaaatgttttcttttttttt

SEQ ID NO: 1873 - DNA, 34193 bp, Unknown
  gut microbiota DNA sequence
ctagatgaaaaagttagattttgaggagctgaaacataaccccgaaatcaagccgcttcaagttctggacgaagatggcaaagtcgtcaaccccgatttgatgcctgacctgagtgatgaagagttggttgaactgtttaagcagatggtttggtcgcgggtattgggcgaccgtactatgaagctttgtcggcaaggtcggttgggattctttgccccaactgccggtgaggaagccagtcaaatgggttccaacttcgcaatgagcaaggatgactttctgctcggcggctatcgtgacgtgccacagttggttaagcacggtctgccaatgtggaagggattcttgtggagcaagggtcacgttaacggcaacaagtaccctgaagaattaaatgccgttccgcctcagatcatcatcggtgcccaatatgctcagacggccggtgtggcacttggtctgaagaagaagggtgccaagaacgttgcctacacctacactggtgatggtggtacctcacagggtgacttttatgaaggggtcaactttgccagtgcctttaaagcaccagcactgttctttgtacaaaacaacctgtacgcaatctcagttccaagaaaggctcagacggcagcgccaaccttggctcaaaaggccgttgccagcgggattcctggactgcaggttgatgggatggatgccttggccgtctacagcgttgccaagcaggctcgtgactggatcacggccggcaatggtcccgtactgatcgaaacgctgtgctaccgttatggaccacacacgactgctggtgacgtgccacgccgctaccgttccgaagatgaagaagatatctggctgaagaaggatccactgattcggatgcgcaagttcttagagagcaagggcctttgggatgaagaccaagaaaaggcctgcgttgaagcagccaacaaggaagtcgatgacgctatgcaggaagttgaatcacagccaacgcagaccgttaccgaactgatgcaaaacgaatatgtggttacgccgccagcaattcaaaaagagctggatgcttaccaagcaaaggaggctaagtaatcatggctaagatgacaatgatcaaggcaatcacggctgctatggatgaagagcttgctcatgatgacaaggtaatgatctttggtgaagacgttggtaaaaacggtggtgtcttccgggcaactgatggcctgcaggaaaaatatggcaatgatcgtgtattcgacacgccgctggctgaatccggcattatcggactggctaacgggatggcgctggaaggcttccgtcccgtaccagaattgcagtttatgggctttatctacgaagcctttgatgaactggctggtcagatggcgcgctaccgcttccggatgggtggcacgcgcaagttcccaatcacggtgcgggctccatttggtggtggggtgcacacgccagaactgcactcagacagttttgaaggcctgctgactcaggttcctgggctgcgcgtggttgcgccaagcggtccttatgatgccaagggacttctgatctcggcaatccgctctgatgatccggtcttcttctgtgaacacatgaagctttaccgttcgatcaaagaagaagtgcctgacgaagcctacaccgttccattggacaaggcagccgtcaagcgcgaaggtactgacgtatcaattattacgtacggctacatggttcaagaaagtctggccgctgccgatgaactggcaaaagaaggcatcaacgctgaagtcgttgacctgcgtacgctggcaccgcttgatgaagatacgattctggaatccgttaagaagacgagccgcgtcgtattggttcaagaagctcaaaagcaagccggcgttggtggccaggtagcctcgctgatcggcgaaaaaggcattttgtacctggatgcaccaattgcgcgggtagctgctccagacacgccatatccattcagtgatgcggaagaagtatggctgcctaacaagcaagatatcgttgacaaggtcaaggaaaccgtcaacttttaatcgcgaggtggaagatcaatgagcaaatatgaattcaaaatgccagaacttggtgaagggatggcagaaggcacgattggcgaatggcacgttaaggttggcgacaccattcaaaaagacgccgatatggttgaaatcgaaaacgacaagtcaacctctgaaattccatcaccagtcgatggcaaggtaaccaaaatcaattttgaaaagggcgacgatgttacggttggccaagtgctgatcgaatttgaggtagctgatggtcaaggtaatgttgatgccagtgccgaagcggaaagtgatgccagtgctgctccggagccaagtgccgcaccagcgccaagcactgcttcagctgccccagcatcagcgccagccgttcctgctccagtggctgctcctagtgttgccgaccactccctgccagtcctggcaatgccagccgtacgtcgctatgcacgtgaaaaaggtgctgacctggctcagattgccggaaccggtcgtcatggccagattctaaagactgatgttgacgccttcttggctggtggtaccaaggctgccccagctgccgaacaagaagctcctcaaacggcaggtgcggttgccattgaacagccagcactgccaaagggttccgctgaatggccattgcacgacgagaagatgacaccagttcgcaaggcgacggctaaggcaatgatccgttccgtacagcagattccaatgattcatgtctttgatgacgtggtggttgacaagctttgggatcaccgcaagaagtacaaggaactggctaaagagcatggcgttcacctgacgtttatggcctacctgaccaaggcgctggccgtaatcatgaaggaatacccaatctttaactcgatggtggacatggctgaccaaaagatcgtctaccgtgactacatcaacgttggtattgctacggacacggatcgcggtttgttcgtaccaaacgttaagcatgctgattctatgagtctgtttgacattgcgcgtcaaatcagcgccaataccgaaaaggctaaggaaggcaagctttctggcgatgacatgagccacactggcatgtcgatcaccaatatcggctcaattggcggcggcttctttacgccaatcatcaactggccggaagtagccatcctgggtatgggacgcattgttgaagaaccagtcgttgttgatcacgaaatcaaggttgccaaggtcttgaagctgtcgctggcctgcgatcaccgagtaattgatggtggtacggcacaacgggcaatgaaccggctcaaggaattattgagtgatccagaactgttattgatggaagggtgatcagacatggttgttggtgattttgcaattgatttggataccattgttgttggtgcgggccctggcggttatgttgctgccgttcacgctgctgaaatgggacaaaaggttgccgttgttgaaagtacctatcttggcggggtctgcttaaatgtcggctgtatcccatcaaaagccttgattcaggttggtcataactaccaaactgccaaaaattcagccgatcaaggcattgaggttgctgatgccaagctcgattttgaaaaggttcaggcatttaagaacagcgtcgttaagcgtatgaccaatggggttggcttcttgttcaaggaacacaagattgatgtaatcaacggaacggcctaccttaaaaatgatcacagtctgcgggttatcagcggtcagcatggtcaaacctatacgttcaagcacttgattctggcaatgggcagtcatccaattgagattccaggcttcaagtttgaaggtcgcgttctggattcaacgggtgcattggcattaaaagaagtaccaaaagaattggtcatcattggcggtggctacattggcagcgaactggccaatgcctatgccaactttggagcgcacgttacgattctggaaggtaccaagtcaattctgggcaactatgagccagacttggtcaaggttgcactcaaagactttaaggccaagggaattgacgtaattaccaatgcgatggccaagcaggctgagcaaaccgcagatggcgtcaaggttacctatgccgttggtgaccaagaacatactgtagatgccgattatgtcgttgtttcggttggtcggcgtcccaacactaaagacatgggccttgaacaagccggtatcaagcttgacaaacgcggcttaattgaagtagatgcccagggtcggaccagcgtcaagaatatcttcgcaattggcgatatcgttgccggagcagctttggcacataaggccagctatgaaggcaaggttgctgccgaagcaatctctggcaagccaacaaccgtcgactaccacgcaatgccagcggtctgctatcttgacaatgagattgccacgacggggctgactgaatctgaggcaaaagaaaagggattggacgtcaagactgccaagttcccattcatggctaatggtcgggccgtatccatgaaggcaacggaaggctttgttcggctggtatttatgaaggacacgcatgtcatggtcggtgctcagatcgtggggccggatgcttctgatctgatcagtgagctgactttggcaatcgaatcaggaaatgagattgatgacattgcattgacgattcatccgcacccaactctttcagagacattgatggatgctgccgatgtcggccttggaatgccaaccaatatttaaattggatgaagggaacagtggtgtcgaatgcaatatttagcaatgcctagtgaggatatccgtcgcaatctggcaactgagcagtatctgatgaacagcgacaagatgaagctgccatttatgctgttttatatcgaaaagccttgcattatcgtgggacgcaatcaaaacacgatggaagaaatcaacgccgagtactgtcgtgaacatgacattacgattacgcggcgtctgtcgggtggcggtgcgatgtatcaagatctgggcaacatgtgctttagctttgtcgttcctgccgatgagattcgattcggcgactttaagaacctggttaagccaatcgttgatgcactgcatgacatgggcgcaaccggggctgaaaccactggacgcaacgacattgtaattgatggcaagaagttttctggtaatgccatgtacacgcgcaacggccggaccttttcacacgggacgctgatgtatgacgttgataccagcgcggttgcttctgcattgcacgtcccgaaagacaaaatcgagtcaaaaggcatcaaatcggtacgggcgcgcgttaccaacgttaagccatatctcaagccagaatttcagaatctgacgacgcagcagtttagagatgaattgatcaaacgcatctggcatgtcgattcgatcgaagaggccaagcagtttgaatatcagctgacgcctgaagatgaagcagtgatttctgaattggaaaaacgctactacgataattgggactgggtatatggcaagtcaccaaagttctcagtaaaaaaacggcagcatttcgatggcggaaccattgatgcccgtttcctggttgaagatggtcgcatcaatgacttgaagatctatggcgatttctttggtaccggtgacgtagctgatgtccaaaacgccttgatcgggcagccttatgatcaagatgccatgcagcaggcactggccaaacttgatctgaaacgctactttgttgggattgatcccgaggccgttatcaatctgctgaccaagcagcattaaaatttccagcacccagcgactgttttgaacgccttaaagcggtgaaaggcagtcattggtcagcaggtaaaagaccggcgtattacagcgtcggccttttttatgacattaagactagaaagaaggtggccagatgggatggcagatcgccagcagccgcttgactcatgatttcagcgcgctgccttttaagatgaaggaactcactttattgatcaagattacgcctcaagtcgacggcagcggtctgcgcttgatcctgcagaaccggtttaatgatacggcgctgctttttgatgagcttatcgtcagccatgatgaaaagatgagcgatgcaaaatcaattactcgcggcaagcaaaagcagattgccattgtcggcaacggggcagtgcatacggacgcgctgccgtttgaagtcattgccggccagccgctttattttagaatgcgggcgctgcaaaaacagacctatgccgatttcagctgtgtctatgacgaaacgttttataacgcgatcatggcaggaactaagaacgctgcgccgcatttgccgcataactggcaggcacgcaaaggctggttctgcatcagctgtttagaggtttggacgaataaaaaaacaccgatcattgagctgaccggcgattccctggcagaaacgggaatgattgagacagggctgattaagcagcttttaaatcaggctgtagtagtcaatacgggcatctccggcaatcggctgctgcatgatgccccgcaagatggtccactgtatcagacttttggtcagtcgctgattaaaagagccgctcagtcaaccgatccgcacccgcatccaattgttgccttgattggcagcaatgatctggttttgccgctgattgacggtcagtcggctcatgaactggtaacaccggggcaatatctagccggggtcagtcaactaaagcaaatcttggatgatcggcggtgtccattgattctgacaacgattccgccattttcaccgcatgtggctccacaacaggaaaacatactgcttgatgctcagcagcggcggcttttgatcaaccaggaactgcggcggtttgagtgggtcgttgatcttgatccgtggctgctcggcaacgatggcgggcttaaagaaatttatgattttggcgatcatctgcacttgaacgcggctgggggaatggttgcagcacaggcaatcatgcaaaaactaagccagcttggttacgataaaaacatttaatgtctgcagctgattttattgccgctggtcataacgatttgagggcatcataaaagccgtcacggtaaattccgtggcggctttgttttttatcctaaacttcagcgggcatctcaatctgtaagtcagcagcaatttcctgcatttgttcaatcgtcttggcatcaatgtcaacgccttgtttttgattattggcatagttcttgtattcacgatcaccagggacccagattgtcttgccaggaacatggttaagatgacgaattcggtcaatcatgctggttgcgttggctttaagcgtttcaacgtcaccaaagaaggctggatcaaacgcaaagacaaactggctaaagtcgtgcttgcctgtgttggtgtcggctgaaatggatccttgtgccaaaataccggtcagaatctcaacgacaatcgagttgcccatgcccttgtagttggagttgatctcagtgccgcccagcgtcaagaggccgccgcctttttgttcttcttcaaaggccgcggttgccaggatgctctcagcttctttgggatccttgacgacttgacgattcttgtcaacgacccagtcaccgggcagctcaatgccttttttgtccgctagctgaatcttgccgccagcaaccacggaagtagctccgtcaaaaatgaagggatgcggtgaggccgggaagccaaacgcaaaggcatttgatcccagaaatgcttcagtggcattagttgggactaccagcggccgcgtgttggtcagggcaatcccagccagccccgcagccagtgctttacgaacgtaatagccggcaatgccgaagtggttggagttgcgaacgaccccgatgccgaccccaatctgcttagccttatcaattactttatccattgtcaggctggctgccagatgccccatgttttggttggcatcgactaaaacggcgccgggcagctcttttaaaaccttggcatgattttgaggtacgatgatgccgtcgttgatcatgctgcgataccagtatagtctttggatcccgtgtgacgagattccacgcaggtcagcgtcaaccagcgtatcggcaatcagggcgccatcctcttttcgaaagcctaatttatcaaaaacgttctgtagatagctgcgttcatcttccgcgttgattcgcatattctttcatcctttcattaaaaaacgcccctgagccggctgctcaagggcgtttgtgttcgctgtaccaccttggtttgccattgcataacaatgacctccatgattgataacggtaatcagccggggacgtagcttgcacccgttccatttaacaatgagttcatttcgccgcatctgccaatgcgtgcttgcaccagatcacgctcgctaagattagaaaaaacggctactattctcactaacttttcattatttaaatataaactaattttagaaacagatcgttaatttgtcaagcggcgcaattaaattaatctaagtagggtaaaactggtgctgttttgtgcaaacgcttgctcaaatcttgaaagggctttataataaagttaactaaaagctgggaggcactaaaatgcaaaaattttctgtccgacatcctttcatggctgggtatgccgcaactttagcaactggtctgatcttttgggggattcgcggtgtagttggcgcaaatctgctgaatctgttggggatgctcgcgctggttggtttggctttttattggaataaactgaattcctatgccaagctggcctgtgaaaaatatgacctgcattttaatctgggccaaaagcagcggcacaatccgcactggccgctgtacttcaatacggtactgttcgccgtggccgcggtaacgattttgtttttgaacgtttcgttttatggcgcgcggatcattggggtagtgatggctattatcgccgccaatgcatttattccgctgccaacgcgcaagctggctcaaaaccatgagatcagagaactggtcaaacagctcaatgccagacgagaagctgagttttacggcacggctaaagatcgtcagaccgtccaggcaattgccaagctggctaagtcggaaaaataaaatcaatcaataagttaagcgtcactaagcaggcaggcttggtggcgcttttaatattgcaaggaattagcctctcatataacagtataaatttaccttaactaataactcaaaaaaaattcagtaaaataatccaatgccctttctttgtcaattaattattgccacaccctgtcaaaagggctacagccatcaattaatcaaggttcacatcgccaactaaagtttagcgatgttgtcgctgattagaaacgtggtgaatgataaccttgtgaagcaaagcaattcttgaacgacatttgggagataaattacctacttggcacggctttttagctaagagtaggaagtgtatatttcggcttatatgactttacctacttatgatgtctttttccgaagacgatggtatatagattacagcagcaataaaaagccccaattgaaggcaacttcaatcagggcaaacgtttatttcaatttcaagatctgggcaatcaagttttccatatcatcaggtgcgattactgattccttgcgcggctgatgatcaaacagttccttgactccagccgttagttcaccgccaaccagatcatgcagctgtttgatggatggcagaccttgctgttgagtatcctgtccggtcaaagcatgatagacggtttctgggaatttatacgggctggcggttgaaacgataaccattggcgtctgatcatcactgttcttttgatattgacgagcgacaaatgatcccacggcggtatgcggatcaatcaaatagccgctggtttcatagacatatttaatctcacccgcgacctggctctgcgtagcgtaaccagccgcaaattcggaatccagcttggctttggcggcagcagtaatctggtaccagccatcattttgtagccgttccattaattccttaacgctggcagcatcctcatcataaacatcaaacaaaagccgttctaagttgctggaaaccaggatatccatggcgggcgcggaggttagatgaaaggcgcgccgacgatcatatctgccagtagtgaagaaatcagtcaagacgttgttttcatttgaggcacagatcagctttttgattggcagccccagtttcttggcgtaccagccggccagaatgtcgccaaagttcccagttggcacggtgaagttgattgcatcgccaagtttgatctggccttgttccaccagctgaccataagcggcgaaatagtagacaacctgtggaatcagccggccgatgttcattgagttggcagaggagaactggtagccattgttgatcaagcgctggttaaaggcccggtcgttaaagatctgcttgacttgagtctgggcatcatcaaaattacccttaacagccacagcggtaaggttttgccccggctgccccagcatctgctttagctgaactggactgacgccgccatctggataaaagacgattacctgcgtgccatcaacattggaaaaaccgcgcatagaagccgtgccggtgtcgccagaagtagcagtcagaattacgatgtcgcgatcaacaccattgagcttgattgctttggtcattaactgcggcagcatttgcagggcaatatccttgaaagccagggtcgggccatgatatagctccagatagttaaaaccggctttttgtctactcaatggtgcgattgaatcgtcatcccattggtcagcgtaggccttggttgtgccatcagccagctgttctgcaggatagtcgttaaaaaaccattgcagaatcgtctgtgccaatttctgataaggcagttggatcaatttttccagatcgtacgctggtttgggaaagtcaaccggaacgtacaatccgccatccggagccaatccttgaacaacggcgtcactagattttaatgcatctttaacattaccacgcgtactgcgatagttcattgtgatcctccattcttaatacagtagtggtttggtagaattcttttaaatattgtagcctatggatagtccatgttacaatcataaatatgaaaatttaattaaaaactaccgagaatggagcagcgctatggaaactgtcaaactgggaatgctggggctgggtaccgtcggctctggcgttttagaaatgattgaaaacaatgagaataagattcgtaatattattggtcgggaactgtcagtcaagacggtcgtggttcgtcatccagaaaagcatcaaaacgcagccacggttaccaagctgacgactgaatttgaagatgtgcttaatgatgaagaaattcagatcgtggttgagctgattgggggaatccatcccgccaaagagtatatcgaacagctgttaagagcacataaaaacgtggtaactgccaacaaagacctgattgcatcgtatggtccggaactggcagcgctggcttatgaaaatcactgtgatctgatgtatgaagccagcgtggcgggcgggatcccgattctgcgcacgatcgtcaatagttttgcggctgataatattcttgaggtcaaaggaatcgttaatggtacgaccaactatattctgactcagatgaatcaaaagcactggacttatgaagaagcactgaagaaggcacaggagctggggtttgccgaggcggatccaaccaacgacgtgacgggtaaggacgcggcttataaaatgatcatcctgagctattttgcctttggaacacagcttaagattgatgatttcaaaacagaaggaattgatactctgaatgcctatgacgtcagccaagccgagtcactaggctacgttatcaagctggtcggttcggccaaggtcatcaatggcggcgtgtttgttgatgtagcgccaaccctggttccagaagatcatccattggcaacgatcaacaatgagttcaatgccgtgatggttactggcaaggctgttggggatacgctgttttatgggccaggtgccggtggtctgccaactgccaatagtgtcttgagtgatattacttcagaggttaagaatctgatcatgggtaccagcggccatgcgttcaatacttatcaaaatgagtatgtaccggccgatcccgacaacgtgcgctacccttactatctttcattgacgatgccggacgtttctgggcagatgcttaaatttacccgaatcatggctgatattaaagccagcttcagtcagatcgtgcaggcgccaattaaggatgaaggcattgctcatgtagccgtaatcacgcacgagctgtcacaaagtcaattggctgagctcaaaaaacaactgcagcaggccgactcgattaagcttaatgcggcttacaaggttttggaaaactagggggaatgattatgcagatcaaggtaccagcttccagtgccaatctgggaccgggatttgattcaatcgggatggctgtttcgctttaccttacgctggacgtacttgaacccagcgacgaatgggttatcgatcacgactttgacgatctgccgcatgaccagtccaatatgatcatcgatacggcattgaaaatcaaagccgacctgccgccgcatcatttgaaaatgcagtcggccattccagtagctcatggtctgggcagcagttccagtgccattgttgctgggattgaactggccaatgtcttgggcaagctgcagttgagcaatgatgagaaagtagcgattgcctgcgagattgaggggcatcccgataacgtcgcaccagcaatcttaggcggcctggtgattggtaccaacgttaacggtcatttcgatgctattcaagcgccattgcttccttacgcgctggctgcctatgtgccgtcatataatctaaagactgccgatgccagggcagccctgccagccagcctgacattaaaacaggcaacgcatggcagcgcaattgccaacgtcttggtagccggattgtttgccaatcgctatgatctggttggtgaattgatggaggctgacgagtttcacgaacagccgcgtgccaagctcgtaccggaactggccaagattcgcgaaatcggccatgaagccggtgcgctggctacctatctgagcggcgctggtccgaccgtcatgacgattatcgataaacaggggattccacggtttaagcagctgcttttacaggccggccttagtgatccattattggaaatcgaacctgatacggaaggtgttcaggtagttgattagttaaaaatgagaatcaatcactatttatttgttcaaaaaggctaaaataccaagggatcaaaaataatcaatcttttttataattagaggttgacgagataagattagagtgttttaatgttaacaacaaattattgaaaggagaagtaattatgaaacttcaatgccaaaatcgaccagcgttttatttcggctttgcttattatgctttcggatagcgttcgtgctgctcaggtgcgaacgcgagacgttcagcgcttgagcagagtcgcattttggcgcgtctttgccgggcaactctaaatccagcaaagacgaagcttacttcttctttaaataaccaaccttaagtacatcccttcataaaaagtattgtgcagaaggtcagctggattgatgaggcagacgtctcaaaactggctgactttttttagtacctgactaagggggattatttatggagattgcaaaaaatcagatcgatacaaccgctaaaagacgtctttccgtcagcctgtacctcaactacctggtacacggaatgggattgattattttggcacagaacatgaacagtctaggaacggcttggaatcagcccattaaaatcgtttccttcgtaatttcggggatcgggattggtcgtttgatctcatacttgattaccggctttttgtcggataagatcagtcgcaagtttttcgttgaattagggatgttctgctacgcggtatttgcgctgggcatgccaatgacgaaaaacatctggattgcctacttctttgccatcctggcgggggtcgccaattcatcgcttgatgccggtacttacacgacttttgtagagatgaatggcggcaacggagcctacacgattctgatcaaggccttcgtttccattggtgaattcatcctgccaattttggttacgattctggctggccagggaatgtggtttggttggagcttcatggcaatggttattttgctggcaatcaacttctgtctgattctgccgcttaagttcccagctgccaatcaagctgatagcagtgccgttaatgagcgggaatctgagatcaaaggagttgccaaaaaagtcatgactggcgcgctggttgtctacggctactcttcaatggctctgatgatctggtttacgcaatggatcacgatgtttgctcagcagacgatgcacatgtcagatggcgcggcccatttcttgctttcgctttacagtatcggctcaatcactggggttttggtactgtttgccttattgggacgcaacgttaaggaatcgcgcctgctgctgatcgtaaacgcaattgccttagcagccctgttggtgatcatgcaaagtggacagctgcttttgatgcaggttgcctcgttcgcattcggtttcagcgcggccagcggaatcatgcagaccggcctgacgatcttcatgaagctttacccaacgcaccgcggcatgattactggcgtcttctacttcttcggcagcattgcctcgtttacggtcccaatcattaccgggatgctttccgacatcagtatggccgcagttatggctggtgatctggtaatggctggaattgggattctggtagctgtcatcgtactgcttgctgaaaagaaaggataacagatggagactccgaaattaaacgctctgcgcgatcagatcaatgacatcgacgaaaaaatgctgcaattgcttgagcagcgttttgccattgtcaaagaggtgggcatggtcaaacaggctgccaatctgccggtaaaagacgaggcacgcgaacaggcggttttaactcgccttagaggacaggtcacggatccgtccttaaagccagctattcaggcgattttccaaactatcatggatgaggccaaaaagctggagtaatgagtttgagatattgaagacggaacaggaaaattagaaaagaggaacatttatgaactacttgactgccggtgaatcgcatggaccacagctgacggggatcttagagggaatccctgctggcctgcacttggatgtcgatcagatcaaccaagcgctggccgctcgccaaggagggtatggacgcggcaaccgccaaaaaatcgaacatgacacggttgagatcgtcggtggcgtccggcatggcgtaacgctgggctcgccaatcgcattgacagtcaaaaatcgcgatcatgcgcattggtcagaaatcatgaatccgacatcgccagccacaccagaaaataccgtgcgtaaggttaaccatccgcgtcctgggcatgctgatctggttggcggaatgaagtacagacatcgtgatctgcgcaacgttttggagcgatcatcagcacgcgagacggccatgcgggttgcagtcggcaatatctgtgaacagctgctggccgcattggatatttcaatcgttggttacgtacagcaggtgggttttattgatgcgcgcggcaaccaaccagccaatgtcaaggcgatccagatgctgattgcacaaaacgatctgcggattatcgacaattccaaagtcgaggcgattcatcaattgattgatcaaaccaagcgcaatggcgatacgctaggcggggtgatccgcgtcgttgccgaaaacgtgccagctggtctggggagtcatgtcagctgggataccaaattagatggcaaactggccgcagccgtaatgggcgtcaatgccatgaagggagtctcaatcggtgacggatttgaaaacgcggtgcggctgggcagtcaagtaatggatgagatcagctgggatcaagaaaccggctactcacgcctcagtaatcatcttggtggttttgaaggcgggatgactaatggaatgccaattatcatcaacgcggcgatgaagccaattccgaccttatacaagccgctgcagaccgttgacgttaccagccatgaaccggttaaggccaatgtcgagcgctctgatacgaccgcgatcgtgccggcatctttggtggttgaaaatgtcgttgccatcgaactggccaaggcaattacggatgcgtttgaagcttctagtctggaacgcctacaagaagaagtcgcagcctggcgtcaggaaatgcgcgaatattaaggaggaaacgtcatgaaaaaactagtcacggcaccccatggactgcacggatcattgacggttcctggcgataagagcatctcgcatcgggcggtcatgcttggttcaatcagtcagggcaaaacggtgatccatcattttttggctggtgacgactgtctgtcaactttggcggcttttaatgccatgggggtcaaaagtgagcgggatggcgaaaccgtcattatctacggcaacggaatcgatgcgcttaaagaacctgctcaaccacttgatatgggcaactcggggacgactacccgattgctgatggggatcttggcgggccgtgactttgagacgcgactctttggggacgcctcgctgcagaagcgtccgatgaagcgggtcagtgagcctctgagtcatttaggggcgcgaattgagctgaccgataatgggacgctgccggcaacaatccacggacaaaagctgcatggcactcattatcaaatgcaggtagccagcgcccaggtcaaaagcgcgctgatctttgctgcactgcaggctgatacgccatcaaccatcatcgagaagctgccaaccagaaatcacactgagatcatgctgaatcagtttggggccaatatcgaaaccgccacggatcaaaaaacgattcatgtcgtgccaaaaccggaattgacgggacaaacagttgaagtaccaggggacatctcatcggcagcctttttcttgacggcaggggcaatcgttgcgaactctagaatcagactggaacgcgtcaaccttaatcccacgcgaaccggtatcatcactgtattgcagaaaatgggcgcggatctgcagattgaagcactgccaaccgatggcgagccgttgggcaatattacgattgcgaccagtcagctcaaaccgattcagattgaagccgaagacattccggccgtgatcgatgagttgccgctagtggcgctgctggcagcctgtgccgagggaaccagctcgattcgtggggctgaggagctgcgagtaaaagaaacggatcgaattcaaaccgtagttgctgagctgcgcaaactaggcgttcaagttgaagagctgacggatggcatgatcatcaagggaagaagtcagtgggcaatcaatgatgatcagctggacagctatggtgatcaccgcatcggtatgatggatgcgatcgcggctcttaaggcggatcggccgctgcagctcgctaatgctgatgcagtcagcgtttcttaccctggattcttccaggatctagaacgacttttgggaggcgacctggcatgacgacggtgtttgtcaaaggattagggctgattggcagtacgctgattcgcgcgattcggcaacagcatccccaatatcgcattgtgggcagcgatatttcaacggccacgctggattttgccattgaacaaggactgattgatgacgcaggaaccaatctataccaagcggatcaagccgactttatcatccttgccgggccagtctcagcaatcgtaaaagacctgcatgatctggcgcggttagaactaaagccaggggtgattattaccgatgttggcagtaccaagcagacgattattgatgctgctcagccactgattgagcgcggcgatgtctttatcgctgggcatccaatggccggttcacatgaatcaggcattcaagctggtcgagttgatcttttcaaagatgcctactactttttgattccaaccagcggctcaaatggcgttagtgaacttaaagatcttttaagcggtctgaacgtcaactggtacttaattcatgctcgtcagcacgataagatcgtcgcgcagctcagtcatgttccccacgtaattgcaactgctctgatgactcaatcggcggctacttttaaggaccatcgcgagcttttgaagctggcggcggggggctttaagtcaacgaccagaattgccaagtcagatccgaccatgtggagcgcaatcatgcacaacaaccgtgagctgatcattcaacagcttgacgaatatctaaacgagctgcagtcactgcggcaggcaatcgccgcagatgaccaagaaaagctttttgccgtattttcaaaagccaaggctgaccgagaaaaactcgatcattaggaggaagcaaaatggaactgattttgataggatttatgggaagcggcaaaactaccgtgagtcggctgctaggtgagatgctaaacacaccagttactgatttggacgttgaaatcgttcggcgcgcgggcatgccgattccggacatctttgcccaaaacggcgagccatacttccgtcagctggaacatgacaccttagccgagattctgaaatctgaccagggaattttggcaactggtggtggaacgccgatgcgccctgacaacctggccatgcttaaagacacgccgacgccggtagtacttttgaaggccagcgcgactgaaacgctgcggcgaattggtggtgacagtggtcggccgctggcacagtcgctggacgaaaaaggcattgccgacatgcaggcccagcgtcaggtcaactacaatgcctgtgctgatctgaccattaaaacagatggcttgagtccagctgccattgctgaagagattatcagctttttgaatctgccggtatcagcgagttaaactttggagcctttgtcaaatcgtatcggcaagaccaattctctgcttccaaaatgaagtggggaatttttaattttacgaacatctgtttgacaaaattaggctgatgcgttaagatgaattttgaagattttgtgaatttgtggatttcgccaagcatacatgcgacgacgataatttagaaatttacaaatttgcggagtgccggtctaaacgctgttatttgcaatgctccaagctgtgaggttcgattcctcacctccgcgattgccaagcacaattgtttggcaggggcagctagccctcagtggttaaggaatctcatgtcagtgggcatgggatttttaaaaacaatttgcataaaccgcttacaaaggatcgataaagtgatatcctatagcttaattaattcagagaggaaaatggacatgaagaaaaaagacatccgtaaacgactggaagcccgttttgaagaactgaaagacaattcttatgattcttatcaggcaatgcataaactcactaatgacctgggtgaaaaaatcggtcaggacaaccttgacttctttgcccgtcatgttaagggtgggctgaccaaaaagaagatgacgaatctgatctatgctgccgcgcaccaaaagccgctggaagaagctgttaaattagatccggctgccaagctggcctatcgcgtcatcaaactgcgccaagataaaggctggacacgagaaacccttagtcatgcggctggcgttccgttagctgagcttaatgcattggaggaagctaaggcgcaaaccgtcagcctggttgatctgcaaaagcttagcaatactcttgatggcaagatcaagctgtcgtttaaaccggaaaaagaatagctgaactgggcaaaaaaaaagagatcaattacttcgttgatctcttttaattatggtcagccagaaacttggcaatctcagtcttgggatgaccgcttgcttacctatgcttatcaaaagcaatcgtttagtcagtagtcgtggattcagtcatttcctcatcaatcaaggatcctggcttaagcacgaacgcgtagaccagcagcgaaataaatactgcaccggatacataccagaagaaggcagattcgaggtgaatcgaacgcagccataaagcaatgtagtttacggtacccccaaacagggcaacggttagtccatagggcatccctacgcccaatgcccgaatttcagatgggaaaagctcggccttgacgatggcattgattgaagtgtagccagaaacgataacaatgcctacaatcattaatagtagtgcttccaaagcagttgatgcgccagccatcagcgtgaatagcggaaccgtgcacagcgtaccgccaatcccaaagaaaatcagcagtggcttccggccgattcgatccgacaggtgcccaaatagcggctgcaacacaaccatcaccagcaacgccacaaagttgatcatggctgccgtttttttagaaagaccggtcgtgttgatcatgaactgctgcagatacgtagtgtaggtatagaagctgatcgtaccgccaagcgtcatcccgacaactgtcagtacctgttttggataatgggctaaaagacgcaaggtcccagcttggcgattgttgcgattactggacttaaactgatcagattcttccattgaaagccgcagccataatacaaccatcgcaccagccgcgccaatggcaaacggaatccgccagccaaaggcatacagttgttggctggtatagatggcctgcagaataatctgtacgagcagtgcacttaattgaccgccaatcagcgtgacatattggaaggatgagtaaaaaccgcgccgatttggggatgccatttctgacatgtaggttgccgaggttccatactcaccacctaatgaaagaccttgtaccaatcgagttgcaatcaagatgatcggtgaccagataccgatttgcgcataggttgggaccaacgcaataactaatgaaccggttgccatgatcgaaaccgaaagcgtcaatgcggcgcggcgaccttttcgatctgcaaagcgtcccatgacgaatgatcccaggggccgcatgaaaaagccaattgcaaaaacaccagcagttgctaaaagttcagctgtttggttattggctgggaaaaaggcccccgagaaataaatggcgaacgaggcatagacataccagtcaaaccattcaatcatgttgcccaaagaaccctttaaaatgttgctagcaattttgcgttcgcttcgtttcaccgttgtttgaatcgttgcttgcatgtaaaaaacctcgctttcaaattaatttttaagattggacaaagcttaacgcattaaacggcataagttaatagtcttaagtcaataacgctgataattaagcgttatgtgtcgctgaccagctaaaagttgttagtgacagcgcttgcgactattgattttgaatcagtaaaaatgctgggcagcagtcaaaaagtcccatctaagcataaataaatgcctggatgggacgattaaatgatttgtttagcggaaaaaattaacgcggtgattgcttgagctgattcttgagcgccaaaatatttttttcaatctgcttgataactttgataaactcatcatcggcttggccagttggatcgtttagcccccaatcaacccgccatttagccggtagatagggacatttcacgccgcagcccatggtaacgacaccgtcaacggctggcagtgcgtcaagcgtcttgttagattgtcctgatgcttgcatatcaatgccgtagattttcttcagcaagcggatggcatctggattgatttcatctttaatatgtgtacctgccgaataactttcaaaaacatccccggcaagttttttgcctagcgcctcggcaatctgactgcggcaagcgttatgcgtacagataaacgcaatcttaggtttggtcacggcaagcgcctcgtttcttttaattgatcgtaatttaactttctgaatcattgtaattggccaatcagactttgacaaccagtcttataacttgtcgttgaatgattttagcagaatcctgcctgtaacccctatcatctctgcagtgtcaatgttatgcttatgttgtaatagttgttgtaaaaaagaagtatcaaatacagagaggggtttaacgtccatgaaagaccaattttatcgtcaaaccaccttgcaggttttagaacgacttcacgcaacgccacaagggctactgacaactgaggccatggagcggctgcagaaaaatggtcctaatgaactaccgcaagggaagaaagttacgctttggcaaagaatcattgctcagtttaaagacctgatgattttgattttaattgtagcggcaattgtagcggcttttgctggtgaactttcggatacgattattattttgttagtcgtggttttaaatgctgcatttggtgtctttcaagaaactaaggccgagaatgctattgatgcgctgcaaaaaatgagcacgccaaccacgcgcgtcagacgagatggccaaattgcccagctttccagcaaggaactggtcgttggcgacgtaattcttttggaagccggggacattattccagctgacgttcgtttcttaaagacgcaaaacgttaaagtcgaagaagcagcgctgactggcgaatctgttgccgtaactaaggatgaagcggtaattgatgctgaatcggctgccttaggcgatcagcataatatgggctttatgaataccagtatgacagcgggtacggccgaggcagtcgtagttgctactggtaaggataccgaggttggcaagattgcccagatgctgaacagtgccgaacagaccgtcacgccgctgcagcgcaatattactcatctcagtaagattctcagtgttctggtgttggcaatcgccgtcattattttcgcactgggaatgctgaccaagcgcgaaacgccactggatatgctgctgactgccatctcactggcggttgccgcaattccggaagggctgccggcaattgttacgattacgctggctttaggaacccaagccatggctaagcgccacgctctgattcgtaagctgcaggctgttgaaacgctgggggccactgaaatcattgcgtctgataaaacggggacgctgactaaaaatcagatgaccatcgaacagctgatgctgaatggtcaggttacgaccgcgaatgattttaagattgatgctgactcaccattgaccaaggcgatgatcctggctaatgatgctgagcggggcagtcaaaaagaactgttgggcgatccgaccgagacggcgctgtggcagttttatattgataagggactggatattgacgaatttaggaatcgctatcctcggcttaattcatggccatttgattcagaacgtaaactgatgtcggtcgccgtcaatgataagctgccaaccctgtatctgaaaggggcggtcgatgaactgctgacacgggcagatcgtattttggatggtgaacaggtacgtgagatgacggccgcggatcgtgagcagattcttaaaatcaatcatcaattagccaaacaggcattgcgagtgcttggctatgcttatcggccgctgacggatgctgagagtcaaagtgccgatccggctgcagttgagcagtcgctgatttttattggactgtcagggatgattgatccgccacgtcctgaagtcaaagcggcaattcaagaagctaaggaagccggtattcgtccactgatgattactggtgatcataaaacaacggcacgggcgattgctgaacgcttgggaatcattgagccgggtgatgaaagcggcgcgattaccggtcaagagctgaatgaactcagtgatcaggagctgaaggatcaagtcgcccaatactcggtttacgcgcgggttgctcctgaacataaagtccggatcgtcaaggcttggcaggcacatgataaagtcgttgccatgactggtgacggggttaatgacgcaccagcgcttaagacggctgacattggcgttgggatggggattaccgggactgaggtttctaagaacgcggctgatgttgtattagctgatgacaattttgctacgatcattgctgcggtcaaggaagggcgcaaggtttttgccaatattcaaaaagccatccagtatctgctttccgccaatcttggcgaagtcttgacgcttttgatcatgacgatgatgaactggtcaattttggcaccggtccagattttgtggatcaacctggttactgacacttttccggcgattgcactgggagttgagccagctgaaggcgatgttatgaaacatcagccacggggcaatcaaggcagtttcttggctcatggcgtcggtttcaacatcatctaccaaggcatcttggaaggactcttgacgctgggcgtttacgctttgggtattctctacccagttcatcaaggatccgcgttgattcatgctgatgcattgaccatggcctacattaccctaggcctgattcagctgttgcatgcctgcaactgcaagtcgttacagggaacgatctttaagacaggagaatttaggaatcgctactttaactgggcaatcctaagctcaacgctgcttttagccggtacgatcttcattccaactttaaatccaatttttcatactacggaattggatcttgctcaatggggcatcgtaatagcggctggccttttgatggttttgattgttgaaatcgtcaaggcagtgcagcgtcatcaaaaaaattaaacgtgaaaaaagcctcaagtgctgattaaattcagaacttgaggcttttattggcttgtcagtcgtttttaacgatcaacgtgctgccatttagccgttttatcttcattgttggcaattcgcttcatgttgaataagcagcgcatcagtgagatccagtcaacgatattgatcacgtatagaatcaggtaggctagcggcgcgaccatcatcagtcggattcgttcccagaatttaagatcttctggaataaaggtagccagggcgaaaagataatacagacccaggatggcaaaaatcgttgaaaagtcggcaaagtgatggatgatgcctaaaatccaaagcagtagcaatggatcaatcagcatcaaaaactcttcaaagaaaacttttggcaatttccaaaaagcgagtgaaaaagtgtacttggcatcgcgattgaaaataacgcggcgatgcttgaacaaagccttaaaacgaccttgtttccaccgatagcgttgtttgagcagctgagaaaaacggctgaccggcggcgtataggcgataacgtcatccgcatagccgaattgacgattgctgttgccgaaataatcgatcatcttcatcgtaaagtcgatgtcttcagtgatcgaatcagtgtcatagccaccgacttccagcatcgctgacttgcgaaaagtggagccaataccgccaatgatatactcaattcccaaaagctcctcagatccttttagccggtaaccaagcaggtattcgactttttggacgtattccaatagattatggggacgcgtaatgcgaacgttcgcactggctcccaataatccaggatcatcaaaacgccgggccatgtttgtcagtgcggttggtgtcaaataagagtcggcatcaagcaccataatcagatcaccggttgcaaattcttttaaggcatgattgattgcaaccgacttgccttgattatgttgatggatgacacgcagcttaggatgttgtctggctaattgatccaaaatcatccctgttttatcactggagccatcatcaaccgcgatgacctcaaaattaggataggtctgccttaagaccgattcaacaccccgccgaataaacttttcttcgttaaacgcgggaattatcacagagaaacggtgatcagctggctttttgctaagctgctgccgatcaatgctgttgatctgatgcagatttgatacaatcaagccaactaagatgcggccgactgccaaaatactgagcgcaaataccgtaatagcgatgatcaatgacgggctgaatttcatgatgatcctcctttttaaacgttaggaggaacgtttcttaatctcaaccacaatcagtgttatggccagaatcgccatcaaaataccaatggcagtggcaaaaatcatgcttacggtattgcctgtctgtggtaaaacggctgccagcggagtggccatcagacctttggataggttagagtacatagattaaaacctccttgtcattgctgtttcgactatgactaaagtatagcgagaatatttgaactatttttgaacaaacattaaaaaataccttaatagtgaattaaatcacattatggattaaaaattaaattgacaaattgggtatttattggaaactactgattgagattcgttgaataaagatgtctttgcacaaacaagcgcttttatgatatttcatagataaacttataaaaaaacgtatagattagtatactgaatatatattttaacttcgcagtccttagcattatactaaaagtaagtaagacgaaaggggttgactattttgagcaaaagtatcgtattttacttttcggctaccaatacgaccaagcagcgcgcggaaaaaattgcatcaaagctgggcgcggatctgtttgcgattcaagctgaaaagccttattcagccgctgatctggactggcatgatcctaactcgcgcacgtccattgaacagcatcagcatgccagccgggttgcaattaaagacgatctgcccgccatcaataactatgatacggtattgatcggttttccaatttggtggggaattccaccccgcttgattgccgacctgattgatcgtctgccgctcaatggcaagcaactggctggatttgcaacttccggcagttctggttttgaacgcgcccaaagctatctggaacgaaccgtcaaggaaaacaacgctgacgttcaggtcttaccaggcgcggttttaaataatgatgcccagatggatgcctggttaaagcagcttaatcttaattaattggtgttctgaaatggtgctgagccgctcttttataagagtctggcctggcatcattttttattggctatttttgagcagattggttgctttttaaaagccacttatttatagtaagtgaaacattaattattttgaattggcgaaaggatgattggcaatggaaaaatttaaaaacgtggtaattggctttggtaaggcgggtaagacgctggctaagtttttggcgcagcatgatgaagaagtgctgctgattgagcgttcagatcagatgtatggcggcacctgcatcaacgttggctgtctgccgtccaaaaatatgattatcaatggtcagcgtcatcttgagtttgctgatgcggttgccaaacgaggcacgatgactaaacagctgcggaacaagaactatcacatggttgctgatgagccgctggcaacggtttggaatggccaggccagttttgtcagcaaccatgaactaaaagtcgctatggctgatgggactgtgcgacaagttgctgccgagcgcatctttatcaatactggtgccacgccggtctggccaaaagttccagggctgactcccagcgagcggattgttagttctaaagaagccatggaacttgccaaaaagccggcccgcctggcaattattggcggtggctatattggactggaatttgccgaaatgtttaattcctttggcagcgaagtaaccatccttgaccaccatactcagcttttgggacgcgaagacgcagacatcgcggctgaagtaacgaatgatcttgtcagccttgggatcaagattgagctgaatgctgaattaaccagcgcggcagatgatggccagcaagtcttattgacctaccaccaaaacgggcaaaaacggcagaccgagtttgatgccgtgctggtggctgccgggcgacgtcccaacatcgacggactaggactggaaaacaccgatattgccctgactgagcgcaatgccattcaagttgatgatcggctgcgaaccacggtgccagatgtctgggctttaggcgacgtcaatggcgggccaatgtttacctacatctcgcttgacgacttccggatcgttaaagaccagctgtttggccaaggcaagcggacgactgctgatcgtaatgtcgtgccgaccgcatcgtttttgacgccgccgctggcaaacgtaggaatcaacgagcgccaggcccaggctgccggtaaggactatctggtctttaaactgccggtcaaggccattcctaaggcgcgcgtgttggaggatcagcggggaatctataaggcaatcgttgagcgcgatacgcatcgaattctgggtgtaacgctttatgccgctgaggcccatgaaacgatcaacctgattgcgctagcgatgaaggcggatctgccatacgaaacgctgcgcgacatgatctttacgcatccaaccatgtctgaggccctaaacgatctttttaaggcgccagtaaaataggcttaataattttttaatcagtccgcttaaaaggccgaactttgctacaatgaaaggaaaaaagcgaggtctatatcatgccgactaaagacgaatatgttaaaaagctcaacttaacgccacatccggaaggtggttggtatcgtcaggtttatcatagcgccaagacgcgttatgacgctacatccctggccagccgttatgagtacacttcaatctactttattctggatggaggctcgccatcgcatctgcaccggctgcttcatgatgaactatggtatttccatgatggctcatcaattgtcgtccactgtttttatccggatggcacctatgaggccgtacatttaggccgtgatattgaacggggcgaacagctgcagttccgggtgccggcgggaacgatttttggctcggaggttttggatgcttcatcgtttgggctggtcagctgtgccgtggcgcccggctttgactatcacgactttgaactgtttacccaggatcagctgctggctaagtatccggagcaggctgaagtaatcaagcgggttgcgtaccaaaagctgccagccgaatagtaaaaacagcgcggaatcaagttcgattcggcgctgttttgggttccaagcgtgacggtgcttcgtctaacattgaaaacggaactgtcgccagcatgattatgagtgcaatacttcacgatttcgggcctgactttgtgaagaaaatcaggttttagctgacaagggccttaagtttacctacgattcgctgctttagggccgaaagtaggtaaatgtatattcagccgacttaattttacctatccaagttgtgtgattcagttgcctaatattgacgcgcccacgcaccagtcattagttttacccagtaacgactgccagctggaatcttatgaagcaaaaacactcagtcagttcaaaactgctgagtgttttttgaatattaaaacagatcggttctagttgcggcgtgtacgcagcaaaatgactgaataaatcaagctgtcaatcagcgctgatagttttgccgcagaaactggtccattggcattggctcatgaccagtaatgtgctggaaatcatcagtgacggcatccatcaatcccattgcggccgcatgatacatcgaggcaagttcatcgccatcgccttcagcccgataaatgtcggcaaactccggcaaagaggggcatagccaatctcttgtcccgttgcctcagacatgatccggctgagttcaaccatattgtaattctgtttttgcgtcagcaggtagatctgccgatgatcgcgcagataaggcttgacggcaacattagcaattgcttcggcgctgtcatcgcgggtgataaaaatcatggcctgatcgccgactggatagatgatatttcgccgctcaattagttctggcaggtagggcaccagcggatcggcatataacgaatttttgatgaccgcgtagttcagtttggtaccggcgaggcgagcgggcaggtaggcataatatcctgccatctggaaaggattgttgggctggtcggcaataaaactgacatcgaccagattttttacgtcagccttctgcattgcctttagcgagttttcaaattccagcacgcggttggcaacgtcataggtgatgcttggaatgtagatcaagacatcggtatcggcaaacgctttggtcattgattcaacatcataataatcgcttttaacgacttcatagccttgatccaaaaaagcctgggccttgctaggcgtatggacggccaggcgaatatcttggatgtcaaccaaacggctcaattgttcaacgactttgcggcctaggtgtccagtggctccggtaatcgtgtatttcatgattgcttctccttttctgcctgcttaaccaaaatcgtatcaataacgtcttgcagcgtgatctgctgcagtttggctttggcggctgtttcggcatggtgatagtagtcttccagcgtcgattgaatattgccgcccacgatgcattgcggattggtattgtgatcaatggtaaaaagcggtgtctgtccctcagttgccagatagacatccaaaagcgtgattttttgagggtctaccagcagctcgggatcgggggtgccatgcttggtcttgataaacccagcttccttgagggatgtcattagacgacggaccaccaccggcgacgtttccagtgaactggcaatgttggcactggaaagcgtaatttttccttgatagatgcagatgaaagccaagatatgaatgctgtcgctaaatcgagtggaaaccttcaaataatcatctcctgtcgtaactttattagttatatctaatataaatgattcaaatttaaaaagcaacgactgtgagtagaatgtttaaaattaattgcttattctatagaaatcaaagcatatcgatttacaaagcagtaaagagcgagtagaatgcaaaaagaaactttaatggttacaacaaacagagaatatggtgattagattgattaaatacgaaaacgtggacatgagatatggtcaaaacgtcatcttaaaagacatcacgctgacgatcaatgatggcgagctgtttgtattggttggccctagcggcagcggcaagaccacgctgcttagaatgatcaaccggctgacggcgccaactgccggcaacgtctatttgaatgaaaagcgcatcaaagactatgatttgcgcgagctgcggctgcatatgggatacgtattgcagagcagcagtctgttccctaatctaacggttggcgaaaacattgccattcagctagagcagcagggcgtcaataaaaacgatcggcgcaaacgttcaatggacctgcttgatcaagttggtctgcccgctagcgattttatcgatcggcatcccgatgagctttcgggtggtcagcagcagcgcgtggcgattgctcgttcaatggctacccaaccgcagctgatcttgatggatgaatcattcagcgcgctggatccagttttacgtgctcaacagcaggatctgttgttaaatctgcatcgccagtcaaggacaacggttgtttttgtaactcatgacatgcaagaggcactgcggctgggcgatcggattgccgtgatcaatgatggtcagctgcagcaggttggatcgccaaatgaaattttagaacagccggctaatcagtttgtcgctgacttctttgcaacggcacgcccaagattgggaaccatgaccgcgcttttatcatcaaaactagtgcaaaaaaagtcagccactgatcaatctgttgccatcgctacggtagcagaactggcaagcctcacgccggatgcggctggctggctttattttcaatatcaggggcaggattttcgaattcagacaactgatctgctgcattatttaggacaaagagaggatcggtaatatgactgaattgcttaatacgatcgtggcgcaaaaaagccagattgaacaggcactgtgggagcatctgtcgctatcgttttgggcgctggtgattgccatcttgatcgcgattccattggcagtgtcgctgaaaaacagtcgacatgctggcgagatcgtcttgcagctggccggtgtgatgcagacgattcccagcttggcactattgggactgctgattccgctggttgggatcggtagcgttccagctttgattgccttggtcgtttacggcatcatgccgatctatcaaaatacctattctggactgcgcagcgttgacccgaatcttgaagaagccgcgacggcatttggcctttcgcgctggaaaaagctgacgcggctggaattgcccatggcgctgcccgtgatcttatctggaattcgcatctcgttggtcatgattatcggaacggctactcttgctgctttgattggtgccggtgggctgggaacctacattatgctggggatcaatcaaaacaacaacgcctatctgatcattggggcgggactgtcagcattgttggcgcttttgatgtcggcactgctaaaatatgtcggtgcttctaagaaacatttgaagcagggaattatcgttgccgcgcttgttctgatcggttttggcggctggcgggcctggagcagttttcaaagtaaatcggagccaatcgtgattgccggtaagctggggagcgaacccgatattttaatccacatgtataaaaatttgattgtaaacgatgatccgcatgccaaggtcgaattaaaagctaactttggcgggaccagctttttattccgtgcgctgcgcaacgatcagatcgatatctatcctgagtttaccggaaccgttttacagtcgctggttcatgaccaacgatcgacgccgcatgatccggttaagacctaccagcgggcgcggcgtctgttgaagcaggagtatgatctgacgtatctgaagccgatgaagtatcaaaatggctacgacctggccgtcactgctgattttgccaaggaacatcagcttaccaagctcagcgatctggctaaaatcaatgatcagatcacggccggctttgatccggactttgccaatcaaaaagacggctatctgggcctcaaatcagcatacggcttaaacttcaatcagttaaagacgatggagcccgcgctgcgctatcaggcaattgctgctggccgcgttaatctggtcgatggctatacgacggatccgcaagtgcgccagtatcatctcaaggtacttaaagatgatcagcatttcttcccgccttaccaaggagcaccattgatgaaagcctcgtttgccaaaaagcatccccaggttgttaaaagtctgaacaagctggctggtaagattactgaaaaagacatgcaggagatgaactatcaagtaacggttcagcatcgaaaagccagtcaggttgcccatgaatatctggttgagcatcatttgattaaaaaataacatcataaataaaagtcagtcgccactaatggcagctgacttttttatttcttagagctacaaacatttgatatttgtagttactggtatcttttgtaaacattttatataataatcaacgaagaaaattgaattagaacaattttaatcaagtcaaacattttaattaatacgaatggcaccgattt

SEQ ID NO: 1874 - DNA, 9844 bp, Unknown
  gut microbiota DNA sequence
agggtctttgtcaaaaatctagggagtttgaggctggtgaatcaatcatcccgcccgaaatgaatgctgcctatgaccacgatgaacacgcgctgccatcagttctccaccgtcaacgagccaaggagcatggagaatgggtcgggttcaatgccaattccgtctttaacgatggattgatggttaaactgctggttaatgacggtcaggttcaattcaaggccttaccactggatttgcgagagcaggatgcacgcgttttaaatcatggcgtgccagtaccagcttctccagcaattgcggatcgtattgttactcgtctcaacaaaatcagtgcgccatttaatactcggcttgtttttaatccagtaacctatgctttgacaattgaagaagcatgatcacgcatttcacgtaattaagtcaactgaattagccccagagtcgtgaaaagtgattctggggtcttttgatgtcctattgtaatcagcataatatccgagataaattctgttgtcgctcctcagatttgatccttgctattttgggctttaccgataattggaaaggcctttgttgcttgcagcgaagagtgattaatcagtaatcatccgtggcgcagcaattacttgggcaatccgacatggcgaaaattcttttctctacaaattgggctggctgatcatcgaaaaagtcgtggctaggcttgcttagactgaattatgcaaaaaattctgcataataacatatgacgaaaatctcattacctacttttttcaaaaaagcgatgtatagtaggtaaaaatcaatgtatatcaagggagtgtaaaattgtttgtgtaaatttaaaggaggaattgaaaaagggaaagccctccccgtatgattgaactgctaaaaccaatcagaatacggaggctttccccatggaagcttctatcaaatcacaaagccaagccgtttattaagcaaatggcgcaactaaatacatttgctggattggataaggttgatggcttactgtagcaggctcgctgctgccgagaaatcggtcagaatataatcgcctccaatcaagcgagttggtgactagggtgattttatcaaggttttcaactgcatcctaaaaagaaactagtcaatcgtcagcctggttttaatcgaaattaccaaaatcggcaataaaaactggcaattttgagaaaataaaaattctagcttttgaaaacgattagctgccttataatcaatgctaaaacttaaaaggcgatgaattgatatggaagaaaacgaaaagaaaattcaggatgtattagccaagctggatgaaaagcagatcaactatgaaatgcagcgacatccggcagttgatcgcattgaccagattgcagatttgaatctgatccatccagaaacggcagccaaaaatcttttcctgcgcgatgataagcatcaacactattacttggtgtcaatcatgccgcaaaagcgtgtggatctgaaagcctttcgtaaagaaatcggagcgcggcatctgagttttgcctcagctgaagacatggagaaatatttggctttacgtccaggatcagtgacgccaatgggagcgctgaatgatactgaacatcaagtgcaagtttacttggaccaagattttcaaggcggcttgattggggttcatgccaatgccaatacggcgactgtttggctggatgcggacgtattgagcgcatttttaaccgagtatggctgtcgggtcgcttatgctgccatctaacaatgcaaattaatcaagaagcatcatggctgagtctggtatgaatgaaatagcatctgcggcaagctggctttgggcatctagatttagcaatgataagacggcattgttcaacggttcggcttggtgtgtttggtcttatgcaaataaccagctttagtgcggtaatctgagccattatgattaggcatgacgcggatgaacatagcgacttggcagttactgtcaattatttaccgaaatgtcagacagccaaacgcgatggcgatcagcagtttgagagattaggggattttttgcttgaattacggtatcattagactaaagccttttacgaaagaaggttgtcgttatgccgcataaagctgctgatccagaaatcattaaagttctgttgaagcaagaaatcatccgtttgggtattcaaaataatcccagccgtaccgtttatcaagatcgctatcatcgtggcgaggcgccttcgccaaacagtgctatgcagatcaccaaaatgtcttggagcgatttgatgcatgacctgggatttagttatgatgccaagaaaaacattgcgcaaaatggtaaaaagggagccagcaagcatctaggtgccaagcagtccattcgtttagcagacccgcagacatgtgagcaagtcgtaaatggagccttagaacttatgcgtcgcgaaaagctctataatgtaaaggattttcgtctgcgctgccgaccggttctgggcgtcagctatgattcgctgatgcgctatggcttttcttttgaggaactcaagaaacgctatgctgccaaatacggtgaaagcattcgcaaaaccagtcgttggagccggtattccaatgccgatctgacgtttttggtaatcgactatatgaaggcgcacgaactgaatggacttcatcaatactcgacttatctaaacctgcataatgatgccatgcccgcgacggaaaccttaaaaaaacgtctgcagctgtcttattccgaattgaatcgacttttgaagattctgctgcagtaacgctgcctgatataaattgcggatactatgcattggctgcgtaaatcgtaaatatgttcagcaatcttcatgttgatgaatcatgaggattgtttttatttttaaaagcggatatctgaataaaaaacttgctaaaacaaaaccgcaacttgaaattctacgattgcagcagcataataatagcttttatgaaaatcaacgcgtctgcaaaatcgttcacgaattttaacatggtgaaagctaaaatagaaaacgattgcacaactgctgactgatccgctgtaaatagatttggttagggaaactttgctcataatttaactttgttgttggttaagccaaaaatcgttttcattgtgtttacattagtgaaattaatttacttttcgatgatgttcgtttagaattatctcaacaatttgatggttaattcacaatctttaggaggcaataattatggcaaaagttgcattagttaccggtgcaggtcaagggattggtaaggcaatcgctgaacgtttggctaaagatggtttttcagtcgtcgttgttgctcgccacatggacgcactgcaaaaagtagttgaaggcatcaaggcaaatggcggtgaagcttttgccgttacggccgatgttgccaagcgcgatgaagtctttgctgctgttgaccaagctgttgaacactacggcgacttcaatgttatggttaacaatgccggggttgctccaacgacgccaattgacactgtaacgcctgaagatctgcaaaaggtttacagcatcaacgttggtggtacgatctggggcgttcaggctgctcatgctgcatttaagaagcttggccacccaggcaagatcatcaacgctacttcccaagccggggtcgttggtaaccctaacctgaccgtatactccagctccaagtttgccattcgtgggatcacgcaggttacggctcgtgaactggctgaagaaggcacgacggttaacgcatacgcacctgggattgtgaagacgccaatgatgatggacattgctcaccaagtcggcaagaatgcaggcaagagcgatgaatggggcatgcagacgtttgctaaggacattgcgctgaaacgcctgtctgaacctgaagacgttgctaatgccgttgccttcctggctggtccagactctgactacattactggtcaaactctggaagtcgatggcgggatgcagttccactaaaataagttcatataagttcatataaaaaagatctcatcgcgagtttcggtgagatcttttttatttagtgcggtttcggctttggactgcggggtgtgtctttgattaaggattttggagattatggtcgtttgcaatcgttccttggcgttaggcgattgtggcttccttaattattgattcattgatttggtctgaattgcgccctttcctgccgattcatgctttggcttgcaatcaatgtggcgcttttgtttgcaatcaccgtctcgtcgcggttggtgctgttctttgcaatcaacgccctccaattgcagcagagctaatttgcgtgcggtgccgccagcatagccagtcaggcgaccgtcactgccaataacgcgatgacagggcaccaaaatcaaaatcgggttgtgggcaacggcgccaccgactgcccgcgcggctccttttgaaatattttgatttggcgcggctttttgtcccagttcctgataggtgatggtgctgccagcggggacctcctgcaatccgcttagaatgcgctgtcgataaggggtagtttctaaggctagcggaatggcatgcgggtcgggatcctgttttgcgaaatactgatcgagccaggccgttgtgcgtttaatgattgaattttcaccaacggcaatttcgtctaatgcgtagtcggcaccaaagtatttttggtcgttgaaccagagaccatgcaaggctgcgtcatcgaccagcatcgtcatggtacctaatggggaatgatattcgtgtttcagcattttagagtgctcctttcaaaattggtagcggcagccgtaaatttatggatatttataattttttgttgaaagcggttttaacgtcaattaattagaaaaaataacatcagacttaataatctttaacaaacagcacggcaaaaacaattaaataataagtaccaactaggatagaatgttctcttcttaaaattaaaagtttattaaaattaaactgtgcgatatactatattttaatatttaatgttttaagaggaaagaggagaacaagatgtgtggatttttagccgctggttccagtgagtttgcacccaaggcttttgcggatgccttggctaagctgaacgatcgtggacctgatatgacccggacgatttcaatggatgacaaggtttttggctttaatcgcctggccatcatggacctgtctgagcgggggatgcagcctttcgtaagtgatgactgcatcttggtctgcaatggcgaaatatacaactattatgcattggaaaagaacctggctccagagtatgagtttgtcagcaacagtgactgcgaagtcttgattccactctataagaaatatggcctggatacaatgtgcaagatgttggacgcggaatttgcctttgtcttatacgaccaaaccactaagcgcgttgttgctgcccgcgacccagttggtattcgaccaatgttttatggttataccaaaggcgagcataagatgtcatttgcctcaactgccaaggcgctgatggatctttgcgatgagatctatccattccctccaggatactactatgatggcgaaaggttcgtctgctaccatgacgctacgacggttcagaagatgcggaccgacgattttgccacggcagccagcacgctgcgcgaaaaattggttgaagccgttcgtaagcgcctaaactctgatgcgccagttggctacctgctgtctggtggcctggactcatccttggtctgctcgattgctaccaagcttttgggcaagccgattcggacctttgcaattgggatggaccgcaacccgatcgacctcaagtacgcgcgtgaagttgccgactatctgggaactgaccataccgaatttatcatgacgcgagaagacgtgctcaacgccttgcatgaggttatctaccagctggaaacctgggacattacgacgattcgggcctcaatcgggatgtacctgctttgcaagaacattcatgaaaacactgatttgaaggtaatcttaaccggtgaatgttctgatgagctgtttggctacaagtacacggactttgctcccaacgcggaagaattccaaaaagaatcattgaagcgggtgcacgagctttacatgtacgatgttttgcgggctgaccgctgcatttcttccaactctttggaaggccgggtaccatttgcggaccttgactttgtcgaatatgcgctgtcaactgatccagaactgaagatgaaccactatcacaagggcaagtatctgctgcggcaagcatttgctgggcaaggatatctgccagacgacatcatcatgcgggaaaaggcggcctttagcgatgcggttggtcactcattggttgacgacttgaaggactacgccgaaacgctctacactgatgaagatgtggccaacgccaaggaaaagtatccatactgcacgccatttaccaaagagtcgttgctgtatcgtgatatttttgaggaatatttcccgggaaaagcaaaatggatcaaggacttctggatgccaaacaaggaatgggagaactgtgacgttgacgatccaagcgcacgggttctcaagaactatggtgccagtggtgaataaagcagattgccgtaatagataaaagcgtcatctcagacgaggcttgttgtaacagccttgcatcttgaggtggcgcttttagcttacgattaagattttggttggcctggcttgggaagtttggctattaaagcaaaggaattcttccatcgattaaccttcagcagcggaatatctaggatttaatcgaagaattgggcttcttgccaaaattgatgtcgttaaacagcagccgcatctctgcattgggccgttaatctggggctgcgggaatcaacattgatgctgctggggctggctgctttaaaactgttctttttggacgtctgtttatggggcagctggacgggtggtaatatcttcccgattgtttttgccgcgctgccgaatggtttcgcgattgcccagctgctgccagcaaatgacactaccttgatcgtgatgctggtggggatttcttctgggatcagcttgctggggaatatctggctggccggaatcttcatgatgctgttcttcccaatgaatctgtggctggttgccattctgctcatgctgatttggctggctggacaacagatcagcaaccgttttgaaaaaatacgccagccaatgaaagcaggtagggtgactgatgatcgtgattagtaattggctgttggtgcgtcagctctgagaataatatatgaaaatagcgctatagcagatgtaaggcctgctatagcgctatttgtcttattttacttatcttggtcaagcagctcaaatgaatgcttttccttaccgatctgcttccagatatcaatgatcaaaacgtccataatcaaggcgccaatgataaacaaaacatatgaatacttggtcccaatggcagtctgaacgacggtgctttggtgaggcatttgcgcagcagtgattgccagaatcgtggagacacaggcggttccgattgagccggcatactgctgcagtgtactgaataaggcattgccgtcaccaaccagctgcggttttagatgctgcagtccataggtcatgacgttgttgaataagaagccgaaaccgaccatgtagactgcgtaaaagatcgtcaacgaccacattgagagatggctgctgaatgcatacatcaagatcacggccaggttggtaaaaagcgcgccaaagatcagcggcttcttgattcctgattgatccagcaggcggccagtcagcggcagcaggacagctgagatcagtgccccgagcaagagcatcagaccagcgacaaaagaattctggtgcagcgttaattgagcacagtttggcaaaaggaacgtcatgccgatttgaatgaattgaaccatgaaatacagcaatagacatggcagatagatcgggtcagcaaagacattggtattgaccagcgggtgttcgcgatgtgaggtcaggtagccgaacataatcaaggcagccagtgcgacaatgacgtttccgtaaaaggccggtgagacaaagccgctggtaccaacactgttcagccccatttccaggcagatgaagccaatggcaaccagcagatactgcagaaactggaaatggatggtggttggttgatcgatctgctgaatgttggcaatcccgatcaggccaaaaatgatcccaactggcaggacaatccaaaaaatcacgcgccagttgatgaattgattaaccaggccgccataagttggtcctaaagaaggtgccagcccgattaccattccacccaggccggcgtaggttccctgcatggcaaatggaatctgctgcataatgacgaaaaacagcagcggcattgccagcccagtgctgatcccttgaatcaaacggcctaacaacagcatccacagctgaggcgccagggcacaaagcagaccgccagtgataaatgccagactagatgcaacaatcaagccgtgcagtttaaagcgacgctgcagaaaggctgccaggacaacggttagggcaacggtcagcagatagccggtcgtgacccattgaacggcatttagactttggtgaaaatcacgcatcaaagttggaaacgtaacattcattgaggtttcaaccaagacaccgcaaaatgccaggccggcaatgccaatgattgacagattggttttcttggtaacctgatgttcgttcgtttgctccataaaaatcaaattcccctttctcaaataaaaaactgacactgggaaggcaaaaatgcttttcctagtgtcagtctgacttacggatatacaagcgaaagttatatcttaactataccactttcgaaaatttttcgtaaattaaaaaatcatgataattaggactcaaaccggtcaaatgtctttcccaagcaggttatgagcgaatgggacataacgcctggctgaattgacaatcacctcgtaaagatttgctagacgcgtcgctcaaacactctgatcggatcttgaacggcaaatattgtgggacgatttcaaacagtcgttgcctagccgtattggaaggttccggactgtgggctctggattatcgttgccttcagtcgttgcctagccgcactgagaagttttacatccgcgtcacctgtccaaggcggttttatcgttgcctagacgcgttgggaggctccggttgtcgcgtccagtcttgagccatcattcggggtaaagtgcatcaatgggccatcaatctgcgcgtcatagtcgatcgcaacgtccagaccattgaaaaaccagtagtcaaaggcctgaatatagtaatgaatgccatcgatgacttgatcaacgacggggtcaacgggatgatcacagcggccgatgccttgtgaaaaaccttgatgggcattggtttcgccatagcctttgccaaacagtttgatgccgttgccaggcttaagacgcatttcgttttgaaaccattcgctggcttgcggggtcatggtaatcttggttaatttcttttcagtcataagaaagcgccttccttaaaatgtttgcctttagcctaacatgataccggcagtttgtcgcctggcttgcttgataaatcgtaaatttgattaaaaagttggttgcttggattttacagcagtaattttttaataaccgaccccatttttttaaagttttgctaaaata

SEQ ID NO: 1875 - DNA, 14586 bp, Unknown
  gut microbiota DNA sequence
ggtgttgaagaaacaaccaccgagatctgcattcctgaacaggcggctgatcttttttgattgcgtgctattttaattctactgactggcagcgcgcgatcgatgtctaagtgatgagtcagcatcaagacattggttgaagggggaaaaactatggctgaaaagcaagccaaactattgaaaatgctgagtgagggctcattaaacgagcggatgtttaatgccagctttggtctgcgcctggaagaacaccggattttaaccaatggccgggccagtcgctacgaatatcccaagaacctcagctcacgcaaaaccaatccatatcttttgagcggcttttccgataatttaatggaatttaccacgccaatcgtcagagggagcaaggccacctgtcagcagttaaaggtcttagagcagatcgttgacagtcagctgcatgaagatgaacggatctggccattgagtctggcaccagcaccagagtatcagcacgatctggaatatgtcggcaacaactgctcacagccgtggaacaaggaatacaccaactacctgcgcgaaaaatatggcattaagcggatgatgctgggaggcgcgcacattggctttaacctggaccaggagctactaaacgccttatatgacgagacttttaaggacgactttgccagccaggccgatttccaaaacgcggtctacttcaagatggcccagtgcttctgtctatggcggtggctgtttacctatctatacggtgccagtccggtttcagaagccgttgaacacgatatgccagaacacatcaacctgccagtgcgcagcttccgtaacagtacttatggctacgataacctgcctgatgagcgccccagctatgaaagtctggaaagctttgtcgaccagatttcaaagcttttggaggatggtacttactatggtccgcaagaattctttggtccggttcggctgcacggtaagcatgatgatgacagtctgcgccagatcgtcaaagatgggattcaatttatcagttttcgttcgtttgatctggatccgtttgctaaaggcgggatcagtgaagatacgctgaatttcttagagttgttaatgatctacacattggtttcgccaatgccggaaaaccttagtgaaaaactaaaccaggcaattgagcgcaataatgaggtcgctttgcaggcaccagatgaacaaaccgactggatgcgcaatgaggctatggatttgattgagcgcttgagtcaattctgcaatcagttcaatgcaccgcgcgaatacaagctggccttgagcttcgttaagcggcgggtagaagatccaacgctgacgatcggtggccaggtagcggaaaaactggcgaagggcgacctgttgagttttggcctcaagattgccaatgaccgctataccagtttcgtacgctcgctgcatccattgcaggcgctggctggccagtattccgacagtgtgcagaaattgattaagattgccatcatgagcggggtccacgttgattttgaagatcccctaaagctcagtgtcggcaatcgcgttgagacctttgacgcgcaggctgatcttgatctttcccgcggtgctttggattacttgttaaacctgttcccagaattagaaggcaatttggctgaatagcaaaaaaaagttgggaggcgcgccctgtatgggaagcgcctttttacgtcatatgggtgctcagcttgacaaatctatgctgcagaatcgtctagcttgataagtgtctgcttaataggggcacagcgacggtcttatgagattattaggttatgccatgctggctgcttagcttgaaccagttgtttatgtggcagggtacgtggtggcacgtgttggcatgatcgatttacgctggccacattgattttcaacacgtatttgcataatagttagctgctttgattttcaaaagaaaggacgatggattttgcgtaagcttggaattattggacttggcaatgttggcgcgctgctggccaatctgctggtggcacggcagattgttgatgagctggttttgattgacaccaacagtgatctggcagtcgggttgcaaaatgatctgcttgatggtatgtcggcactggcagttcagccaacgattaaagtacaggattacgcggcgctcaaggatgcggacgccgttgtcttggcaattggtaatgcggaattgttaaaagagcaacgatttgccgaattgaccgatgtcgggaagatgatgcgccagattgcgccgctgatcaagcagagtggctttagcggggtactgctcaacctggctaatcccaacgaggcagccacggcctatctgcaatatctaacggaactgccgcggccaaaggtaatcgggctgggaacggttctggataccgcgcgcctgcatcgagccattgccgatcagatccatgtcgcgcccagtgcggtgactggttttgtctatggtcagcatgatggcgaggccgtaccaatctggtcaacgtttcgcatcaatggccaaccgttggaaaagccggtaatggggcaaaaaatcgacccacaccaaagtgagattcaagctaagctgaatggctggtatgcgatcaaaggtcaaggacaagacgtcagcgggatggcattatggacgatgcgaattttgcaggcagtcttgtcagatgaacaggtcagttttcccgtggcgctttatcagccgcagtatcaaagttatctgagttttgccgcgcagcttggtcgacagggcgttggcaactatacgcttttgccattacgaccattggaggaagatcagcttaaagtcgcggcccaaaacattcaagatcagctgaacgtcctgctggaactgccaactgaagattaggttagggcgtttcgttaatacgggcataaagtcaggccgtcgcttttgctgatgaaagtcgatccagtattttagctggtcgcatcaatcaaaaaaagatcatcacggtcgcgttaggctcgggatgatctttttagtttgcaggcataattgaagattggcgcagacagtaaatacgcatactggcgtggttgtttgaggtgagtttgccagagtgattcccaagctggtctaatttagcggtactgtcggcgggctggcgcatggtaatggttcataaacttcatcaagtcgtcaaatgaatgggcgaaatggatcgcgtccaggtatgactgttccaaaaagccagtgtcgtgcatgcgtcgcaacatattacgtagggggtcataaaaaccgttgacgttataaaacgcggttggtttagcgttatcgcctaaggacatccatgaaaaggcctcgctgatttcttccaacgtgccgattccaccgggcagcgccaccagtccgtccgcgagatccatcatcaagtccttgcgcacgtccatgttagaaacgattttaagatccttaacgcggtccagtgcggtttggcgttcgtatagctgtctggtgatgacgccatggactttgccgccattatccagtacggcattggcaatcacgcccatggttccgtatttgccaccgccatagaccagttcaatgccattttgcgccatcttcttgccaaacgccgcagcccttgcttggtagatgggatcattgcctagatgcgcgccacagtaaacggctaaactcttaatcatcaaatcgcttctttccatttggttttaccttaattgtaaactgattgatcctttgcggctgatgttttatcaaagatgagaatcggtcagcagttttaactgcatcgcaccggttgtcgacgaacagacactggtggaaataactgctttgaggactccttatcatgtgtcgaatgctcgtcaactacatttgccattgaaatcgccacagcctttggaaaatcaggaggcccactgaactcatctgtaccatcaaaccagcttaagttaaatcgtttcaaacttatttcaatggcgacccgcaaaacaatctcaattaattaaaccagtgccatcgctaagactgaaggcaataaaaaaacggcgtccgtcgcggaacgtcgtgaattagacataacgtaatcgaattaattattgcacggttgaatatagtatacttggtcatcggcttcatcgatcagcttggcggggcgctgttcattggcttggatcgtaatgtgatagccaaacttgtccaaatagacgagctgttcggtgctgacctgctgaacggtagccggaatcaattggttgtcgattcccagcttgagttctggtgagatcgtaataatgtgcgaacggtcacgctcttcatcatagtatttccaggtaccggcatagaaaacgggcaaggccgcgacgggatgattctgtttcttagatcggctgaaaccaaacgaactggtgattccagccattagtcccgcaccgaaaagcaacattccttttttcttcattctgctcaatccccttcaatttaacttgatttttcatttgatcataaatttacgattttaattatacacagctttgtgttatagaaagatttcatttctgttaaaaactgaaaataattgttagaatgaaacgtagcaattgtaaaggagtgatcgaattgctaaaattggggattattggaactaacattattactgatcaaatgcttgacgcggctaaaaccacgggcaagtacgaactgacggcggtttactcgcgaactgaggaacacgccgaaaagttcggcaagccatatggagccacgcagttttttgacagtttggaagatttctttgatgaaggcgactttgacgtggtctacgttgcctcaccaaacagcctgcactatgaacaggttcgcttagcaatcgaaaatgacaaattcgtaattgttgaaaagcctgcctttgtcaacccaaacgaatttgagggcattgaatcgcttttggcagcccacccaaaggcccgtgtcgttgaagctgctcgtcacattcacacgggtcttttccatgcggctgaagaacagctcaagcagatgccggttattcaaggtgccaacattacggtaatgaagtattcttctcgctatgacaaggtagttgccggcgacaagccatatccaaacatctttacggctgaatttgccggtggggcattgatggacctgggtgtttatgctgtttatggtgccgttactctgtttggcgttccggacagtgtcgtgctgttcccaacgatggtcgcaagcggtgttgatgggatggacaccgccattttgaagtatgacaagtttgccgtaacgctgaactttggtaagacggccaactcgcatctggtttctgaagtgtacggtcttaaggatacgctggtctttgactcaatctttgacacgaccaaagtaacctactatgacagtgaaaagcaggcccacccactggaagccaaattttatgaaaactcaatggttgatgagcttaacgattttgctgatctgttcaatgatccggaaaatccagaacaacaggctaaatatcgtcgctggttcgatctggcgcgcaaggtcaacacggtaatgtatgatctgcgtcgctcggctgaattgactttcccagctgacgataatcgttagacatcaactgactaaattaaaggatggatatctgttgatcgaacaatttcaacaactttttgatgaaaaaggtttccagcagccaacgcagattcagaccgcggttgctgaaaccctagcttctggaaaatcagtcttaggaatcgcgccaactggttctggtaagacgctggcctttgcctggccgcttttgcctaaagttgagcccggtgccggcgttcagattttgattttggaaccatcgcaggaactggcaattcaaacgacggcagttttacgcgaatgggccaatctgatcggggtcaaggtgcgctcgctgactggtggtgccaatctgcggcggcaagtggcaatgcttaaaaaacagcacccagatgtcgtagtcgggacgccgggacgcgtgctgcatatgctggacaatcgcgatttgaagcttgaccggctgaagacgctggtgattgatgaagccgatgatctgttgcgcgatgatacgcaggcggtggtcgaagatattgaacgcgctacaccgctcaacgcgcaattggcctttttctcggcaacgagttcggcagcctttgatcagctcagcgtcatgtttggccgcgacatcatcacttatgacgttcgtgaaacggatcaaagccgtggaccagttcggcatggcttggtctatgcacgaacgatgagtcaaaaaacggcaatgcttaatcggttgagtcacaccaaggattttcgggcgttggtcttctttgacagtatcaagacgctgcactacgcggccagtcgtttgaagcatgagcacgtcgcttcggcaaccctaggcggcaagcagcggcaaacagaacgtgaaacggcactgcgtcaattccgcaagcgtcagttaaagctgcttttgaccactgatgtcgccgcgcgggggttggatattcccaaactgccagctgtgatcaatttcgaactgcctaccactgtcgatcagtacgtgcatcgaactggccgaacgggacggcaaggtgagcccggcttggtaatcaacctaggcagtgatcatgattttcgtgatctgaaaaagctgctggccgataccgactatcagtttacggaattgacggttggtgaaaaagccgtcaccgatgaaaaaccggccgatggagcagctaaaatgccggtgcgcaaagaagctagccgtgcgattcaaaaggaacagcgtgaaagcaagcgtgaggttaaaaagagcattcacaatacgctggatggcttttcgatgccggctaagcgcaaaaaccgcaagaagaatcgcaaaaacaagggaattcgcctcaagcaccgtcgcatggcggaaaaacaatctgatcaatagtcttggcgctgatggatattgattaagtaagtgaaatctcggttccgcctagctatctctgtctgataggggcggcatcgtttcaaatacaaggcatgcctgattcagaatcaacattaaagagatattgttgactttacgattgaacataaatgtgcgacaatatttcttgttgtggtcccatagcataattggatagtgcatccgcctcctaagcggtcgattccggttcgaatccggatgggatcattgttacttaatttaatgcaaatcttcaacaagtcgccatcctgaatcgggtagcggcttgttttacgttgacgacttaaatttttcgccaaaagttagggaaacgatatcggtaatttttgaagccttatctatatttcggttaaatgtgtaatggatgagaaattacgttgcacattgtaaataaaaaagcgtgatagcagatctggtaaaatctgggatcacgcgatgctgttagatttaagggtcgaatcttaactcctggttggcaggggctagcgattggcgattttgtcgttggtcttaaagatcagccacttggaaaagatatagttggcaatcacgacgacgacattgtccaaaatcttaacgaccaactgttggatggcggagtcaaaacctaaaagcgtcaccccgacgtacataaagacgatatcgatcaaaagcgtcaaggcacgatagaagtagaacttgataaactccacgataaaagcgcggaatgtcgtatagtgtgagccaaagacccagaccttgttcgttaaataagcgaccagaacggaaacaaaccaggcaataatgttggcaagctggtagttccagtgaatgccggaactgagccattggaacacaccgatattgacgatggttgtcaccacgccccaaaacagataggcaatgacgcttttgtatttattccataattcagccattagtcttgagctgccttttctaccagctgcttggcaaatgcgtccagcttggtgatatcgtcttgatctggttccaggttgatatgaacgttgtcagcccccttaacggcaccagtttgttcaaaggcctcgccaaacttgtcaacagccaggcagaagaagtcttcataaaaagtatcgcctgagccggccacgccataaaccttgccgctcagatcctcttcctttaagtcatcgaaaaagtccaggccctcatcgggcagggcaccttcgtcataagtgtatgggcagacgacgcagatgtcgacgtcttcaaaatcagccgcgtcggccatcgtcatttcggtttcttcaacttcaacgccttggttttccaaagcttcggtaataatatcggcaacgtcttcattgttaccagtaatcgtggcatatacgaccaatgcttttgccattgtttttccctccacgtaaatagattcgtaaataaattcgcaacggatagtataacacagaattattttgcggccttgagtgatatactaaataagatattaaaatttataaactaaggagactttctggatgattagtttaaagtcaccacgcgaaattgaagcgatggaaaagtccggtgccgttttagccgggatgcacattggggtgcgcgaaatcattcggcctggcatttccagctgggtaattgaagaatttgcccgtgaatatttcaaaaaggcgcatgcaattgccgctcagattggttttgaaggctaccagtacgcaacctgcatcagcgtcaatgatgagatctgccacggtttcccccgcaagaagctgatttttaaggacaatgatctggtcaaggttgatacggtcgtgaacctggatggcgcctacagtgattcctgctggtcatacgcggttggcaaggccagtgatgaggtcaagcgcttgatggacgttacctacaagtcattatatctggggattgatcaatgtaaggtcggcaaccggattggggacattggtgcggccattcagcactacacggaagatgagaacggctatggcgatgtgcgcgaatttgtcggccacggtattggaccaacgatgcacgaagatccaatggtgccccactatggcaaggcaggacagggaacgcggctgcgcaatggaatgaccattaccgtagagcccatgatcaacactggtacctgggaagctgataccagtgatccaagcggctggctggctaaaacggcagatggtggactgagctgtcaatacgaacactcgctggtagttaccgacaaaggccctaagatcttgacttcccaagatccagaagccgatgccgcctacctgtatgatgacaactatgctgaatacttggcgcactatgctaagctggctaaagaagttgccaaaaagtacatgaaatagtccataagataattacgcgttactaaagacgtgatgccttggtttgctgccaagatccaccacgtcttttatttataacgggtgaacgcacgctcctcaagataagaggggcgtttttatttcgtgatataatgttttttgatattgcattgtcgctccgtgctgataatctgataaaattaaaaacattatttctgaataaggcaggttaaccatggacaaaaagccgaataaaattaaaaatttcgtgctgctttttattaagcatttcaccatggcacaggtttcagcgtcagcggcggtcttggcctactactcgctgctgtcggtttttccggcgatcatcgtggtcggtaacctgctgccaatgttggggctgaatgccaaaaccgtcttggactatctgcagacggcgattccagaatcagtgtatgactttttaagaccgatcatctatgacttcctgcagcatgggaacggtggcacgttgactttgggtgcgatcgtggcattatggtccaccagtttgggaatcgcggctttccagcgcagtgtcaatcatgcctatggggtcgcggaaaaccaaaatccgatcatcaaccgcgccgtgtcgtttctttggatgctggtcatcttgcttatcgtgacgacgctggtaattttatatgggcttggcgaacagaccttgagcagcctgcagccgatcttgggctttagtaccaaatacgtcacgttctttaggtcgatcaagtggccggttactttctgggcgctgtttgtgctcttaacgctgctgtactactttgttcccaatgctttggtcaaactgcgctacgtgattccgggcgccttgattgcagatcttttatggatgggactttcccgggtcttttcctattacacgatgatttttgcccataacattacgtcttataaaacgattggggcgtttatcgtgctgatgatctggctggatctgtccgggatggtgatcatgatcggggccaccatcaatgccacgctgcaggatgcccatgacggcgagatcaaggaaaagaagcatctttggcagtacgtgcgcaagatgcggcatcgcgagtttaacgaccgctaccattatgatgagcataaataaaagcaaaaacgccggcaggaaggacctgctggcgctttgaacagttggacttatatttggttaaagtgaggaagtttttaagaaatggcgaaaatttcaaaaattgaagcacaaaaacgtcctggccgctataatatctatcttgatggcaagtatgcgtttgccgtagctgaaagcgtcttgatcaagtatcggctcatgaaggggatggaactcgatcaagcacagctggcccagatttctaatgatgatgagattgccaagacctataataaaatgctggactatctggctcaccagttacgaacggaacatgacgtctatgagaagatgcgtcagctcaagaccccggctgaagatattgaaccggtgatgcaaaagctgcgcgggctccatcttttagatgatcacgagtacgcggccagctacatacgcacggtgatgaatactgaactgaaagggccccaggtgattcggcagaaactgcggcaaaagcagatcggtgaattggatattgacagtgccctggcgcagtttacccccgagcggcagttggagaacgcgaccaagctggccaaaaagctgtttaaacgctataacaagctgccggcgcgtcgccaggctgaaaaggtgcggcagggattggcagcgaatggctatgcggctgatctgttcaatgagatcaaggacactgtgacgccgcagcctgatcttgagcaggaagacgaactgttggccaaagaagcggcaaaggcttggcggcgctatgagaaacgcgcgccgacggattatgaaagacggcttaaagttaagcaggctctgtatcgaaaggggtttgacctggatgaggttgagcattggctgaatgagcatgagaactcttgagaccgatagtagttttaaaatgtctttttaaattcataatttactggtattatgtagaaagtattgttttgataaggaattgctttcaaaaatcttaactagagttttaagtgatattatgcaaaatcaaattgaagaaacagagtcaacggaaatcatggaaaaaagtcaaataaaaaaacaatcactgacctatcttttctttaagcgattgaccgacatcgttttgtcgctgctcgctttggtttgttttagtccagtgtttttaggcgtttggattgccaaccgctttggcgacaataagggaccgctgttttttaagcagacccgaatcggtaaaaacggcaagccttttaaaatgtacaagtttcgctcaatgatcgttaatgctgatgagatcctgcattccaacatcgagctttatgaaaaatacgttgaaaacaactataagctcgagccggatgaggacccacgcattaccaagctgggacgctggctgcggcggacttcgattgacgagatcccacagttcatcaacatcttaaagggtgacatgagcattgtcggaccacggccagtcgttaaagaagaactcaaggaatatggcgatcgcgtcgataagttcctgtcggtcaagccgggtgccatgggactttggcaggctagcggccgcagcaatatcggctatcccgagcgctgtgatctggaattaagctatgttgatcatgcgtcatattggtatgatgtaaagattatgtttaagaatattatcagcatctttaaaaatacgggtgcttactgagtcggagggaaagattagtgaacattaaagtcttagtagcggtgcacaaaaactacgcaatgcctagtgatccaatgtatctgccggtgtttgtcggcaaggatctgcatccagacgttaacgatactttccaaggcgacaatactggtgacaatatctctaagaagaacgcgcactataacgaactgaccgcgctttactggggctggaaaaacctgccagatgttgatgcactgggcctggttcactatcgtcgctacttctctttgcatcatgacaaggatttaagcaaggtcttgagtacggctgaagcggagaatctgttaaaggattatgacgttgttttgccaaagcagcgcaactactttattgagaccaacgaatcgcactacctgcacgttcatgaacatgagccgctggaagttacgcgcgaggttatcaacaaaaagtatcctgcctatgccaaatcatttgaaaccgtaatgaagcggaccaaggcacactatttcaacatgatgattatgaaaaaacagccgctcgatgagtactgcacttggctgtttgacgtcttaggcgaagtagaaaagcgtatcgactattccaattacacgccatatgagcagcgggtctttggatttttgagtgaattgctgttggacacctggctgggatgtcatccagagtatcggacggttgacattaactatgtctttatggaaaagcagaactggctgctaaaaggcggtaagttcttaaaacgtaaaatcatgggacacggtgaacactaatacttttaaggagagaatagatgtctgatctgtcgttaagaatgaaacaggcttggcaaacacgattagatggagaaatactttacttttttgcgtttgtattgtattttttcttctcttttattcgtaatacaacttttaatccatatattggggcccgtccatttaatttagtttcatatatggtagttggattgctagtcataaaaatatatatttttgataggcaacaattaaaatcagtatttctaacgacaattggattggtaatagcagtagtgtcttggcgtatgtcaggatcaaatttaattattgttatgatggcttttattttgggagctcgtaacatatcttttaaaaaagttatcaagtggtatttttggttaggcactgtaatgctattcatggtcatgttcttttcactgaccggtgtaattcaaaatatggtttttgttgctaaagggcgagtaccacgttatgccttaggaataatctatcctactgattttgcagcacatgttttgtatttagttcttgcgcattcatatttgaattataaatcgcttaatgttaggtactatattacctattttattgttgcatcgataactatgctagttactaatgcccgtttgagttttatttgcttgctcttgactataccagttttgtggattgctaagcatgctgagttggagcatcgtccagtagcaaaattagttgcttcattgtattggaccagcacgcctttattagcagttataaccttttttgctacttacctttttgataatactaatcatatattttacatgatagaccacctattgtctggaagactctcatatggaaatatgtctttatggagatatccgataacattttggggacaaaaggttattgagcatggtcatggtggaagtgctggaatgaaggtttttaatcaacatgatgcaggatatttttatattgattcctcatatatgcgtttgattatgatttacggactagttgtcgcagttataatggtgggaatatttatggccatatctattcgtgaaacgtcagctaaaaggtatgtaattccagctattttatttattgtgtccattagctgtatggttgaacagcatctattagaattaacatataatccatttttattagcgctttttgctgaggtgggaactaacaaggcattggaggaaaaaactattgaaaagcaaaaattatagcatgcaggatttgtcaaaaatcattgtcaaaaatttattggtaattattatttttacaatcttaggtggtgggacctttggcttattagccaaacataagcgttcaacaacttatactgctgaaagaagcattgttattagtcacaatttcagtaattctaataaaaaaaatgatgtagttaatgctgacttatccatgacttctacatattctgatatgataagtggacgtgagattactaataaagcttatgaattgctacctaaaaagatgcacaagaaatatactgaaaatcaggtggcggcagcagtaagtg

SEQ ID NO: 1876 - DNA, 2321 bp, Unknown
  gut microbiota DNA sequence
cgggtaatgacctttgtagggtcaatcataaggctcgctgatttcatgttgactgctaactgaattggcgtatcgttcttatgatcgttgccaatgtcagttacataatcaagcatgttcgggccgtcctgcttgtactcagtaaccagataaccgcccagctcgttaatcagtttgtctttaattgcgtcccgtgttttcgggtagtcgatttgccgataagcatcatctttgttgttagtaacgttacagttacgcagcttgaattgcttatactgtggcacttggctgttgtgaacatcaagcagcgattgcagaaactctttcggggttagtccaaccgcttcatagaaccgctgaacgctatcaagtaggtatgcttcaatatcttcgaacgtgtacgtcctgataaagcgcccgcttgtttgcatttcctttttcggcttgattgcccgaccacgaaacagcagtttatcgtcatcgtagacttcaacgtgcgtgtgcattggtcgaacgttgtcaaacagcaagctatcgcggttgaccgttaactccagatcatcaatatcggtttctttgatcgtcaacttgccttcactgaccgttcgattaacgcgttggtcaagcacgataaagccgttcttgtcggtaggttcgttatatccgataatgcgatacattaaaccatctcctcacgtttgaaaacaaactcgattgtgccattgccagacaagttaattttgttatcgccaatgtcaagcactacttgcgtttgcttgtagttgccatcgttaagcgatacttcgccgaaacttccttttactttgatgttccctgttaccacgaatgacgatagaaccggccgtgagccaatgtttttaacattgacgtcctgacttccgttaacgctgaacttgacttgttgccatagccaatgcggaaagaaaacatcgtcccaataatcagcgccttcattgtggttagtgtaagcataaggataagcagtgaacacgattgacgcttcaagcgtttcgttgtcgctgctatcgtcaacttcaacactcttacacttggcccaccagtaataaactggttcgtgagtatcaaccaacttgccccagttgtggggcattagttgccgttttaactcttgctcaaagcctttgcggttgtgatactcttcgccgacatataacagcttgtaggtgatttctcgattgttgaaaaaccgttcgttatcaatcatcgagaaatcgtagctaccttgacgatatggcacgctctcagtgatttcttgctcttctggcgctggtgccgttcgctcggtcaaccaccaaccggatttaatactatcgaaatcagcgaaagcaaaaccttcaacgtttggcaacgtgtcaacgtcaacttcggttggcggtaaatctctgaatatatactccattaactccacctatcctttaatgccgttcgctgtcctaaacgttgatcatagctgccagccgttgcaccgacaagcacgccagaatcaagaatcattgttgtatctttgcccgcaatttgacgcaataaagcgttgttctgcatctgcaaggtgctgtcttgcatagtcagcgaaccggcgaatcgtgattgtacatcgctcgccattccgttcaagcggttagcaaaaccagaaacatcaggctgcattgcgtcggctatttgtttgttcatcgccaaaacagacttctgaacatcgctaaaaccatcaactaacccgttgcccagaccgttcatgattgcatgcccggccggaatcagcaaacgccggtcaacactgataggccctttgtgggctttaatccacttgccaatgccaccgacaaatgacttaacactttcccaagccgatttaagaccgccaagcaaactgttcatgattgccttaccgttagccgataaatcaatatgagcaaccgaattaatgatttcgcgtccaacctgtgccattgcgctgcctaagctgccaatcatttgcagaataccttttatcaaagcagctataatttgtacccctgctgctataatctgcggtaagttgctaatgatagcttctgctaatacaacgataattcgtaacgcactaaccacaagcaatggcagcacttgtgcaataccattaattaacgctgtaagaatctctaccccagcttcaatgatttgtggcaaattgctaataatggcgttagcaagtgccatgatgatttgcacgccggctgtaatcagcattggcaataccgtaacaatggcattgacaagcgccaagataatctgcacaccgg

SEQ ID NO: 1877 - DNA, 1313 bp, Unknown
  gut microbiota DNA sequence
cccaggttgccatagggacgatatattaaacaatcgtcttgaaaggatttcatttccaacaaatttgaaagaccatcggaacaaaaggttctatgccatctctggcacaataccaatataccactttatcaagtgttgtttaatcccctcttagtaccccatttggtactaccttatataccactttttaatccgttgctttcttcaagattgtaaacgtaggaaacaactcttcaacttggtactttgcaatggctgtttcgattgtttccgaaaactcatagcatgcgaacttctctgacttgtgccagctcttgttgctactgatatgcagcagctctttgacgtcttcgacttgttcccgcttgacgaaccggtttttcagaataacacggctttcttcgctcaaacaattgttgattgcgtcatacactgcgtttaacgcacgtgaatactccgtgtgatcgataaaagcatcttcgttgtgatttccaccactaccaccgaaaccgccgtcagcagacaatgacgggcttttaatattgcctgaccctgctttgcgtaaaatatggctaaatgtccgcttgttaaatccatcatcgaaaaagaaatcacgcaccgcttggcgggttgcctgctcatcgatttcgtcaaataattctgcttgtttaactgccatgccctaacccctttcgacttcatagcgtcccagatacggcttttcttgccggcgtttcaaatagttatgcagcgcatgggttttaaagcctaatgcccgttctgctgcttgaatgctgtcataatgcatgactttacctagctttaaatctttaatggtgatttccacgccaggccttttaaatgacggcaacttttggtgcataacctttaacgcaccgtttcttcgtacgtggtaaagatagctgcttctagaaatcggcacgttctcgataacccaatgccagcttttcccttgttctagtgcttccttttgttttgtgtaaatctcggcttcaatggcaaagttgtcaacgctttgtccaggtttgtgatagcttgctcgcatttccttgatcatcgcttgcagcttcttgtactttgctgttgccgtttcaccgtctgggcaaccatcatcgtccagaaagtcatactccagatataaatcggggtacgttgttcgataccagttctccaactggcaaaactcttgcatatcaatcatctaaccacctaccactttcataaccgccaatgctatcaatacccagaacaccatgcatgtaataataaccaagcccaacccgttccagttt

SEQ ID NO: 1878 - DNA, 12058 bp, Unknown
  gut microbiota DNA sequence
acttagagggcattatagccacttttcgtaatctaggtacacttttttattgcacttttaaaaaagatattgaaagatggcgtttatgatactttagtaggttaagcatgggctagagtggtaataaataattgttctgaactttaattaattaaagttctatttggtgaaagtaggttcaatatgtttccctttttaaagctttagtcttctgattgcacaatatatttgaaaatttcacgattaagaaaagacgaagaatggattgatttttcgtttgaattaagatctgaagagttactggtgagttctagaaagacattgttatattattccgagccgaatatcttattatctattgttgatagtttcttagatgagcataattcagatgagtacgaattgatagatgatccaacggtggagttcgtgtttgacagcagtaaattaaaaatgatctctatatagaggttacggcttagaggatcatgaagcgtattacatggatatgaatcaagtgaaatatctggataaatatcttaagctttacaataacaaactagataagagttctaaagatattcaagaattgtataatcaaggaatactacagggtgactaatcttaaaagatatgaaatcgttaataacaacagctcctaccccaaaacgactgaggataggagctgctattttgttaaattaagtgattgattcttataaactagcagtgcaactgaagatacacaaggggaaattgacatgactattaaagttcgtagagtaggtaattcagtgatgttgaacattcctaagtcgttcaacgttgctccaggtgctaagtttaaggctgaactaaaagacgatggctcaatcgtttaccgtccggaacaccgaaatccctttgaagggcattggtttaaggaagacttgcaccaaacagacgtgatgaatgattgcgaggtactggatagtgagtgggattagaacggattattttccccgtaaaggtgatattgtcgccattgattttaatctcagttcgggaagtgagattcgtaagcggcgctctgctttagtaatcagtaattcacggtactcagctttaacaggattagcagtagtttgtcccatcactcatgcgcaaaataatcgtttaaggaaaacagaactgttcgtaggagttaagaacgatcatgttgatggggtagtgaacccgttgcaatttcatactttcgactaccaaacctgctcaatgtgatacctaacaaaaattgataatattgcactacgtcaagtcttacaagttgtacgtgatgtgattgatgctaaagaggagtagaaactatatcttatgtcaagggcaattaaaaattgtacagaaatgacaatttgaaaatgtacaaatatgaagttcgttcagtataatctatctggaaaagttgttgagcaatattcttgtgactttgatcagttaaaggctaatccgattggcgaaaaagttagagtaacaatggacgatggtaaaataagcgttggattttgggatacttttcttgggcagggtaaagttcaaatagccgaaattagtcggtatgatttagatgaaaaaactgattgatcactatctagccgacaataccatcatgtttttcgataagctgactgatcgtgtaaccatcagcagcatgaatcattttcaggtttacttcatggacgatggcgaccgcttttatgactttgcggaaggcaatctgattcgcacgcgggcattgaacaagaaagtcaattgctactatttaatggggatgacgattgatggcaaaaagacctacatatatcctgccgaaaaatttgcggaattactgaaagccagatacagctgattttgccagtcaaaaggagggcgcggcatgaacttctactttcttttattcgataaatttgaaactttggatctctttggaccggttgaaatctttggaagaattcccgatgcacggcttaactatatctcaacgaagggcgggatcattaccagcgcacagggcactcagattttgacgcaaaaagcacccaaactgccagatgacgcggtactggtggttcctggcggtcggggcacgcggccattggtgaaagatgctgattttttagtgggattaaaggaccttgtcgattcagctgccaatgttttgtcaatctgcacgggatcggcattgttggctgcggccggggttttggtaaatgttaaggcgacatccaacaagtatgcttttgaatgggtaacgagtacgggggatgtagtctggattagaaaagcacgctgggttcatgatggccgtttttacacgtcatcgggagtttcagcgggaattgacatggcactgggattcgttgccgaacattacggtctggatgttgctaaagccaatgcacaaaaggccggatatatttggaatgaagattcagaagttgatccgtttacttaaaattttaaaatgaaatcttttttcgttatactataaacaataatagtcaccggaggatagtgtgccgcagcacaggggatcgcggttatctgcaggccgcctatcagataaggtgtcgggtgagcccggttagatgttttggcatcgtcgggcttttttagtaccggcattgatttaaggaggcttttaattatggtagaactgattttgctgcagccagaggatcgtgaacgatttatcaaagacaatcaatgggcctttagatatggcgcgttggcagaatttggcaagcgcaatgaccaatttgaagagggcaacgagataatcgcgcgccaaatgattgagaactgtattgatcaaggcacggcctatcgtatctggcaaaatggtcaaaaagcaggcggggccgttgtaaatattaaaggcgatcatggcagtctggagctgctgtttgtcaatccaaccatgcatagtcatgagattggtaaagctgcctggcgagcgattgagcagatgtatccaaaagtcaaagtctgggaaacgatcacgccttattttgaaacgcgcaacatccatttttacgttaacaagtgcggctttaagatcgttgagttctataatccgcgtcatcctgatcccagctggtcggctgctgatgatcaagtcggttggctggattttcgctttgaaaaaagaatggaataggcgttatcattaattaattcctaaatacgactatttatttaaaggatgatgaaatggcttctttattattaggtataatttatttgatctttgtcagtctgggactgcctgattcgctgttgggatcggggtggccacagatgcaggctgcatttaacgttccttcatcatatgccggctacgtctcaatgacgatcgcttttatgaccatcatttcggcattgatgagtcctaaactgattcagagatttcataccagctggatcgttgtgtgctcgattctgctgacgattgtggggctgtttggcttttcgctttgtactgagtattggatgctgctgattttcgcgattccctatggcctaggggctggcgcaattgatgccgcgatgaatcattatgtcgccagttattattcaggtgccgtgatgaattttttgcactgtttttatggacttggggccgtgatcagtccatatatcatggcattggctctaaagacggcgcgttggaatgagggctatcgctggacggcttttttgcagacggggattttgctggtcgtattgtgttcattgccactctggcatcaaaacgagcagcccgatgaaaagcaagccaaggcggccggtgcgggaatcaaagaagcaatcagacagcggggcgtgattacgacgctgttggccttttttgcctactgtgctggagaggccacttgttttctatggacgccaagttactttgccgggacgagaaacggtttgagcgaggagacgattgcctcatttggctcgctgatctttgggggactaatgctgggacgcttgttggcgggaatggctgccaaccgctttggtgatcgcttgatgatcagaatcggtgcggcggttgagctggttggcgttgtgctggttatgctgccgactgctggctaccagattgcagtagttggctttgtcgttatcggtacggggatgggaccaatctattcatcgattcagcacatggcacctgctaactttggccagcgctacagtgccgccgtaattggtctgcagatggcggcagcctatactggcaccacttttatgccgacaatttttggccttttgcagcagcaattcggcatttggatcatgccatactatctgctggtgtttgcggtgcttaatatcggccttttggagctgacgtatcaaaagcttcgcaatcaaattcggtgagcatcataagttcgatgaatcaatctgtttaatgcagttacgaaattggactggttggagtagactgtgaatcaatcgctaggtgatgaactgttgaaaagatcagccgtttctgcttcggcgtcaacttaatcggttatgaggtgatctagatgaaaatattgcatattggcaagcagggaaatctacagcggttcgcagctgctgacggctttttgaattcgttggacttggttgatctaaaaccagatctgccagttgaagaatatcttagccaagctggcgacgcggactttatcattgttgatgccattacggcgatcccgggcgaattgattcggcaaatgcccaatctgttggcaatccattctgaaggcgttgcttttaatgcaattgatctaaaagctgcagatgaatgtggtgtctatgtctgcaacgcgcagggcatgaatgcaatggcagtagctgagcagacgattttattgatggtcgggatgctgcgcaatgttgtcgtaaatgatgcggcagtaagagctggtcatcagattgaagccaagggagcctatatccaaaatgccaacctgcttgaactggctgactgcagcgtggggctgattggctttggtgatattgcccggcaaactgctcgcttgttaaaagcctaccaggttaagaatatttactactacaagcgtcatcgactggatccagcacaagagcagcaatatggcgtacagtattgtgaattggatgacttattggcacagagtcggatcgtcagtctgcatttgccagtaaccaaagcaacgcggcatatggcagatcagaccttttttgccaaaatgcagccaggtagctacctggttaatacggcccgtggcgaactggttgatgatgcggcactgattgaagtgctcaagtctggacatttagcgatggctggtcttgatacgctggatcatgagccggtcttaaaagatcatccgctgttgaatcagccgcgatcgattgccagtcgcctgctgcttagtccgcatatcggcggcattaccgcagccagtttttatcgcggctatgccatgattgatgaggatctgtggctggctgctcaaggtcaagagcctaagcgcgtcgtcaatcatccccagattcctaaagcagattaagccgcttaacaagattacagatttcaacctaaagcgctgcgctggcctaaagtcagagtggcgttttattacattgacgacctactcaaaatggctgctgtcggtggtggttgacttaggcaacagctcaagaatcttttatttaccattgacttatagttaactttaagtagtagggttagtcataaaggaggattcggaatgtctgatatgacgatcactgaagtaagtcggaagtatcatatcaatgcggcgacgcttcgctattacgaacagattggcctgcttcccaaggtgccgcggcgtgcaaatggcaatcgctactatgatgatcacttgcagtcttggcttgagatgatcatctgtttgcggcattcaggcgtgccagtggaagaattggtaaaatatgcccagttgcttgagcaaggcgattcaacgcttgaggccagagaacagctgttgaaagaacagttagccatgttgatccaaaaacgcaaaaatcttgatcgctcaattgaacgtttgcagcataaaatctcgctttacgaaaatggtgagatcaagcagaatcgatcttattttgaagagtatgacattttagacgattaaggaagcgtgcgatatgaaaacaataattaatctttttcatcctaattttaaacagtcgcgggttaataaagggttggctgaccaagttaaaggcgagtttgaggtacgcaatctagctaagctgtatcccgattttatgatcgacgtaaaaaaagagcaacaggtactggaaaaagcggatcgggtcgttttacagtttcctatgcaatggtattcgtcaccagcgttgctgaaacagtgggaagatcaagtgctgacctatggctgggcgtatggaaacaagggaacggcactgcatggcaaagagctgctgatcgccgttacggtaggggccgacaactatgggcatgatgattttgtcggttacacgattgatgagctgctgcgaccattgcaggcaaccagtcatttgattggaatgcgttatttaaagccgtttgcggtcatgggcgcttcttcaatcagtgatgagaatctgcaaaaagcagctgaagaatatgagcaatatctccaaaaagacgtagcgacgcttggcacttttgaatagtttaacggagggatggttatggaatatacgaaacttggcaaaacggatattgaaatctctcggctttgcgttggctgtatgagttttggcaaaccaggaaccatgcatgactggacactggatgctgctgacaccgaaaaagtggtcagacatgccctttcgctgggaatcaacttttttgacacagcgaacggttattctaaaggtaccagtgaagaatacctgggccaagcgcttaggaaaaacgtagctcgtgatcaagtcgtaatcgcatcaaaagtgtactttaatcctggacgtctttcttcaaccgcgattcatcgtgaaattgacggtacgctccagcggttgggtactgattatctggacttatatattattcaccgttttgattacgagacgccgattgaagaaacgatggcggcattaaatgatctggttaaggctggcaaggtacgggcaattggggcatcggctatgtatggctatcaattctacaacatgcagctcgcagctcgcgatcatggttgggcaagctttcaggcaatggaaaatcactataatctgctttatcgtgaggacgagcgggaattgattccgatctgccggcaaatgggtgtctcattgattccatacagtcctttagcaggtgggcatctgacgcacccatactggcattcagatacgctgcgcagccgaacggatcgagttttagcaggtaaatatgatcgagcgcaggaaaacgatatgcagattgtcaagcgagttcaaaaattggctgagcgctatcacgttaagatgcagcaagtcgcattggcctggcaatgggcgaaaggagttgcggcgccgatcgttggtgcaacgaaggcatcctatcttgacgatgccgcagcggcacttgatctgcaactgaccaaacaggatatagcctatctggaagctccttatcaaccgcatgcaattgtaggcgcaattaaccataatccagatcaaggaacggtcttgatcgatgaaaagaaagatgccaattaagaagttaatgaaacaaaccttggcattatcatatgtccaaaaattaatagcgttatcgtaagttccttaaaaacttgagataacgctatttttaaaattttctatagtaaaaagatgtttaatagctaagtttaagattgaccacagctttcatgattgtaaacttgatgttttcctgcaacttgctaaggattccttggtgtgctggcttaaattgattgggaatatatacgatccgttgtttggtattttgccagttgtcttgattaaagtcggttaattggcattttaagggatgaacattgaacttgccatctgcgactaattgagctaataaaaacagttctttaccgaaaacagctactggaatgctgccaataccgctccccaagagacgaagattgtttgatcgtaatgcatcagctggcagttcaatgctttttccagcaatgctgccgatttgcacccattctaacaatgctgccggattgctgtgtagactaagcagttctttaagcattgtttgagctggtattccccaaaggtagtcaagcacgacatcgattgcgccaaccgtttttaattgcgctgccaaattatcatttaattggatgtaattatcggcaggcagtgattgaagaatttcttgattccttccagctgcgataactttgcgtgcaccaagataacgggcgatttcaacggcgagacgaccggcatagcctgttgccccaagcactaatacggttttattcttaacgccagccgataattgctgacgagttgccatccatgaagataaagccgggttcattgaggcggcgatttcagctggatcaatattttgtggtaaaggtagcaggcgttttttagaaaccggtacttgttgagcaatcgcaccgtatttttcatttgaaatcaaaaagtagtaatttttgccatactgatcgcgaccaacaccatccagtcctggtataagcggcaaaacggccggattagctgaatagtgactgccattggcacgagaacgagttacattgttgacgctggcagctaagacatcaagtaacacttcatcatttaatggggtagggatatcaatgttttttaagactggttctttttgaaagttttcaacgacaaccgccatcatttttttggacataatcataacttcctttctttttattaccggtaatttattttataattatacaaatgaatgattagttgtcaatatttattaccagtaattcattttgaaaggacccgaaatatgaacgagattgaagaacttcaaaaaacggtgcgtgagtttgaccgtcatgctgagctgttgcgtcatcagatgctagataagattattgctggtgagattggtaagttttcatcagaacaggcgcgtcgtttaaccaaacaccatttctcacattcggaaatgcagcttttatcatatattgaaaatgcaggagctgaaacggcttatcagcaacttacccaagacttggagatatcgcaaggaatgatttcgcgctatgttaaacgcttagccgagttaggactattggatcgttatcataagccggacgataaaaaagctatctatctgcgcattacgtctgtcggcagcaaggttgccaaacttcataaaatgatgcatgaggcagaatataatcactatgcagaaattatggctgagctgccagctgaatctataaaaaatacgattgcggttttaaaaagactaatgcattaaaaccgtaatcgtattgataattttattcagagtcggcaaggttctggattgatatgcctaatcagaatgactgtgagtacgccttgaaattattgaatgggggcagctgccagaaagcggctgatcttttgggcagccacgggagcgtattggaagattgagccatggcctgagtcgggaaaaatcagtaactgactgtttttgatttgatcatgaatttgatagctattaggtgttggcaccattgtatcgtgatcgccattgatgattagcgttggcatggttaaatagcttaaatcatcagccggagcagttccccattttttaatggcccgcaactgacgtaaaaatgcgccaacttttattttttcatctgcaaaggcaggcgttctttgaccaatgcggccgagtacttgcttggctttttgagcaccttgttggtcatgaggatagaaaagatatcgtttaggattggtgtgtttgaaaaaggatttaatcattgtagtaaaagtgattgttgaaacccgtgcgattccttgaccgccacgtggaccagtaccagctaaaactaggcggttgatcaattctggctttttttcggcaactgcttgggcaatcatgccgcccattgacaatctaagcagattgatttttgaaaagccaagcagctgtacgaattcaataacctggcttgccatctcttcaatcgttagcggcacttgaccgcgactggcgccgacaccaggcaggtcaaccgcaatgacgtgattttgccctgccagctgatcgataaaaagcggatcccaatcgtcaagtgtggccgaaaggtgcgtcagcatgattaatggcagaccatcatgatcagttcccaattcacggtaggcaaactggccgataaatttattatgagtagttaagtatgaagtcattttaatccttaaaagtaataacggtttttcctttcgcatgtccttggtcgactttttgcaaggcctcgttaagctggctgaatggatagatctgttcaatgcttggatgcaattgctgttttgcaaaaatatcagctgcctgctgcagttgctgaccattctcatggacaaaaatgaaataatatttttgctgacggcgcgctgccaatctatctaattgcttaccggccaggctgaagataattcgcttgaagaatggcagctgcatgcgtttggcaaagtcactattcggcattccttttaaagaaaccaatttgccgccatctttaagaatctgcagctgtttagccgtttccttgccacccagcgtgtcgattacatagtcaatgtttttaagtttttgggcatagtcgtcttttcgatagtcgataaattcatcggcacccaaggctaagactcgttcagcattacggccattgccattagtgatcacgtaaagccccatcgctttggccagtggaattgccatcgcgccaaaaccacctgtgccgccggaaatgaaaagctttttgccaggttgaacatccatcagttcgaaagcctgcatcgcggttaaggccgtcaatggaatggccgctgcttcctcattggaaagataggcgggaactttggcaatcgcgtggctatcgattgcaacaaactgggcaaacgcgccgggatgtatgagcggcaggcgggcaaagacccgatcgccttttttaaaaccgctgacgttggcccctaaagctacgatttcgcccacgatctcattgccagccacaattggcagctggtagggaatgatcagtttgacttcgcctctagtaatcatgttgtcaacgggattgacaccggccgccagcgacttgaccaagacttgatctgcattgatggttggcattgggacatcgataattgataaagcgacatcatgtttatggtactgattaagaatggctgcttgcatttttttcctcgcttgcttgttgtttaaggttatcgataatattactgagtgtctgttgggataattcatttgccaggtcagcctcaatattttgaaaggctggacttagcgcgccttgaatatagcggccaacggggcaggcagcattaggattttggtgaatgttgaaaaggtgtacctgtggggtttcttgaacggctaggtaaacgtcaagcaatgagatttggtcttggggcttaacgagaaaatagcctggcttgccttgatgggtctcaatcaagttggcattttttaagagactgatgatcttgcgaatatagctggcgttggtaccgacactgatagctagatctttggaagaaagcgtccgctcagattcggcaatcatcaccagaatatgtaaggcaacggaaaatttggtatccatggttccctcctttttgtacttgtatctaatacaaatacaagattactaaaaagttttttgacagtcaacaattttgctgctgccgggtagcgtctctaccaaaattgaacaataagttttacctaataattacgagaactgtaaagagtcgttgcattgtttttttt

SEQ ID NO: 1879 - DNA, 12311 bp, Unknown
  gut microbiota DNA sequence
gatagtcagtaaacgctctaagtaatgttaataatttatatcagcaatcttttcaaagttttttggcagccggtctttatggtcagccctcgatgttaagataagcttaagaagtaaaaaaggagttgatcaattatgccatggcttaagttgaatgctggcagtattgtgtttgatataaatatgaaagactgcaatgcgaccgaattaatccaactcaaaatcaaaggtgcaggcattaatatcaaccaaaaaaatcgagaagtgcctaaagaagaaatgatctacttggcatgcgcattgaaaaaatgtctttcacaaaccaactatcactggcaacatggcgattcagttaatggtcactatggtatttttctggaaagtgaggaaggagataagtatagtgaatttatttactacctggaagctcactcggccagccgcgtcgtaattgattttaatgagcaaaatatgcgcttcttaatggaatatattgaaatggtattaggtaagattgattttgatggcgagcttgcccaacagctgtattctagtggtaatttatattaataatgttttcatgtatctaagtcgtcgagtttttcggatgcagttcattctgatcgttgactgggtaaagcagagctggtattgatcagcactgcgattgggatttgccaagttaaaaattgaatcacgatgccaaattaaaaccccggccagcgttaagctgagcaggggtttatcagttaattcgaatggtgtctgaaaagtaaatcaatttaaatgacgccggtcgggaaaactcgccagttagtcttcatcgctggccttgtcgacggcatcaatcacgccataacgaaaaccgtgcttttccagggcagccagtccccgaatcgtcgtgccggcaggagaggcgacttgatcacgcagagcggctggtgattgtcgcgtttcataagcgagggcgcctgaacccttaaccatgctggcgatcaaacggtaggcagtctggcgattcaatccgtgctttacggctgcatcgctcatggcatccataaagacatcgacgaatgctggaccacagccgccaatcacgcccacgatatccaactgttcttcaggcaccagaaccacgtcgccaaggtcattcagcagttgaacgatggtatctttgatggtcttgtcaaacgttggattcaatgacaggccaatcgtaccggcatttacagaaaccggtgtattgggaatcattgttgcgactggattattgatcagagctttttgcagatcgatgcgcttaacgccagcggctgcagagataacaatcgtatgaggatccagggcctgcagctgttcagccacggttacggtcacaggagccggggtcgttaagataacgacatcgggctgcagctcgaccaagctttgcggatcaaaaaccagcttaaacttatattcatgggccagcttttcaacgcgtggatttttggggttcaaagcgatcagatcgtacttggtcaggttgttcaatccctgcataatggcgccgcccatgctgccaacgccgacaatagcaactttcataatcaatgcttcctttcgtttagtgctgttttaattataacaaaacctattggatcagattgacgtaagagccgttgataaagccaagatcttttgcttgataccaaacgacgccattattgtcattgagcttgccgataatgtctaaccgctcgccgtcaatcaccttgccgatggtttgcccatacggctgatcgtagacgtccagtttctttccctgtacatagtcaacgacggctttgagatgattcagcggcaagattgccagctgagtgccaggttttggtgccagggagtcgtcgttaggcagctccttgaagtccttcatggtattgctgtcgtatttcagccagcgatccgcattcacctcataccagaactcgcctttttgggtggcaatgcgctggaacgtcttgacgaaaattccgccgggcagcggcgtatcgaccggcatgccatcaacgtcgtcaaacagctgcgttggcgttgataattttagatacatagccacggtttgaacctcgccccatgaattgcgacgatagtacaggtgaacgctgtgtggctgcatatcaaagctgccgttcaattgaccatcggctttaatgaatcggtagttgggaaactttaactcgacaatatgaaaaggcgtaccaacaaagccccgcagcagctgcggaacgcgcagattggcaccagtatcgatatcggtatagtagacccagattgggtttccggttttaaatgaatcagccataaaaatcgctccataactctaaacgcttgttaatcacattataacgctttcgaacgctaaaaggtcttgaattatcgagcaaaattactaattcgcgtctaaaattcaaagcatgttataattgactggatatttaggcatagtgcgagaaaggggatatcaatgacaagtgcttcggtgagaacaaaacgcttaacggctcagacactgctgttggcgattttgatactgcaggattttattccagcgctagggaacattccaattggtccattgtcgctgacgacgctgcagattacggtaatgattggcgcggtagttatggggccaaacacgggaatgcttttgggcggtacctggggtgtgattacctggcttagagctttcttttatcccagcagtccactggcgccactgatctttaccaatccgctgatcgcaatcgttccacggctgctggtcggtttggtggccggctatctgtttttgtggctgcgcaaggtaatgaagcagcgctgggcattgacgatcgtgggggcggccggtgccatgaccaatacgctgctggttttgggcggtatctatctgttcgcgcatacgccagcagttgctaagggctaccataccgatgttgctcatttagggacggtcttggggacggttttggcaacgaatggcctggcagaaatggttttgtcgatgattctggtgccggcaatcgccattccgctgctgcgctatacgcatttcaatgatcaaaaatagacaaaaaggcgcgactgccaggctcataagcttgacagcgcgccttttatattcagactaaacagacttttttgagttactcagcgtcggaatcgtctttggctgcatcggttacgctgggagtctgcgtgttggttggaactggcgtatcagcggccacgacttcgatcttgccgtcgccatcgagcttggcagccagcttgttgacttgatcatggtccaaaacgtaatcagcgatgcggtcttcaatctgttcttcaatgacccggcgtaatggacgtgcccccatcttaggatcgtagcccaggtcaaccagtttttctttaacgtcggttggaacttcgatgtgcaggttcttgtcggccagcatggcattgacgtcatcgagcatcagtgaaacgatcttcatcaaatcaggcttggtcaatgggttgaactgaacgatggcatcgaaacggttcaagaattcaggcttgaagtagtcggtcagcttgtcgataatcgagtgcgttgagccgcttgcttctgggccaaaaccgatcgaagcctcggagtcgccagtaccggcattggaagtcatgatgatgatggtgtccttaaatgaaaccgtgcgtccttgcgagtcagtcaagcggccatcgtccagaatctgcaagaacatgtgcattacgtcagggtgcgctttttcaacctcatccagcagaatcaggctgtaagggtggcgccgaacctgttccgtcagttgaccagcttcctcgtagccgacatagcctggggcggccccgatcaatttggaagtcgaggtcttatccatgtattcggacatatcgaatcgaatcatggcatctttggaaccaaacagcagtttagccagctgcttagccatttccgtcttaccaacccctgtcggccccacgaacaggaaactgccgattgggcggccagacttgttaagcccgatccgattacgccgaattgcccgagcaaccttgtcaatggcctcgttttgaccaatcacgtgcttttcgagctgcttgtcgagatcacgcagcttgttttcttcttgtttttgcaagtcgccaaccgggatgtgcgtcttttcttcgacgatcttttccatgtcttgaacggttaccgttgcggcttggtcagtatgattttcttcggcatcctgcttagccttggtcagcttggaaacttgatcgcggtagtaggcggccttttcataatcttggctttcaacggcctgctgcttgtgagcctcggccgtgtgaatctgattttcgatcgttgccgggtcggcggtcttcaaggtcaggttcttgcgggatccggcttcgtccagcaggtcaatcgccttgtcgggcaggaaccgatcttgaatatagcgatcggacaacttagccgcggcttggatggcatcatcggtgtacttgacgtggtggaagtcttcatagcggcccttgatgccgtttaaaattttgatcgtttcttcaacggatggctcattgacctcaactggctggaaccgccgagccaacgccgcgtccttttcaatcttgcggtattcgttcatggtcgtggcaccaatcagctgcagatcgccacgggccagggccggctttaagatgttgcctgcgtccatgccgccttcagcattgccggcacccatgatttcgtgaatctcatcaataaacaggatgatgttcttattcttctgaacttccttcattaactgctgcatccgctgttcgaactgaccacgaatgccagttccttgaaccagggaaacaacgtctaagcggatgatttctttagaagcgatcttttccggaacctgaccagaaacgattgcctgggcaagaccttcaacgactgcagttttaccaaccccggcttcaccgatcaaaactgggttgttcttagtccgccgattaagaatctcgattacacgcgcgatctcatcgtcacgaccgattacgggatcgatcttgccttggcgggccaggtcggtcatgttgacgccgtattgccccaacagacctttgttacgcttgccgccgccattgctgctggattgagcattaaagttggcgctgccttggttgttggcgtcttggccctgcatgttgttcatggcattcataaaatcttcgagactgccgaagccaaagttgttgttcattccattacccccattcatcaggttcatttgtgcctgctgcatgttttggtagcagttttggcacaggtcaatctgcatgcgttgaccgttaaaattcatttgtaggtgaatcgttgcgggattttgatggcatacttgacaaagcatttatttttaccccctcagaagtcaaaaatatatttgaccttttttgaccataatgcaattatacttacttttagtaatatatcaagcagtttattcgataaaagtcaaattaatcaatgcttgatacaatgcgctttatcaacaaaggtcaaaaagcagataaactttctacctttgattttagcactggttgaattagaatgctaaaaaccccgccattttaaaaaatcagttataatataaataggtgaagagcaatcaagaaaagaggtggggaattcgtggctgccaaagattaccgtcaactgcttgaagatctgcgcgccggtaagattgaggaatttgtcgtgacgcccgcagaatttatggacttccaaccgatttatcatgattatgagtatcgaacccagattgaagggaaagccgaacggggcggagaattgcactatcatttgataaaacgagattaaatccgcattttggcgtcatttgccaagaaatcgtcttgtatttaccgcttacaattgctacaatggtgatattgaaagcgttggttgccaattgccaatgcccaacaaagccttaaggagaatgattacaatggaaaaacgcgattttacgattactgctgaaactggtatccatgctcgtccagctacgattctggtacaaactgcatccaagtacacttctgacgtatctctgtcatacaacggcaagagcgttaacttgaagtccatcatgggtgttatgagcctgggtgttggtcaaaacgctaacgttacgattactgcagaaggcgatgacgaaaaggaagctatcgaagccatcgctgaaacgatgaagaaagaaggcttggcggactaatatgtcaagacagctcaatggcatcgcggctggtggtgggattgccatcgcgccggcctatttgctgggagttcctgacctatccgttaagcagcaacataccgataatgtgaatcatgaagtcgcccggcttcatgattcttttgctattacggccaatgagctgcgggagatttgtcagcgagcccatgctcaactcaacaaacaggcggcggtggtcgtcgatatgcagctgcagctggtactggctgatgattttcaacagaccattgagcaccagatcgttgccaataaatatacggcgggctatgcggtcaaaaaagaaaccgatcgctggctagccgaaaatgcatcttctgaacagggcctgcatcaaagaagaatcgccatgcaggacctttttaagcgtttaatgagtcatatcttggggatcgagctgccggatccaagccggctcaaacatcaggcgattatcgtcgctcacagcctgacgccgaccgatattgcccgctttgaccggcgctatgtcgtagggatcgtctctgatctaggcggcagcacctcgcatttttccatcatgaccaaagaaaaggcgattccaggcgtggttggtaccaaaacggcgacccgtgagattctggatggcacctcgctgatcgttgacggtattcatggccgcgttttgctgagtccaacgccggctgagatcgatgaatacgagaaaaaagctggcgactatgcgcgggaaatggagtcgctcggtgttttgaagcatcagcgaaccgtcagtgccgatggtcgtcatttcgagatcggtgccaatctgtttatgcccgatgagatagaaagtgccaaaaacagtggcgcggaaggaattggcctgatgcgcagcgaggctttgtttatgggacgcgatacgctgccaagcgaagaagagcagtttttggcctataaaaaaatcgtcgccgatatgacgccagaacgcgtgattatccgcacgctggatattggcggcgacaaaccaatcgtagccatccagacgccgacagaagacaatccatttttggggatgcgttcattgcgtttttcactggcgcacccagaaattatgcgaccgcagatgcgagccctgcttagagcatcggtttatggccgcttagcagtcatgtttccgatggtcagcacgctggatgagtttttggcggcacgcaaggtattagaagaagaacgtcaaaagctgcaggcgaaaggaatcggctgcgcgaatcagattgaggtcggcatgatggttgaagtcccagccgccgtggaaatggctgatcaactggcacagtatgccgactttttcagtattggctccaatgatctgacgcagtatatgttcgcggccgatcgcggcaacagccaagtcgcgcatctttaccaaacgctgcacccagccgtcttaagagccattaagcatacggttgacgcggcgcatgcagaaggcaaatgggtcggcatctgtggtgagatggccaataactcgctggccacgccgcttcttttaggaatgggtatcgatgagttttcgatgaacagtaccagtattttgccgattcgctcgctgattggcgaactgcacgtgcggcagctgcagccattggttcaccaggccatgaatgctcgtaatgccaaagaggtgcgacagatgatcattggtcgcgttccggccttaaaaaacttcaatttctaaaatttaatcaaggtcgcttcaaatgtcttgaagcgacttttttgtagggttaaaatcagttatctgatgatgaagaatcagttaaaatggaaagtgctgaatctgaatcgtaattgaccgttcgccgttgttggcgattgaaaattaaaggggattgcattgtgaatattgggttgtttacagatacttattttccacaagtcagtggcgttgcgacgtcgatcaagactttgcgtgatgaattgactgaacaggggcatcacgtttacatcttcactacgaccgatccagccgccaagcatgatgagccggaaaatggcatctatcgctttcccagcgttccgtttgtatcgtttaccgatcggcgcattgctgtgcgtggctggataagggctttgagattggcccgtaagctgcagctggatatcgttcataaccagaccgagttttccttagggatgatgggcaagatggtggccaaggagatgaacattccgtgcctgcatacgtaccatacaatgtatcaagactatctgcactatattgccaatggtcatatcatcaagccgcatgatgttgccagattagcgcatctgtacctaaaaaacatgacggggatcattgcgcctagtgaacgagtattggatacgctgcaggcatatgacgtggccgcaccgatcagaattattccaaccggggttaatctgcgcgtgtactcaaagccagacacgcctgcacaaaaacatgagctgcggcaaaaactgggttatgaagatactgtgccggtattgctgtcgcttagtcgcctggcttatgaaaaaaacattcaggccctgattgaagcgctgccggatattttgcagcatcgtcctgacgcgcagcttttgatcgttggtgatggtccagccagagaaaccttggagcggcaggttgttaagatggggcttagcgatcacgttcagtttaccggtgagattaaaaatgaggacgttcatcacttttatcaaatggccgatgtctttgtctcagcatcggactcggaatcacaggggctgacctatgatgaggcattggcatccaacttgccgattgtcgtgatgcgcagtgaatataccgacgagctgattgatgatccagctattggaatgagttttcaaaagcgcggtgatctggtcaagggcgttttgtactaccttgatcatcctgacacgcaggaaacgattaccaagcgtcagcaaaagcttcatgatatttcctcagaagtctttggtcagcgcgtgatggacttttatctggaatgtcagcagcgcctgcaagatgagcaggacgaaaagaaacgacagcatcatctttttggtaaacgaggttgagcatgttaaaaataactatgtattcttcagcggataaagtagctggtcaaggggtgggcagcgcttatctggagctgatgcatctgttgaaaacgaattttaaaggcgagtttgatatcgcggttaatcagtaccgaaccagtgatatcagccactatcacacgattgacctgccattttggttttccactttttcaaagaaacgcgggcgcaaaatcggctacgtacactttttgccagagactttggaaggcagcctcaagattccgcagccttttcgcgggatcttttatcgctatgtgattgctttttataaacgcatggatcatttggtagtggtcaacccatcgtttatcgatcagctcgttgcctatgggattccacggagcaagattacctatattcctaactttgtcgatgatgccaagtttcatcccgttgacgaacttgaaaaaagaaggctgaaaactaaatgggggatcgctcagcaacggtttgtcgtggtgggcagcggtcagattcaagagcgcaagggcgtttttgattttatccaattagccgagcagaatcctgacgttcagtttatctgggcgggcggtttttcatttgggcggattacggatggctacgcggcgcttaaaaagatcgttgacaatccgccggcaaaccttaaatttccaggaatcgtcagtcggcaagagattgctgagctggataacattgccgatctgtttttactgccgtcttataacgagctgtttccgatgtcggttttagaggcttttagctgtgggacaccggtcatgctgcgtgatctggatctttatcattcaattattcaaggatattacgagccagccaaagatgttgatgagatgcagcaaaagcttgattggctgcagaagacaccggctcgtttggctgagcttaaaatggcggcgcataccgcatcgcgtcaatactccaagtcgcaccttgccaaagtctggcatcaattctatctggagcaggcaaaggagggctaggtaaatgtcgcgaaaaaattgggttatttttgttttgatgctggcatgcggaatcggtatttttgcttattcgctgcgtgacataaagctgtcttcgattatcgtggatttggtgcatctaaactggggctggtttggggcagccttgttgtgcatctgcctgtatttgtttttggaagccgtggtcgttaagatttttatgaatgatcgtcatgacggctttacctggaaggatgcaatccggattccgttggttgagcaattggggaatggtctaacgcctttttcaacgggcgggcagccggcacagctgttggcaatgatgcaggcgggcgttgatgctggtcaggccagttcggtgctgttgatgaagtttgtcgtttttcagtcgatgatcgtgatcaacttcatcatcagtcttttggttggtttccactatattgctgctaaaatgcacgttttgtcgctgctggttctctttggctttttggttcatcttagcgtcatcatcggcttgctgttggtgatgtattggtacaatttcaccaaaaaagcggctaacatcgtgattcgccctgctcattggtttatgaagcctgataagtacgaaaaaatgcaggcaacgctgaatgaaaaaatcgataccttctatcaagaaagcctaaagatcaaaagcgaatacggcaaaatggctaaagtcagtttaattaccctgctgcagctgggattttattatctgattccttatttcatcatgctgtcgctgggcatcgatggcttgaacgtgctgatggtagtcagtctaaacgttttgatctttatggtaatctcgctatttccgattcctggtgggacagggggagcagaatacagcttttcggtgctgttctcaagctttattgcctcaggaagcaaattggtgctggcgatgctgctctggcggattctgacctactactttgggatgtttgccgggatgtttgccttaatgatcaagccagatcgagtgcatgaacctgattaataacgatataatagatatagtgcagaacctggtcgtttggattgggttcttttattttagtagttagtgaggctagatcatgattcattcagaactgcagcggattttgcgtcgtttggatgcaatggcagaggatacgcatggcgatctccagcagcgtactttttctgcttatggcattcaagtctgtacggtaacgtatcaacaaagtaccggtgagtttactttagagcagtttcagccggctgctcagctgacgtttgacagcttggatctaacggcaatcgaagtctatcgctgtttgtatgagtttaagaattctttttgagcgccactcgaatgttaaaaggtagtttagtttataaccatcgagtttcttgttcggttaaaactgttatagttgagtttgttcgtccttttgaaattagcagaaaaacttttaaaatatagttgacgattagccacaatctcggtatagtagttatcgttgtcgatgaggcagacgctgatgacagtcagatttgcttctaacagttattaacgactttaaaaatgttgttgacagctatatgacttcatgatatattattctagtcgcttgtttaaaacgtttgaaaaaaagaattaaaaaagttcttgacaaataactaacaagtgttaaaataataaacgttgtaactgatcgattgaatcggttgcatggtagacctttgaaaactgaatacagtttcgacgaacacaaatgtgcagggtcattaatcattacgattgatgcaaaaacatttgcgaagtcaattcgcttaatttaaatttgagcttttcaagttcttatattttatatgagagttt

SEQ ID NO: 1880 - DNA, 410 bp, Unknown
  gut microbiota DNA sequence
tctttagtaaggtatttatttagtagtgtgcgattttccaagataggtttttccaagataggtttttccaagataggattatccaagataggaaaatcgcatttaggtttctggacatcagcagggtcatcatgcagaacccacactggcgctccgaacctgcctttcttatcacgcaatcttgtccgctcaaggtagccgtattttgccaattcctccaatccactatctagagaatggataccgtctttggcatgcttggctacttctttagcatagaagtcccaatcatcaggcattgaccagagatagttgaagatcccacgtgctttccaagtcaaacgctcgtcacggatgattgtgttgctggtggtggtaaaccctttgctgtactcctttctgattctgac

SEQ ID NO: 1881 - DNA, 2368 bp, Unknown
  gut microbiota DNA sequence
ttctgcaatgtaagcactctgctgcaaagatccacttaccacatgtgatggagcataatcatttgcaattcgaaggcatggcgtgtcttgcgccaaacgtggcaccttaacaaacccaacttctagtaagcataatttggcattgccgatttgcgtatagaaaagatcgttaaaatacgatgtcgacccatttaaccaagtacagcctggcgaaactttatgccagtttaaattttcgagattcgttttactaaagttgtcgttgataatcttagtccagttctccgttggagtcagttgtgttaaagctatttcatgtcctttccggactggcattgttaatcaaagtgtagataaatcagtgtggtatccatgtcgatctgatcagagctcacatttgagctccaaaacgtaaaagcgttttgactcgcatgtcgattggtgacataactgttttcgtttaaaatagccccagccgaataagaaggcgctaatgatgccggcaatttaaacaagtcatgacgtgtcatgcttgctttagtagtaacctgccaaagtgataggaaaactaacttcccaccgttgattggcagataccaacaatcagaactaccggttgcgccattcagaaacgtagctaccgcaccagcatgaattgcaccatcaatcggtaatttacctgctaattcaaaattatgatcgataacgtttgcccagtcctcacgtttatttttgattaattcaagtggcattagcaagcaccccccatcttggcagtgcctgcattgttgctaatcagaggcgcaactgcgcccccccccatgaaaatttgttcgttcatatcaatatccttcccggacaaggaatggctcacacacactaattagctgatgatcaacaggctaataaatgaaccaaagttttcaatcttgaagttgtagccgttagttgcggtaataataccagtttgtggatcgaattctaagccactcgccgcactcccaccgattgaactagcttgtgcaaagtaattaccaattgatttatatacctctgccgctagtttcataatctgcagatgctgattagggtccagcgctggcatgttattaatccagccggcaatttctaagatggtaaacgttcggtcaccatcctttttcgtgcaacgtcgccagcaaacgttcttgattgaaaatccattcatggccacaatcccggctgtggaccagtccgtaaaatcgccaatttggcttaagcccgtattaagcgcgtttgtccaatcttcctgtccatttttaattgttgcaacagccattactggtcaccacctttcaaaaaggcagtaactaagctaacagacggggttaagttaccccccccgaaatatttacaaacgtaatcatatttatgcctcctttggccagaatgttacttgacgccacttagaccaagcattgttctcatatccgcgcacaaaagcgttctggtcagcgtccgtgaaaacctgtagcaagtgtgatgcattgccatgaatgctaagcattcctaacttgccatttggcagattgccggcagaagtcgttgttacatagtagctcataccaggcgtggtcaacgtgttcaagtcgttaccggtattctgagctaccatatagcctttcacgtagttctgcatatcaacggttgttgggataccctttgtgttgatcaaactcgttgcagtctccaaagccgactgagcagacttaagctgtgcagtcaaagttgcaatggatgtccccttgatcatctcatctgcttttgactttaagtcgtcgataaggtcttcaagccggttgctgtagctatcatgcaacgtatttaagctgacagtttgctctaaaatattcaagttaaagtctagcgtggaaattcgttcgttagtgtcgggcttcgtaattacaaaggcacccttcataacccctggattctggaacatttctgctgcccagatcaccgtaaagaatccacgtttaaaattatcagactgcgcaacttctttagcacaattagaaagcacgaaagctttcccttgactatcggttgcttcaacctgaaagccgtagttggtcatatcctgtggccgaccgtccattttcagtgccagcggcattggtgcttgactatcgccaacccgaccttgaaaatatggcgtcagatcgacaatcgagcttgtattcgattgcgcgtcccggaccaaatccaagacgactcgcgtattaatcgctgtcataatcggtctcctttcatctcatttgcatattgttcaagctgagtaaacagctcaaacgcgcgtttaaaattatcatctaaaaccgttttgact

SEQ ID NO: 1882 - DNA, 2206 bp, Unknown
  gut microbiota DNA sequence
gacactgacaaataatccttacagctccacttttgaccgtcataagtcttttcaattgggaacacttgattaaataagcgtggggttaatgctccgacggttttatctaatgcacctgcccaatttacacgttctttccaacgcatttcgtcaacaaaaattgcctcttttacaagtcgatataaaatgacttggttgtgaatatcttgattacttcgcataacctggcctcctatgcaatcttgatgaatttgttgacaaagtaaatttggcccttgcctgttacctttgtcgtcttggtgatttttacgcttccatcaccagaaacatgagtgccctctttaatcttgaacaaccccatcttcattgctcgttgtgttggcgtgttatagtcagtgcctttacggctgattaaataaccgtttgcccgcagccacttgaacaggttgtttgggcccattgcataggtcttaccgtcaatcactaacgtactgattccgttttgcttcagaatcttcgctagttcaccaatcaaaattggtgtttcgctgaccgaaaccgcgtcggcgaaaatcgcctttggtttcatcttttcgttgtccgcagcaagcagattattttgcttgctcagatttttgttctcgattgttagtttcaagttttggttttgcaggtatgcgtaacctcgcttgataacttcttgtgggtcattccatcgacgttcgatttcgatgaaatatttacgataagttttcccaagctgtgagtgtgtcatcatacataactctttagccatgtcgatagtgatgtcatagtcttggattggcctagtagcgccgttattaacaagcgtaactgcagttacacttgtaaaatcctcattttggataaagtccccaaagttctgttcaacccatttgctaaaacgagtagttacgtttaacttcttatgcagctcacgggctgaaattaattgctgcccattgttttctttaatattgatcattggaacgttttccagaatcttgtcagtatcgatgttttccatttaactacctctactacttttatatattaaatagttgtcaaaaacgatttaataacaactttaattactaaaaaacagcaaaaaaatatcgctaccgctaacacctaatgcattagcgagtgctttgacgtggcgagaattaggatttgaaatacccctttcccacttgctaatagattgagcttgaacgccaacctttttgccaagctcttcttgggtcaagcctttgctttttcgcaaggccatcagactgttcatgtaatcacctcttaacatttaagtacaaatactattatatacactttagttgataaagcaatacttttttaaacttttttcaactaaaaaaactattcaacgttatattacgatataatttagttactaaggttgttgaaagataactaatatattggagctgattaatatgataggtgatagaatacgtgatttgcgaaatcaaaaaagactttcgcaaacagatttagcaaagatcataaacgtatcgcagcagaccgttactaaatgggaaactggtaaatcagagccttctagcagtgcgattaatcgtttagcagactatttcgatgtttcttctgactaccttttgggaagaaaaacgccaaagccaaaaatgactattgatgaagcaatggatactatcatgtcagcagacggcaaagaaccgactgatcatgatagaaagttaatggaaagcattataaaggcatacttagacaatcgggactagctatggacgttcacaacattgtcaaacaactaaatatcaacgtgtactatatagatatggaaaagcctggctatgcaacaatcagtgcagacaagcagctaaagtttgtgttcatctctaatcgctacccagcacgagtgcagaaagttacgcttattcatgagttagaacatatcgctaagcagtcaggccaaacagcgctttacaatgccactgtttcggccaaaatgaaaatggaaagcgaaattaaccgttgcgttgtctatgagctagtagacgactatatcaagcataccggtattgagccggaaaatatcaactatatcgatttcatgcagcttaactatatatcatcggactatgaatcggtcgttaaagaaacaatcaaaaaatacaaataatcgggg

SEQ ID NO: 1883 - DNA, 57541 bp, Unknown
  gut microbiota DNA sequence
tgaacttgttccaatattttgtaagcgttatactaaacgtataaactgatgttatcgctttcgcaaggattattttacactggaggggtttttatgtattattccaacggtaattatgaagcatttgcacgtcctcgcaagcctgagggaatcgaacagaaacacgcctatattattgggggcgggctggctggtttggcagcggccgtcttcatggttcgtgatgctcagatgcctggcgaaaacattcatatcttagaagaactgccggttgcgggtggctcactggatggcgagaagcgtcctggcgttgggtatgtcattcggggtggccgtgaaatggaaaaccactttgaatgtctttgggatatgtaccgctcaattccttcactggagattccaggcgcttcttatctggatgaatactactggctggacaaggatgatcccaactcgtcaaactgccgcctgattcataatcgcggcgatcgggtacctagtgatggcaagtatggcgttgagaagttttcaaaatatatcgttaagctggttttgacctcagaagatgagttagagggcaaaacgattggcgactggttcccagatgaattcttcgacaccaatttctggctgtactggtcaaccatgtttgcctttgaaaagtggcactccttgattgaaatgcggcgctactgcatgcgctatattcaccatattgatggtctgccaacgctgagtgccctgaaattcaataaatacaaccagtatgagtcaatgactaagccagtcttggcatatctgcaggatcacaatgtcgacattcaatacgacaccgtggtcaacaatgttttggttgataccagcaatgacaagaagattgccaaaaagattctgctgaccaaggatggcaaggatgaagaaatcgtcttgaccgacaacgattatgtctttgttaccaatggctcgattactgaaagttcaacttatggcgatcagaacacgccggcaccgattacgcacagcttagggcctagttggaagctgtgggagaatctttcctatcaggatgccgattttggtcatcccgatgtcttctgcaagaacgttcctgaccgtgcctggttcatctcggctacggcaacgctcaaaaaccgcaagctggcgccatattttgaacggctgaccaagcgcagtctttatgatggcaaggtcaataccggtgggatcatcacggttaccgactcgaattggatgttgagctttacgatccacagacagccgcactttaaggaccaaaagccggatgaaacggttgtctggatctacgcgctttattccgacacggaaggcaactacatcaagaaacgggtcgtggactgctcaggcaaagagattactgaagaattgctctaccacctgggcgttcccgttgacgacatcgaagactatgcggaaaatgacgtcaataccgtaccagtctacatgccttacgttaccagctacttccagctgcgtaaaaagggtgatcggccggcagttgtgccaaagggatcgcaaaacctggccttcttgggcaactttgccgaatcgccaactcgcgacacggtctttaccacggaatactcggttcgaaccgcgatggaagccgtctacacgctctttaacgttgatcgcggcgttcccgaagtctttgattccgtctttgacattcgccaagagctgcgggcactgtactacttaagcgacaagaagacgttgccggagatggatctgccagtaccgaagctggctgccaagacggcgctgcgcaaactgaagggaacctggatcgaagaaattctcaaagagcagcatctgcttgactgattaaagtaatttatataaccagaacgtcaaaagaccaccagcgctaatctgcgggtggtcttttgctactgagtaaataaattaagataaatgatcagacttatggctgctgattgagcggactagttatgatgaatcaagcggacgcgggtgatggcatcgacttggcttaaccggtcaattactttttgtgcggttgccggcgtgaggtttgaaacgtctagcatcgtataggcataattgccgcgcgaacggttgaccagattttcaatgttgatgccttcatcggccataaacgtcgaaatctgacccagcatattagggatgttttggtgaatcaaggtaaaacgatctgggctggcaaacggtgcggctacatctggcaggttgaccgagtttttgatgttgccggtttccagataggtcatgatttcatgagccgcaatctgcgcgcacttgacttcagcttcaaccgttgagcccccgatatgcggcatgatgacgatatcaggattattcagaatctgagcctcgctaaagtcggtgtagtactttttcagcgtaccgtctgccagggcttttacggcagcggcattgtcaacgattcccagccgcgagtagttgagcaaaacggcgccgtgcttgaaatgctttaattctgccgtgccgatcagtccagtggtttcttcatttttaggaacgtgaaccgttacgaaatcagcatccttaatggcatcagtgatcgtttgcgcgcgcttgacctgactatccagctgccaagccgattcaacggaaaggtatggatcatagccaatgacgtccatgcccagatcaacggcggcattggcaaccagcgagcccacgtgtcccatgccaataacggcgatgcgcttgcccaagagctcagtcccattgaaactggtcttctgcttttcggttcgcagcgtaatatcggcaccaggcttggcgttggcactccattgtacggcagcgatgatgttccggcttgccatgatcatcgaggcgacgaccagttccttaacggcgttggaattgccgccgggcgtgttgaagacgaccgtgccgttttcaagggctttgtccaatgggatgttgttaaaaccagccccacagcgcgcgatgactttcaggctcttgggaaactcatgatcatgcagatccacgctgcgaatcatgtaggcatcgggctgggcttcaggattattgatctggtagtcagccgtaaattcatcaagtccggcttgggcaatagcgttataggttttgatctggtacatgaaagattcctcctagcgattttctttttcgaattgctgtataaagtcacacaaagcaacaacaccatcatatggcatggcgttatagatacttgcccgcatgccgccaacgagtcggtgaccttttagattcaatagaccatgttcctgggcctcttggacgaatttagcatccagctgcgcgtcgccagttacgaatggcacgttcatcaacgagcgatagtgtgggtcaacgttgtttttaaacagcttggagttatccaggcagtcgtacagcaattgggccttcttgcggttgcgagcatccatggccttaacgccgccttgttcatcgatccatttcaaaacgagcccggcaacatagatttggaagacaggcggcgtgttgagcgcggactttttagcggcctgcttggtgtagtcgagcatgcttggcagtcccttgacatgacccagcagcgattttttcaagattacgatcgttacgccagcgggagccagattcttttgcgccccggcatacatcagatcgaatttttcaaacgggtagtcttggcctaagaagttggaagaaaggtcgccaaccaacggcgtaccgtcagtttctggcagtttttgccaagccgtacccatgatggtgttgttggtcgtgatgtgtacgtagtcataggtatcttggggaatggctggtacttttggcagcgtggtgtagtgctggtctttagaagaggccagaacgtcagcttgaacgcctttgatcaagcgtgcttcttcaacggcgcgttcagaccagtgaccagtgtcgatataggcggcgcgatgatattgataggcaaggtttaatggtacggccgtaaactgcgtggtaccaccgccctgcatgaacaaaacgtcgtattcctgatcatccaggttcattaatttatagatttgtgccttagcattttcataaacatcaacgaacagctgagagcggtgcgagatttccagaatgctcatgccagaattgttgaaatctaataattcagcctggacttttttcaagacttctttgggcagcacagcgggaccagcagcaaaattatagacagtcattgtcattcctccaaatcataaactaaaaaagcacccacttgagtaagtgagtgcccttcaaattcggttcaggatttgaattgacctcacttatcgcgaaggccaacgcaaaatatggccttctaaatcaaggaagaccatgatgaggaaaccatcaatgcaaattcaaaattattcaacagcatgttcagttccctcctcatcaaattattatttatcgttaacaaaattataatctaattacaaaaaaacgtcaataataaatttgattctggtataatgaccaaaaaccaaagtcgaaaggaaaagaatatgaccgaattttatatcgttcgccatggtcgcacctttgccaatgcggccgggcttaagcagggaatcattaatacgccgcagacctatctcactgatgagggacgggcgcaggcgcagcttttggcccagaattttgatttgcgtgattttgacgcgctttatgtttcgcctttggaacgcaccaagcagaccgcggcaattctaaatgaggaggcacagctgccagtcatcgaagacgggcggttgctggagatttcttatggcgactgggatggccagcccaatgatgagctgatgaatcaatatccagaattgttttcgacgtttgttaaagatgtgcgtcctgaatatgctgccgttgcccatggcgagacgtttacacatgttgaaaaacgggtccaggactttattaaagacgttacggctcagcatccagacgagcgagtcgtagtcgttacgcatggctttacggtccgctcgtttgcggccagtgccacgcatgcgccaggcttgacgattctggaaccagaaaactgcagcgttactaaactgattgttgaaccccccacgcttgagcagcatctgatctattacaaccgttccactcaaggattctaagttatcaaaaagacggatcacgcgttatgcgggacccgtctttaattgtttgctgacgtttaagaacagccgtgaaaatggttggctgaactgttggaaacgctgctaggcttgtttttgcatggcgtgtttaggcttttgaccaagattggcgaaaaagtgttcgtaaatcaggtccgtccaacgcgtcagatgtgtcagacttgaatcgcccgtcaaagagagcacgaaggcaaaacccagggcgactgccgagacgtggtcgatgccaaacagactgccaaacagcaatgcgcagaccaaaagccccatgatgcagccataaaagatgatgctgcggaacttattgagcggatgacagatctggtagagcaccatgaagccaactgcggccagaatcatggttgaggccgttgagatgtcttggcggctgaggccaaacagagctccacagactacgatgacgccaacggtaaacatatcggtaatcccaccaggcaaggcacgccgcataacgttgggcagaaatttgccatgaatgcgctgatgattggtttccaacgccagcaggaatgaaggcgtcccaatcgtaaacagactgatcagcgtgatgtgggaaggatcgagcgggtagttgaaggcaaagatcagcgtaaagatggacaagagcagtgagaagatgttcttgaccaaaaacagactggctgatcgttcgatgttattgacaacctgccgtccctgggctacgacctgtggcattttggcaaagtcagaatcaagcagcaccatctgagcggcattcatggtggcctcattgcctgaagccatggcaatactggtatccgctcgtttcatggctaaaatgtcattgacgccatctccagtcatggcaacgacttcaccttgcttttgcagcgcggtgacgaatttttgcttttgatctggcgtgacccgaccaaaaacggtgtagcgctgcaaggccccttcatattcgtcatcggccaaggtagcagcactgacgcagttttgcgcgccttcgatctgtgcctgcttagcaacgctggcaaccgttaatggatcgtcacccgagataaccttgatcttgacgccttgttcggcaaaatagcggaaggtggctggggcagtcttgcgaacgggatttctcagcaaaatgaatcctaatggggtaaccggcgcactgagactggctttggtcagctgcccttgatactgtccgaataccaggacccggaagccttgcttggcgtagggctcgaactcgctgctaaacatggcggcactttctcttaataccatttccggcgcgcctaagacatagctttcattgccaaagcccacgcccgaatacttccaggctgagctgaacggcacgatctgatccgcctgacgtccgctgccttgcgtaaagtattctttcatggctttcatcgttgagttgtcaccaggcatggccgcgcaaaaatcactgatcagactacgcagccgattttcgtcaacctgtgcctgctgagcagaaaagaagcgctggacctgcatttgattttcggtgatcgtcccggttttatcaacgcaaagtaccgtaacgcgggccagcgtctcaatgcttttcatgctgtgcaataagacccgctgctgcgccagtttcatggcacttaaagccagcgcaacggttgccaataaatagagcccttctggaatcataccgatcaaagctgcttccatagaaacgatgctttgtttgagcggattgccattatgcacgtatgattcataaaatagcgcggcaccaattggaatgatgataatgccgacgaatttgatcagccgattgagtgatttgatcatggctgattcttcggtcgtatccattttttgcgccttggctgtcagcttagccgcatatgaatcagcgccgacatgcgtcaagcgtacgcgcgccaaaccggaaacgacaaagctgcctgacatcagactgtcgccgggatgcttggcaatctcatcagcctctccggtcagcagcgactcattgacgttaagcgagccggttaaaagctgggcgtcagctggaatctgctggccggttttcagttcgatgatgtcatctaaaaccagttgatcagtcggcagctgtactgatttgccatcacgaattgccgttgctttggcagcattcagcactgtcagtttttccagcacttttttggaccgtaattcctggataatgccaatgacggtgttggcgatgatgacgggcagaaaagtcatgtccttaaatgagcgaaccatgaccaataaaacggctaaaacgacgaaaatcaggttaaaaaaagtaaacgtgttgctgtagatgatctgccgcgtggttttaaaggtcgtattgatcgcggtgttggtcaagcctgcctgggtccgctgcgccacctgatctttggttaagccggtatcaggagcggcattgaagtgctcgacccgttcatctttagcggctgctgattgttgatgatgtctgcgcatacaatcatccctttctgctttaattctaattttattttagcattctttgcgatttggtacggttacctttaagataaattaagaacgattttgagaggatggttgatatgagcacagaaccgacttttgaacgcggcgcaatcacgttttttagcggccggctgacgctaaaagaagccgcggcaattttttcccacatgccatatgaattggattacgttaacaaaaatgatgaatatgtctggtattcgcccaacccgtggcgcgacaacgaccgactgcagaaacgcctgacgcattcggtgctgggttgtcaccctaagcctgtacagccactggtcaagcaggttttaaaagctttgcatactggcacaaaagacgtggttgaatcgccacaggtcatggacgggcatcgtgttttgattcgctattatgcaattcgtgatgctcaaaatcagtacctgggtgcgctacaggttaccgaggacgttgagcggatctgcgagctttgcgaagcccatgattttgaacatgggatagttgatggtaaaataattgatggcgtatcggcggcttcaatccatgctaatcgtttacaaaaaggcgagcagcttgccgacatccagacgccggacaagacgcaggacgcggtttctggcgcttcagtagaacaatagcagggggaattgatttggcttcaaaaaagttttatgccgtgcgccgtggcaaaaagcccggcatctacaccagctggccggaatgccaaaaacaggttgctggctttgctaatgcgcgcttcaagggatttatgaccagagaagaggctttggcatggctgcagcagccggaaaagagcaagccgcgggccgtcaagcatgcaacacagaccagtctggatctattcggcgaggaacagggcccccgatttattccgacgattgttttttatacggatggtggttcacgcaatcgcggcaatcgacggggcgatcacgttcatcaagacgatctggcagcctgggcctatctgattcggtttgaggatggcttaaaaatcaccgatacggctggtgaattgggtgctaccaacaatcgcatggaggtcatgggacttttaaagtgtctgcagcgtctgcttgagttaaacctgcaaaacgagccgattgagggcattctcgactcgcaatacgttttaaatgcgatcaataaaggatggctgtacagttgggtgcgacgcggctggaaaacttctggcggcaagccggttgccaatcaagaactctgggccgaggtgagcgtgctgctgcctaaattcaagcagctgcgctttaaatggaccaagggacatgccaacagtcacggcaacgttacggtcgaccagctgctgaattcaacgatggacaatcttaaagcttaaatttgattaaaataaaactcgtttggtcgcgcgttatggcggatcaaacgagttttttgcagttttaatgacgaaatgcggcgatcaaagagactcaaaccagatcgtgaccgccagtgctttttaagtagccaggctgaacttgacgcagtcttggacaggaacgttaagctgctcagtgttctgtgcagtcttacttacggttttatgcacgaaaatcggtataaaacatatgatgagaaaatcattacctactttttaccaaaaatcggagcgaagtaggtagttgcaaccctcgcaaccgctccagatttgaattttcacaggtccagtaggtttgcgaccacggggattttcctgaattaacctgccagcagtttgacgctgattatagttgatggtgactattcaatatgtataaataaaaaaagctatcagataacgattccccgcagtttaaagaaacggaaccgtaccaaatagctggtagtcaagaaagaagtgaatgtcggcactccttacggttaattatattactatactgccgtgtaaaagaaaacccctaatctgaaattttataagaaaattcgtgaataattttcatgttttggtttaaagttgcaattgcaaccgattatcgatataatattgagcaagaaaggggggaaagctttgatcgatgtattgcgcgagatgggaatggcatcgcgagccctagatgccatggctaacgcggaatttaagaagctggatctggcacgcggtcaattcgtatatttggttcgaatctatgagcaccctggcattattgcacgcgatttggcaaaattaatcttgatggataaaacaacgattgccagagcagttgccaaactggaaaaaaacggcttgatcgtgcgacggtccgatccggccaatcatcgtatcaagcgaatgtacgtcacgaaaaaaggagcggaattatacccgtttatcattcgtgaaaacgagcattcaaatgacgttgctttacaaggcttttcacctcaagaagcgcagcaggctcacgactacttgcagcggatgcgccaaaatctggaaaaagactgggattttgttaaagcaggcggtcaaagaaattattaacgatatttaagagataataaagacattaaatgagtaaaggagttttattatgaaacgtgtcgtagtagatgaaagtttttgggaagtctttccagatgcagagattgcaattatgtacgttgatgggattgataatcatgatacggatgaaaacaaggccgaacgtgctgaattattaaaacaggcaaccgcggaatcagccaagttcaccaaagaagaaactttccgtgataatccagtcgttgcacagtggcgtgaagcctatgccaagttccctaagcgtaagggtgcccgagcatcaattgaggcactgcttaagcgggccagccaaggacacgtttttgaaccgattgagccattggttgacgtctacaacagcatctcgctgcgctatggcgttcctgttggtatcgaggatcgtgataagattgccggtgacatgcatctgggcaaggctaagggcggcgaaagcttccaaccagttggcgctgacaaagatgatccagctcgggaaggcgagattctctattatgacgatgagggtgccgtttgccgcagtctaaactggcgtgatgctcaacgcacgatgctgaccagcgattctaaaaacgtggttatcgttatggaagcagttaatgaggatcagattctgcggacgcatgaggcgatggatgagctgcaaaagctgattgaacactactttggtcaaaagccgagcgcaccacactacttgactaaagaaaatccgattgccgatgtagactaggtgagtgcagatgaagatcggaattgataagatggcgtttgcgacaacgtcagaatatattgacctggcagaattagcaaaagtgcgcggtgtcgatcccaataaatatctaattggcattggtcaaagcgagcaggcagttttaccgcctacgcaggatatcgtgacactgggagcggctgctgccgacaaaatgctgaatgaacgtgatcgagagcgcattgccacggtgatcgttgctaccgaatcaggaatcgacaattctaaagccagcgccatctatattaagcgactgctgaatctggatgactatgtacggaccgttgaagttaaggaagcctgctattcagcaacggctgcgattcaatttgccagaggacaggtggcactggagccagaaaaggcggttttggtaattgcagctgacgtggcgcgttatggcttaaagacggctggcgaggttacgcagggagcaggggccgttgccatgctgattacggctgccccgaagatcctggcaattgaacggaccagcgttgcctattcgcaagacgtgatggacttttggcgaccgctttatgctactgaagccatggtcgatggcaagtattcgaccgacgtctacattgactttttcaagcatacgctgagtcgctatgaaaaattaacggatcgcaagctggatgattttgcggcaatcgcttttcatctgccattcaccaagatgggtaaaaaagctttggaagctgtcttgggtgaacgggatgatcaaacggcctggcgtctgcgcaaggcactgctggccagccaaaactacagccgtcgcgtgggcaacctttataccggctcgctttatttaagcttgatgtcgcttttgcaaaatgattctgatctaaaggcaggggagcgcattggtctgttcagctacggatcgggtgcggaaggcgagttttacagcgggattctgcagcctggctatcaagaacagctgagcaacgtggcaggagatctgagcgaacgccaactgatctcggttgcggcctatgagcagcagttcaatgaccagttaggaatgaataaagcagacgttgagtacgacattagtgcagatccggctcgttttgttttagctggtcaaaagaatcatcagcgccaatacgttgataagcagcagctgtaaaattttcaagctgactgagattgcaattcgtcattgccttttttataatttattaaaaaacgattataaaagaggcactttttgatgagaaatgatatctattttgatccgatgacggttgaatgggtgatggcgcattgcgatattgcgcggctcggcgtacaggatgacgaatcggtgtatgtcgttccggtccactttggctatgaattggatgagcagcaacattttcatctttactttcatgggaatgcggccggtcagcgcgctcgtttgatgcaggctaatccgcatattggtgttgagatggaaagcgactatcaactgcttcccgcgccgcaagacagtgcatttagcgcccggtttcgcagcttgattggcaaaggaacggttaaagagctgactgatgcggctgacaaggtgcatgccttaaccgtgatgatgcatcattatgtggccagaatgccgcatccgctgactgcagcaatggttgatccggttcatgtctggcgcgtggatctggatgaggtttcatgtaaggtgaaaaatccggatcatgattggcaaatgattttaaaacagctggggcatccccttgaaactactgatgcagtaactgccagcagtcaaaagtctgatgctgataataaagattaaaaaagagatgggaaaactcccatctctttttttaatagatgctatcgcggaaaagcccaacgactttgcctaaaatggttacccggtccaggatgattggggccattgtatcgttttctggctgcaggcgataatgaccgttttccttgaagaaacgcttgcaggtagcctcattgtcatcattcatggcaattacgatatcgccatttttagcggtatcctgtttacgaacgataaccttgtcgccgtttaagatccccatgttgaccatggaattaccttgaatctgcagcataaacagatcgttatggtccggaatcgaaggcgggatcgggaaataatcggttgcatcttcgacagcgagaatcggctcaccggcagcaacgattcctaacaatggaattttttcctgctttggcgcaattcccaagacatccatgccggcgggcgtaatctctagggcacgcggcttggaaggatccttttgcaggtaccccttcttgataagccgattgatatgcccgtgaacggtagacgtagatgaaaggccgacagctttacagatttcgcgaacggttggcggatagccgtgagtggcgacctgttgatgaatgtagctgagaacggccatttgcttgctggctgctgtttttaccatgttgccacctcattttcagatttggagcaattatatcatacttgccaaacattttcaaacatacgttcgttgaaacttaacggcgcggattgcttgctaaataatgcggcgttcgctacactaagtaacgtaaaaatcgctgtttaaggcagaggggaagaaaattatggctgattcacaagcacaagaaaagctgctcaaacgaatcaatgagctggcgcacaaaaacaaagcggaaggactgaccgcggccgaaaaagctgaacgcaaacagctgcgcgatcaatatctcaaaaatttccgagaggcttttcgttcaaatattgagatgatgcggatctttgataaggatggcaaagaggttacaccggaaaaagttcggcagattcaacgcaaaaaagggctgcgtgacgactgattcaatgattaattcatcgaatgcgtcttttatttgacgccgatatcgtgtaacattagtatcgttatctaaaataagggggaaacatccatgagtactgggcttagtatcatgttgatcatcctggcactgctggttggccttttggttggcttctttggtgctcggaaatacatggaaaactacctgcgtaacaatccgccgatttctgaagatatgctgcggacgatgatgatgcaaatgggccaaaaaccttcagatcgcaaactgcaccaaatgatgcaagcgatgaaggctcaagcgcgcaaggcaggcaaatagcaattaaaaaggaccggtgcactgcatcgatcctttttgattaatattgacgaaaatcctggtcagtctgactgatttttagtggccagctgtcaggctaaagtcaagacttaatttaaaattgataagcccgattaaaaatcgtcgtcttttggtttttcgggcatgtagtagtgataattgggatcaagctcgttgtccagctgatcgaatgccatctgcatctggcgttccagttcctgctgattttcatcagtcaggcgcattttacggtcaatgtagattggctcgccgaaattgatcttgcgtttttgtcgcttgaagatgctgcttagtttcaatggtccttggtaaacggctggcaccagcggcacgttggccattttggcgataatcagcgcaccgcctttgatcttgctggaataacgcgagccagtcggaaagatgatagttgagcgatcaccatttttaagcagtttgaccggtgttttaatagcagaagggccgggatttttgcggttgacgggaaaagcccccagcttgcgcagaaaccaattggcaaaccgccccttaaaaagctcttctttagccatgaacgtaaatttcttaggatagactgccagtgctaacaataccggatccaaccaggtacgatgtggtgcgacgataatgtagttgccctcgggaaggcgatctttatgttcaatctgaggccggccgttaaacagcgttaacagcggattgaccagatgaaccaagaaatcatagagcatttaaacaactcccaatttttaaagtaattttatatatttagtatgacgaaccatactcaaacatgcaagcaaacatatacagctacagtaaattattagcaaccaagtgaggaaaaatatgacaaccgttcagcttaaatcaaacgagcgcattgatcagctcagcgcgcaaggagtacaaatcattcaatccagtgaagtttttgctttttcattagatgccgtgctgctggctgattttgtgcgaccaaatcagcgtcaaaaaatcaaaatcgtggatctgtgtgccggcaatggcgcaatcggtctgtttttgcatcataagctgggcgggcatttttatgaaatcgagctgcaggaacggctggctgacatggctcggcgatcagtagccttaaatgatctgacagcccgctatgaagtgatcaatgatgatgttgccaacgtctaccgatacgtagccaaggaccgagccgatgtggtcgtgtgcaatccgccttattttaagaacgcgccggccagtcaaaaaaatccaaatcgctatctggccattgcccgtcatgaattgacaattgatctggcaatggtctgtgatcggatgagcggccttttgaagatgaatggacgcggctatctggttcatcgaccggaccgcctgccagaaatcttagcgacaatgacggctcatcgattggcacccaagcggatcaagttcgtatatcccaaaccaggcatggaggccaatatagtgctgattgaggcaattaaagacggcaagccaaatgggacgcggattatgccgccgttgatcgtagcgggcgaagatggtaagtatggtccggaagtgcaggcgatgcttaatggctcaaatatctgagcagcattattatttttacgttctctattgtgcggatcacacgctttatggcggctactccacggatgtctggcgccggtttgcgatgcatcaatccggcaagggagccaagtatacccgaccgcagaaacgccatccgctcaagcttttgtactatgaggagtttgataatcagcatgatgcgctgagtgcggaatggcattttaaacatcagtcgcgcgctaagaaaatcgcttatctgcgtgctcataatattaaaatttgattaaagattcttccattcaagcagatctgtctgtataatcttttttggagataaagatttgtttatgtagtggaggaatttgagatatgaagattattgcgtacgggattcgtgaagatgaacgtccttatgttaaaaactggcaatgggccaatccagacgttgagctgatctgtacggacaagccgctggacgttgagtcggctgaattggccgcgggctgcgatggtgtggttgcctaccagcagaaaagctactcggctgaccttttaaaacggctgcatgagatgaacattcacaacctttctttgcgtaacgttggcgttgacaacatcgatgctgaagcggcagtcaagtatggttttaagattaccaacgtgccggtctactcgccagctgccattgctgaatttggcgtcacgcagctgctgaacctattgcggcgaactaaggaatttcagaataagtttgccaagcgcgactatcgctgggcgccaaacattgccagcgagctcaatcaacagacggtcggcattgttggcgcgggtcatattggccgagttatggcgcatatctgccggggctttggtgcccgagtgatggtctacaatcatcgtcctaagccagatctggttaaagctggcgtgtttactgattctttagatgagctgtataaagagtcgacggtgatctctttgcacgtgccagccgttaaatcaacttaccacatgctcaatcgggatgcctttgccaaaatgcaaaagggtgttttgatcattaatatgtcgcgcggttctttaatcgatgagcaggatctgattgaagcacttgatagcggccaggttggtggggctgccctggatgtcttggaagatgagaccaagatttttaacaaggatatggccaatcagccgtccaactatccggcatttgataatcttgaatcgcgcgagaacgttttgattacgccgcatactgcattctataccgatgaagccgtgcgcaatatggttgagcagagtttggatgccagtcgtgaattgatcttgacgggagccagcgacaaactggttaaactaggataataattttgacacgatgttttgcagacatcgtgtttttttgattatgaaattggaattttagaagcgttttctcatcatttaggtttcttttgaagagctttcataaacaaaaatagctaaaattgttaaactatgaacttttgggttatactggaagtaacaatgaaaaacaactaagccaatcggaggtatgaaatcaatgaagatcttagcttatggtattcgtgaagatgaaaaacctttcgttaaggaatgggaacaagaaaacccagaagttgaagttgaaattaccgacaagctgttggatgaagaaacggtcgcaatggcaaaaggctttgatggggtagttgtctaccagcaaaagccatataccgatgcggtttttgaaaagctggactcctatggcattcataatgtttcactgcgtaatgttggggttgacaacatgaacccagctacggttaagaagtatgggtttaaggttaccaacgtaccggtatattcaccagctgccatcgcagaattttccgttacgcaattgatgaatctgttgcggcggaccaaggaatacttccacaagtttgagcgtggcgacttccgctgggccccacagatttcccaagaactgaatcagcagacggtcggcgttatcgggactggtcacattggccgtgttgcgatcgatatctacaagggctttggcgctaaagtgatcgcctatgacgtttatcacaatcctgaactggaaaaagaaggcctttacgttgacactttagacgagctctatgccaaggccacggtagttacgctgcatattccgctgttcccatcaactgagcacatgctgaacaaagcagccttcgataagatgcgtgatggcgtctttatcgtcaatgcctcgcgtggtccgctgattgacgagcaggctttgatcgatgcgcttgactctggcaaggttgccggggcagcattggatgttttggaagacgaaaccaaagtctttaaccacaacatggtgggcaagaacatgacctatccagaattctggaatctcaattcgcgtgaaaacgttttgatttcgccacacacggctttctacaccaacattgccgttcagaacatggttaagttcagtctgtcagccaacaaagacctgattgaaacggggacctctgataagctggtcaagtttgactaattcaaataattgaagaaaaaaggcttgcggtggcaagtctttttttgtatactatcagtcggtgctaaatgcccaattcacacctggcgggatgtcagaggaagtgccagctggtgcccctgacagatgaacggcagggaggaaaaaactatttggaggtatgattcatgtctgttgttagcatgaagcaattgcttgaagccggtgtccactttggtcaccaaactcgtcgctggaaccctaagatgaagccattcatctttacggaacgcaacggcatctacattatcgatctgcaaaagacggtcaagatgatcgacacggcctacgactacatgaaggacgttgctgctaagggcggcgttgttctgttcgttggtacgaagaagcaagcacaagactctgttgaagaagaagctgtgcgtgcaggtcaatactacgtcaaccaccgttggctgggtggtaccctgaccaactggaagacgatccaatctcggattgctcgcctgaaggaattgaagaagatgagcgaagacggtacgttcgacgtactgccaaagaaggaagtttccgtgctgactaagcaacgcgaaaagctggaacgtttcctgggcggtattgaagacatgccacgcatcccagacgttttgtacattgtggacccacacaaggaacaaatcgctgttaaggaagctcaaaagctgcacattccaatcgttgccatggttgacaccaacactgaccctgacgatgttgatgttatcatcccatccaacgatgatgctattcgtgccgttcgtctgatcacggctaagatggcagatgctgtcatcgaaggcaagcaaggccaagacgatgccaagcaagccgaagcagtcgttgaaactgctgacgaaccaaaggaagtttcttcagacgatctgcaaaatctgaagaacagcgttgaaggcaacaactaaccaaattagttaacgcttgggctgttttgcagtttggaccattttggcctaagcgcaaaacagcctttttcattaaaaacaactatttttaaggagagacgtactcatggctgaaatcaaagctaagcaagtaatggaactgcggaaaaagtccggtgccggaatcatggacgctaaaaaggccctggttgccagtgatggtgacatggacaaggcaatggactggctgcgtgaaaaggggattgccaaggctgccaagaagagcgaccgcatcgctgctgaaggtctgaccaacattgctgttgacggcaacacggcagttatcgttgaattgaactcagaaacggactttgtggctgcttctgacccattcaaggaatcactggctgacgttaccaaggtgctgctggaaaacaagccagctgacctggacgctgctttggcttccaagacggccaacggtacgctgaacgatgacctgatctccacgactcaaaagactggtgaaaaggtttctctgcgtcgctttgcctttgttaacaaggaagacggcgacaactttggtgtttacctgcaccaaggcggtcggattgctgcgctggtcgttctgcaaggcgctgacgaagaaacggctaaagacgttgccatgcacgttgctgccgttaacccagaattcatgacgcgcgaagaagttccagctgatcgtctggctcacgaacgcgaagtcttcaaggaagaaacgctgaacgaaggcaagcctgaaaagatcgttgacaagatcgttgaaggccgtcttaacaagttcctgtcccaaatctgcctggcagaccaagactttgtcaaggacccagacgtaacggttgctgaatacgttgaatccaagggtggcaagctgaagagcttcatccgctacgaagtcggtgaaggtatcgaaaagaagcaaagcgacctggctgctgaagtcaaggaacaactgaagtaattcgttaattgacgaaattgcgcactggtcgatgacatcggtgcgctttttttgcaaaatcatgcatagcaggaaggaatttcaaatgtctaaagtaaaatacaaccggatcgttttgaagctcagtggtgaagctttggcgggtgaaaaaggctttggtatcaatccgccggtaatcaagaagatcgctgaagaaatcaagcaggtctgcgatttgggcgttcaagtctgcatcgtctgcggcggtggcaacatgtggcgcggcgttaccggcgaacaaatgggaatggaacgtgctcaagctgactacatcggcatgctggggacgatcatgaacggtctgtcgctgcaggatgcgctggaatcagttggggtgccaacacgagttcaaacggccattgaaatgcgtcagattgccgaaccatacattcgtcgcaaggccatccgtcacctggaaaagggtcgtgtggtaatcttctctgctggtacgggctcgccatacttctcgactgacacgacggctgcattgcgggctgccgaaatggatgccgatgcaatcttgatggctaaaaatggcgttgacggcgtctactctgctgatccaaacaaggtcaaggatgccgttaagtttgatcatctgacgcacatggacattttggacaaacacctgcaagtgatggactccactgccagctcgctgtcaatggacaatcacattccattggtagtcttcaatctgaacacgcctggcaacattgtccgtgtcgttaaaggcgaagagattgggaccacgattgagggggaataaataatggctgaaggtaaacaaatcctggcagaagctaaagaaaagatgagtaagtctggggacgcattgcggcgggcactggctgatattcgggccggtcgcgccaacgccagcttgctgaactcggttaaagttgagtactacggtgtgccaacgcctttgaatcaggttgcttcgattacgattccagaagcacggcaactgctgatctcaccatatgatgaaagtctgcttggtgaaatcgaaaaggcaatctatgcttccaatctgggcttgacgccacaaaacgacggttcggcaattcggctggtaattccacagctgactgaagaacggcgtaaggaactggtcaagcaggtcaaggcggaactggaaaaggccaaggttgcggttcgtaacgtgcggcgcgaagctatggacgacctgaagaagggtaacaagaacggcgactttaacgatgatgaattccacaagctggaagacaaggttcaaaaagaaactgatgaaggaatcaagaacctggaaaagattgccgacgaaaaagaaaaagaactaatggaaggttaagttctatattctaattcgaaagagaaatcagcgcacttcgcgttggtttctttttatttttactgaggaccgcgcttgatctgttaaaatctggcttaatattatgcatagttggtgacaaatgtagagtcaggcctagatttctggtaaaatgaaaagtgttgcaattaaaaacaatgcggaaatggagggttgttcttgtttaacaagaatcaccaggcggcagacgagccgcaattggatatgtcccgcatcccagctcatgtcgccattatcatggatggcaatggccgctgggcgcaggcgcgacacctgcctcgcgtggcgggtcacaagcagggcatgcagacggtgaagaaagtcacgattgctgccagcgaccttggcgtaaaagtactctcgctttacgctttttcaacggaaaactggaaacggccagaaagcgaagtcagctacttgatggatttgccgattcgtttctttaatacgtttgtgccagatctggttaagcataacgttaaggtaacggttatgggcgatatcaccaagctgccggaaaaaacgcaaaaagccgttaacgatgcgatggcagataccaaggactgtgacggcatgattctaaacttcgcgcttaactatggtgcacgtgatgaaatcaaacgggccgtgcagtcaatcgcacaacgggctgcagctggcgaacttgatcctgcttccatcactgaagatacgatcagcggacatctgatgtcagcacagctgggcgagtttgccgatcctgatcttttaattcggaccagcggcgaagagcggatctcgaactttatgctttggcagattgcctacagtgagctgctgttcgtgccggaacactggccagactttgatggcgagacgctcaaacgctgcctgattgaatttcaagggcggcaccgtcgttttggcggtttggtaaataaatagaaacgggtgaagattagtgaaaacacggattattacggcggtcgttgccttggcgatctttattccactgattgtctacggtggctggccattaacgattgcggcagttgtcttaggcatgatcgcaatgggcgagattctgagcatgaaaaagatgtttttgacgtcttttccagcgatcgtcagctacattggcgtggcaatcatggttctgcccaacagctggctggactttttgccgagtcacattacgcggctgtttgccatgtacgtaatggtgctgcttttattgctgcatacggttgtgcataaacagcgcttcagctttgatgatgccggggtcttggcattgggcatgctctacatcggcattggctttaacaatttcttggcagcccgggccgtcagctttacgacgcttttgtatgccatgctgatcgtttggctgactgacagtggggcctacttgtttggccgcaagctgggcaagcataaactggcaccgcgcgtcagtccgaataaaacctgggaaggctcgatctgcggcacgcttttggccacggtggttctggccgtttatctttatttcttcccggttggctatcacaactggggtttgatggtctttttgacgctgctgctctcgattctgggtcaattcggcgacctggtcgaatcagcactcaagcgattctacggcgttaaggactccggtaagatcctgcctggccatggtggtattttggatcggtttgacagcatgctactggtcatgccggcgctatacctgctggggattatctaagctggccgaaaggtgaggcgattctgtgatattaacgattattacctttattattgtctttggactgttggtcttggtacatgaatatggccactactactttgccaagcgggccgggattctggttcgtgaattttcgattggcatgggccccaagatctggtggcatcgcaaaaatggcacgacctatacgatccggattctgccattgggcgggtatgtccggctggcaggtgctgatgaagaagatgaagagtcgctgcgtcccggaacgccggttgccattcagctcaatgaccagcaaaaagtcaccagcatcaataccagtgataaaaacacgctgtttcaaggcatcccattgcagctgattgatcatgacctgaatgaaggcttatggatcaaagggtatgtcaatggcgatgaaagcacggtcaaaacatacgctgtcgatcatgacgctacgattatcgaaaatgacggcacggttgttcagattgcgcctaaagacgtgcagtttcgttctgccagtctgggtaatcgcatgctgaccaacttcgcggggccgttcaacaacttcttgctgtcgttggtcgtctttattattctgggctttacgcttagcggtattccaaccaacagcaatcgactgggcgcggttcgttccgactcggtagcggctaaggcaggtttgcggaccggtgatcggattaccgagatcaatggtaaaaaaaccaagaactggactgctttggcaactgaaatttcgggtaatcccggcaaaaagctgacagttgagtatcagcgcgatggtcatcagcataccacgacgatgacgcctaaaaaggtcaagcagggaaatgaaacgattggtcaagtcggcattgtcgaagaacaaaaaaccgatgccaaatcaagaatcacgtttggctggcagcggttcgtccaggccggtactctgattttcagcgtcttaggtcacatgtttacacatggctttagcctcaacgacttaggtggaccggtcgcgatctatgccggcacctcgcaggcgactgcattggggatcaatggcgtgcttaatttcctggcgcttttgtcgatcaacctgggaatcgtcaatttgctgccaattcctgctcttgatggtggtaagctgttattgaacattatcgaggcggtcatcaggcagccgattcccgaaaaagctgaggggattgttacgattattggttttgcctttttgatgctgttgatgattctggttacttggaacgatattcaacgctactttattcattaaaaatcttggctccgtttcatgaagccgttcaaaggagtatttttttaaattatgaagcaatcaaaaattttgattcctaccaaaaaagaagcaccagctgatgccgaagcgctcagtcataagatgatggtgcgggctggctacatctatcaggtctctgccggggtctgggcttatctgccaatggcctaccgggtgattcgcaaggttgaaaacatcattcgcgaagaaatggacaaggctggtgccgttgaaatgatgatgccggcgctgctgcctgccgatctgtggaagaagtcgggccgctacgaaagctatggcgacaacctgtttaagctcaaggaccgccgcgatcgtgaattcatcttgggaccaacgcatgaagaaacgattaccagtattctgcgtgacagcgtgcagtcatataagaaactgcctttagtcgtttaccagctgcaagacaagttccgtgatgaggatcggccacgctacggtatcctgcggggtaaggaatttgaaatgctggatggctactctttctctgccgatcaagcaggtctggatgaggcatacaacctgcaggctaaggcataccgcaatatcttcgacaagattggcctggactacaaggtgattctggctgattctggtacgatgggaggcaagaactcccaggaattctccgcaccagctgaggttggggaagatacgattgcctacacggatggaacctatgctgccaacctggaaaaagccacgagcaagtttgtcggcgtccagcagacggctgatccggctgaactgcaaaaacaggctacgccaggtgcgcacagcgttgatgaggcagccgaaagtctggggctggaaagcagtcagatcatcaagtcgatgctgtacatggctaagatggatgaagaagaaacggtgccggtactggtattgatgcgcggcaatgacgaggttaacgaaaccaaagtcgaaaacgcgctggactgcgaagagcttagtctggccactgaagaagacgcggaaaaatatctgggtgcgcatcctggttcgcttggtcccgtcggcgtgggtgaagaagtcaagatcctggccgacaactacgtcaaagtcctggtcaacatggcctgcggtgctaatgaagacggcttccactacgtcaacgccaatttagatcgcgacttccgcgttgatgagttcggcgacttccgtaacgttcaagaaggcgaaatcgcgccagatggtcagccaatcaagtttacgcgtgggatcgagctgggacacatcttcaagcttggtacgcattattccaagatcttaggtgcacaggtgctggatcaaaacggccgacaaaccgatatggtaatgggctgctatggtatcggtgtctcacggctgctctcggcagttgctgaacagacggctgacgaacatgggctggcatggccggacagtatcgcgccatttgacgtacacgtaattccggttaacgctaaaaacgaagagcagatgcagatggctgaaaacatcaccaaaaccttggaagcagctggttatgaagtactgctcgacgatcgtaaggaacgggccggcgttaagtttgccgatgccgatctgattggtctgccattgcgggtcacggtcggcaagaaggccagcgaaggaatcgttgaagtcaagatccgcaagaccggcgagacgattgaaatcaagcaggaagaaattgaaaacacggttggcattttgcttaagcagctgacgccagctaccgagacagccgctgactgattattgagcggcagactttacaaaaggtggtttaaaggtagaatagattctgcttttagccgctttttttaatgaaatcagagaggagcattggagtggagttatcacgacatgaactgtttgaacacttgctggatcagctgaacatggctaaagacgatcctgcttttaaagacggcaagatcaagcaggtaatcgttcaccgcaagtccaagtgctgggaatttgatatcgtcctgcgcaaggtaatgccttatgaattgtttcgccagttcgtctcagctttgcagatcagttttcgcgagctggcgggcgtggatgccaaagtcagaatcgatacgccgactgatgaattggatgctaaggcaatcggtgactattggtcatacgtagtcgatgccgaagtcggtgaatccccaatggcacgcgaggtctgcgccaagacgattcctgaagtcgatggcaaccgagtgcagctgctgttggaaaacgaggccatcaaagactttttcgtcaagaaccttttaagtgcaattgaagaaggctatcaaaaagtcggttttccacagtttcggattcatccattggtcgatcagtcagcttccgaacaaaaaatcaaggagctcaaggccaaacagcagcaacaggaccaggagctggttaaaaaagccatggagcgcctgcagcagcaaaaggccgaaaaaaagcagcaggaatccgcgctgcctgatctgggcgatggtcccctggtcattggcaagccgatcaatcctaaagaacccgtacgacggatggctgagattactgaagaagagcgcaacgtggtcgtggaaggctatgtcttttcaaaagaagtccgtgagctgcgcagtggccggcaactgctgattttggaagtaaccgactacacgtcatcgtttgccattaagaagttctccaacaacaaagaagacgaggccaagtttgcggcaatcaaagaaggcgagtggatcaaggcacgcggtccggttcaagaagacacctacatgcgtgatttgacgatcatggcctatgccatccagcaggtcagtcatcctgccagaaaggatactgcagaaggcgagaagcgggttgaactgcatctgcatactacgatgagcacgatggatgccaccaactcgatttctgattacatcaaacaggcggaaaaatggggaatgaaggcaattgcggtcaccgatcatgccggcgtccaggcgttccccgaagcgtttaatgccagccacgacaaaaagggcaatgccaagatcaagattttatatggggtcgaggcgaatgtcgttgatgacgggattccgctggtctataacgaaaaccatgatgagcttttaggcaatacctatgtcatctttgacgtggaaacgacgggactttcagccatctatgacaaggtgattcagctgtcggccgttaagatgcgggatggcgaggtgctggactcgtttaatcagtttatcgatccaggatttccgctttctgaacagactaaggaactgaccaagatcacagatgaggacgttaagggatccaaatcggaaactgaggtctttcagatgttccaggacttttgtgaaggctgtctgctggctggacacaacgtcagctttgacatgggctttttgaacaccggttatgaacgcgatggcttgccgcgcattacggctccggttatcgataccctgccgctggcgcgcttcttgcatccagaaatgcaccggtttacgctggatacgctgagtcgtaagtttaaagtcgggcttgatcatcaccaccgggccgaccatgatgccgaggcgacgggacatctgctgcatatctttttaagggatgccgagaagcgctatgatgccaaatacgttgatgacttaaacaagcatatgtcagacaatggcgcctatcgtcatggccgaccgtttcatgccacgatttttgccaagaatcacacggggctgaagaatctttacaaactggtctcattggctaacgtcaaatacttctaccgagtaccgcggattccgcgcagcgtgctcgaccactatcgcgagggcttgctgatcggtacggcctgctcaaaaggcgaggtctttactgcaatgatggaaaagggctatacggatgccaagcaaaaagcgcagtactatgactttattgaagtgcagcccaagcctaactacgcgcctttgatcgagcagcagatcatctcaaataccgcgcatctagaagacattatcaaaaacatggtcaagctgggagcagatatggacaagccggtcgtggcaactggcgacgcgcactaccttaatccggaagacaaaatctatcgtcacattctgatcaattcgcaaggcggtgccaatccgcttaaccgtacgcgccggcctgacgttccattccgcacgactgatgatatgctcaagcagtttgcgtttttgggtgaagaaaaggcgtatgagatcgtggtggaaaataccaatcggctggccgctgaaatggatgagatgcggccggtgcaagactcgctgcacacgccgaacatgaagggtgccaacgaagaactggccaagcgaacctgggatacggcccatgcctggtatggcgatccgttgccaaaactggtcaaggatcgggtcgaactggagcttaactcaattattggcaatggttacgcggttatttatctgattgctcagcgtttggtagccaagtccaataaagacggctatctggttggctcgcggggatcggtcggctcatcagtcgtggccaatctggcagggatcacggaagtcaatgcctttccgcctcactatcgctgtcccaactgtcaatacagccatttctacacaaaaggtgagtacagctcgggctttgatatgcctgacaaagactgtcccaagtgcggtactttgatgatcaaagatggtcacgacattcctttccagaccttccttggctttaagggcaataaggttcccgatatcgatctgaacttctctggcgactaccagccaatcgcgcataactatatgaaagtgctgttcggcgaaaagaatgtttatcgagctgggacgattggaaccgtggccgataagactgcctatggatacgtcaaagcatttgagcgcgacaccgagcagcagtttagaggcgccgaagaagaccgtttggcaaaaggcgcgaccggcgttaagcggacgaccggtcagcacccggctggaatcatcatcgtgcctgatgacatgagtatctatgactttacgccggttcagtatccagccgatgatcaaaacgcggcctgggaaaccacgcactttgattttcattcgattcatgacaacattttgaaaatggatattctgggacacgatgatccgaccatgattcggttcctgcaagatctttcaggcgtcaacccccaaacaataccgatggatgatccgggcgtaatgagtctgttctccagccctgacattttaggcgttactgaagaacagatccaaagtaagacgggaactttggggctgccggaattcgggacgcggttcgtacgggggatgcttgatgacacgcaccccaagaactactcgcagctgctgcagatttctggtctttcgcatgggactggcgtgtggctggataatgcccaggaactgatcaaaaacggcacggccacgattgccaacgttatcggctgtcgtgacaacatcatgaccgacttgattcactatggcctggattcagaaacctccttccaggttatggaacacgtgcgtaaaggacgcgggatccccgatgaatggcaggaaaagatgctgcaggccggcgtgccgcaatggtatctggattcctgtctgaagattcagtacatgttcccaagagcgcacgcggcggcatatgtcttgatggcgctgcggattgcgtactttaaggtctacttcccgttggtttattacgcgggctacttttccgtgcgggcggatgactttgacgtcgtggccatggctcatggtaaggatgccgtcaaagcgcggatgcagcagatcaatgatcagggcaatgaggccagtgccaaggacaagagcctgctgacgattctggagctggccaacgagatgctggagcggggctacaactttgaaatggttgatctgaatcgttccgatgccactgactggctgattgacggtgattcgctgattgcaccgttcagagcgattccgggtctgggggtcaatgttgccaagcagatcgttgccgctcgagcacaacggccattcctttccaaagaggatctttctgagcggggaaaggtctcgcagacgctgattcagtttatgacagctaatcacgtcttagacgatctgccggatgaaaatcagctcagtctgttttaaccacggctgaatcgttgactgccatggctggtaatctgatcaaattagtttcaggctggtttttaacgatcttgattttagtctgatcagtgggcaaatgctgctcatggttgctaagccagaataaagatgctatactatcaatagtgaataactcgttagggagtgagcagcaatgctcgctctttttattgcaatgaaattggaggtggcggatttgagcagtacggtggttgacgcggtcgaaaagctggttgagccgatcttgaccgagcatgactttgagctgtatgatatcgaatttgtcaaagaaggacaaagctggtatttaagagtctacatcgacaaagacggcggcattacgctggaagactgtgccacggttagcgatcagctgagcgaggcgctggataatgccgacccagacccgattccccaggcatactttttagaagtatcttcaccaggtgcggaacggcctttaaaaaaggaaagcgactatcagcgggcactgaacgaatatattcatgtctcgctgtaccaggcagttgacggccgcaaggtctatgagggtacgatgactgatctgacgcctgacagcttaaccttggattatttggataagacgcgacacaagacgattacgctggatcgtaaaaaaattgccaaggctcgcttagcaatcaagttttaataaaggagcagcaaaatgagcactaagaagcaaaagcaagcacaagaactgcttgatgccatgaacgtcctggaaaaggaaaagggcatcaagaaggaagtcgttatcgaagcattgacggatgctttggaaaaggcctacaagaccaactacaacgccagcaacgttgaagtaaagatcgatgaaaacacgggtgagttcaaggtcttttctgacaagacggtcgtggccgaagttgaaaaccctaaagaacaaatcagtctgcacgatgcctgggaaaagagccatggctacagcctgggcgacactttccaagaagaagtgacgccgcatgactttggccgcctggcagcgcaaacggctaaaaacatcgtcctgcaaaagctgcgtgaggctgaacgcgaccgggtcatcaacaagtatgacaaaatgctgaatgaattggttgaaggggaagtctctcgtgaagacaaccgctttatctacattgaccttggcgatggtgtggaagctggcttgagcaagcgtcagacgatgcctaacgaagagtaccggattcacgatcgcgtccaggtctacatctacaaggtagccgatgccaagccaatgcagcagccagatggcacgcaaaagcgtcaataccgtggtccgctggtcttggtaagccggacggatccaggcatgctcaagcgcttgtttgaaaaagaggttcccgaactcaaggaacaaaacggcccaatcgaatggaagggcagtgcacgggaagccggcgatcgttccaaggttgccgtagcttcaaaagacccgaacatcgatccggttggtacctgtgttggtccacgaggcgcccgggttcaggcaatcgtcaaccagctgggcggcgaaaacatcgatatcatcgaatacagctctgacccagcgatcttcatcaagaatgccttgaagccagctacggttgaccgcctggactttgacgacaacaacggtgaagaagaggatacgggcagcgttgatcacgaaggcaacaagatcgtcaaggttcatcatggctgcacggtctacgtaccggacgatcagttgtcgctggcaatcggcaagcgtggtcaaaacgttcgtctggctgctcagctgaccaagtacaagattgacatcaagccatccagtgaggcaccggctgtcgaagatcaaactgatgatttcgctgatgatgctcaaaacgatgcaatggatggcgaataagactacaatagaaaaagaaattgaagcaagattgaatggaataaattgagcagcggggtgaaacaatgaaaaagagaaaagtaccgatgcgcaaagacatcgttaccggcgaaatgatgcccaagcgagagctgattcgcgtggtgcgcaacaaagaagatgaagtcagcgtggacccaaccggtaaaaaggctggtcgcggcgcctacattgccgcggatgtaaagattgccacgcgggcaaagaaggaacgcacttttgataaggcattcggcgttaagctggatgatgccttttatgatcagctgattgactatgctgatcacctgcaggaacggatcaagctgtttggtcacgtttaatgacagcttcagaacagcagatcttgaaccttttgggattagcccggcgcgcccgtcagattacggctggggaaggattggtcttaaaatcgatccgcaatcatcaagccaagctggtttttttggcagctgacgccggtcattccacggtcaagcagtttatcaataagtgtaattattatgaaattccactgatttgccgattcaataaagccgagctaagtcaggcgattggacaggcacgaacggtggttgccgttgaacaggccggttttgccaagcgcatgatcgaactgtcaaacgacgctgaagaaacaacaaaataaataaaggagcgtgattcgatggccaaagaacgaatttacgaactagccaaagagctgaaaatgccaagcaaggacttggtggatatggccaaaaaggagggaatcacggtgaaaagtcatatgtcttccgtgacctcagaagaagccaaccgtctgcgcagcatggccaagggtaccaataagccagccgctgccaaggccagccagccaaagcaggaacagccaaagcgcccagaacacaacagccgtccgcaaaacggtcagcagtctcaaaacaacaatcgccacagtaacaacaaccgtggcggcaatgatgacaatggccgtggcgttcacgttttcaacaaaaacaagaacaacaagaagaaccgtcgcaataaaaacaacaagcacaacaagaatcaacggatgcgcgaagtgaaaaagcagcagccaactcagcgtaaggatcgtccattgccagatgttcttgaatacacggaaggcatgaacgcgcaggatctggctaagcttttgcaccgtccagcagctgaaatcatcaagaagctgttcatgcttggcgtcatggtcaaccaaaaccaatccctggatacggacacgattgagcttttggccgctgattatgggatcgaagccaaggaaaaggttcaagaagacattgccgacttggacaaattctttgatcaagaaaaccaaaatacggaacacatggtatcgcgaccaccagtcgttacggttatgggtcacgttgaccacggtaagacgacgcttttggataagattcgtcactcccacgttacggattctgaagccggtgggatcacgcaggcaatcggtgcctaccaggttgactacaacggcaagctgatcacgttcttggatacgccaggtcacgccgcctttaccgaaatgcgggcgcgtggggccaacattaccgacatcacggtcctggttgtagctgccgatgacggggtcatgccacagacggttgaagccatcaaccacgccaaggctgcccacacgccaatcatcgtcgctgttaacaaggtcgacaagccaggtgccaatccaaaccgggttatcgaagaactggcccagtatgaattgatcccagaagactggggtggcgacacgatctttgtcaatatctcagctaagtttggcaagaacatcgatgaactgctcgacatgattctgctgcaggccgaaatgatggaattgaaggccaatccagatcaaaacgccgcgggttccgttgttgaagcccgattggatcaaggtcgcggtcccgtagccacgctgctggttcaacaaggtacgatgcatgtcggtgacccaatcgttgtcggcaacacgtttggccgcgtccggacgatgaccaacgaaaacggtcgtcgcatcaaggaagctacgccatctacgccagttgagatcactggtttaaacgatgtgccagaagccggggatcgcttcgtagtctttgacgatgaaaagacggcccgcgcagctggtgaggaacgggcaaagcgcgccttggttgaagaacgtcaaaagactagtcatgttacgctggacaacttgtttgccacgatgaagaagggtcagatgaagacactgccggttatcatcaaggccgacgtgcaaggttccgttgaagccctggcgcagtcattggaaaagatcaaggttgacggcgttcgcgttgacatcatccacaaggccgttggtgccatttctgaatccgatgtcacgctggccgaggcttccaatgccgttatcattggctttaacgtgcgccctacgccactggccaagtccatggctgaatcaaacaacatcgatatccggctgcaccgggtcatctacaacgcgattgaagaagttgaagatgccatgaaagggatgctggaaccggtttacaaggaagaaacggttggtcaggttgaagttcggcaaatctacaaggcttccaaaattggtacgattgccggtgggatggtcatcgacggcaagattacgcgtgattccaaggtccgcctgattcgtgacggcgtggtcgtttacgaaggcgaactgggcagtctgaagcgtttcaaagacgatgtcaaggaagtcaagcagggctatgaatgtggtctgacaattcaaaactacaatgacatcaaggaaggcgacgttatcgaagcttaccagatgaaggaagttcccgttaagtagcttctagtcgctaaaggagaaaaacatgccaaataaacgctatcgggtggatcggctggctgaacagattcagcgtgaagttgatgacatcctcttaaagcgcgtgcgtgatccacgagttcaagacatcacgatcacgggcgttgacgttacgggcgacctgcagcaggcgacgatctactacagcctgctgtctgacaaggccagcgatggcgagaaggctcaacaaggtctggacaaggcaaaagggctgattcgcagcgaactgggcagtcgtcttaacattttcaagactccagagctcacgtttaagcgtgatccatcggttgcttatggcagtcggatcgaccaattgatcaaccagctgcacaagcaggagcgataatcagttaaaagggagcccagcttgcggcccccttttattatttcaaaaaatgaaagcggtgaaatttttggacgggattattccattgtacaaagaacgcggcatgaccagctttgactgtgtcagtcggttgcggcgaattctgcacacgaaaaaaatcggtcattcaggaacgctggatccaaacgttgatggcgtcttgccgatctgcgtgggtcaggctaccaaagtcgttgagtttttgatggcctcgggtaagcaatatgttggcgagcttttagttggtcaggcgacgacgactcaagatctggatggcgaagtcgtggcccaaaagccagtcacggcaccaattgatgaaaacacgatcaagcaggccatgcaggagctgaccggtgacattgttcagattccgccgatgtattcggcaatcaaggttaacggcaagaagctctatgaatatgcccgcgctggcgaaaccgttgaacgtcccaagcgtcacgttcacattgcgcgctttgaaatgacggcttccagctatgatgaaaaaaagcagcagcagcggattcgttttgtggtcgactgcagcaagggaacctacgtgcggacattggcctatgatctggcagaaaagttaggctatcctggcgtaatgagcagtctgacacgaactaagagtggcggctttgaattggatcagaccctgagtctaagcgatattcaagatgccatggaagcccagattatgaatcgctatgtctatccaatggactatgccttgcagaactatccacatcttgaattgacggaagcgcaatggaaaaaggttcaaaatggcggctggctaagtggtctgaacacccaagaacctgaaatcgcgctgacttatcaaggtgaggtcaaggcactgtatcaggcaaaagatcagctctataaaccgctgaagatgctgtcgacaaagtaggtgggatagatgcaggttattaagattcatcatccatttgatccggcgttgataccagctggaccggttgttttggcaatgggcttttttgatggcattcatcgtggccaccaggcggtaatcaaaacggcgcgccgcattgctgacgaaaaagggctgccgctagccgtcctgacttatgatcatcggcctgagatcgtctatcagcagtatccagctggtggcgtgcattatctaacgccgctgccgcgcaaattggacttgctaaagcagctgggcgtcgatcgcgtttatctggttaatcttacttcggcgctgtcggctttagatccgcagacgtttgtggatcaatatctggtgggctttcatacgcaggttgccgtagctggctatgaccatacttatggagctgatcccagtgtggccaatatggcgcatctaaaagagtttgccaaaggacgatttgaggtagtagccgttgaaaaattgacgctgcaggataatcataaggttggctcaacacgcgtccgagagctgctggagcttggtgacgtgcaatcggtcaatgagcttttaggctacttttaccagacttctggcgtggtcgtgcatggctttgcgcggggccgaacattgggttttcccacggctaacgttgcctggcctgagttggaatggctgccggcaatcggtgtgtacgtggttcagcttaaaatcggcgaacgctggtatgatgggatggccagcgtaggtcgcaacgttacgtttggcgatcacaatgaaaaaacgcttgaaattaatttgtttgactttaatcagctgatctatggcgaaaacgtgcaggtgcgctggatcaaacggttgcgtggcgaggtcaagtttaacagcgtggatgacttgattgcgcagatgcggcttgatcagcatcattctgaactgacgctgcaaaatctcaaggctctgccaggtcagattttgcaataaattaaaagtaaacggtgccgattttttaccgacgccgttttttactgtctgcaagggtcggaatggtttgtgattaatcatgaagaactgccaattttaaatcagcagcgtgttacaataaacgcaaatcaatcgcgaggtgatatgatgaaaattggctttattggcaccggtgtaatgggaactggaatgattgccaacctgcttaaggcgggcaatcaagtccaggtctataatcgaactaaggagcatgctcaaaaagttttggacctgggcgcaaaatggtatgacacgccggctttggcaatgcagaactgtgaagtcgtgatgtcaatcgttggctatccaaaagacgttgagcagatctattttggcgaagatggcttgctgagcggagcagttgctggtcagtacttgattgatatgaccaccagtcggccagctctggaccaaaaaattgccgctgcggctccagctggcgtgcatattttggatgcaccagtttcgggcggagatctgggagcaaaaaacggcacgctgacgatcatggtgggtggtcaaaaggctgattgcgaatacttaacgccgctgtttaaacagattggccaagatgtcaactggtttggtcctgccggcagtggtcagcatgccaagatggccaaccagatcatgatcgccggaacgatgaccgggatgtgcgagatgcttgcgtatgccaaggctgctggtctggatctggcaacggtgatcaagacgatcggtgggggtgccgcggccaattggagtctggacaactacgcgccccgtattcttaaaaacgactttacgccgggctttttcgccaagcatttcttaaaggatctgcgaattgcgcttgatgaggctgcgcggatgaagctagagctgccggcgactaaggaagcagcgcgtctgtatgaaattctggttgatgaaaaacagctgggcaatgatggcacgcaggctttgatcaagttatggtgggattagcaaaaaatctcaatttatggttgacaatcagtactgatcgttatagtatgattacaataaaattagaaattgcttagaagagatgagtagtcgcgggcagcctttaaagagaaccggggtaggtgagagccgggatcgtgaaacgcgatgaagatggtcttggagcaagtcggtgggcgagccgtttggtaagccggccgcggggtgacgtccgatatcacggtccgggtcttctaattttttagagtactcagtaagggctagattgtgaggtctagctgaatcagggtggtaacacgttgaataagcagtcaacgtccctgggagaaagtgcaggatgtgcttttcccagggatttttaatttcctgagaagtcctgccaaacaagcattttcgaaaggaagttatcacatatgacgcaagcacaaactttaacttttaccaaccgcacgacttcaccattccgttatgacattgtaggcagtttcctgcgcccagccgaactaaaggcagcccgggaaaaatttgccaaccatgaaattgatcatgacgaactaaaagccgttgaagacaagtgtatcaaggagctggtcgcaaaagaggcacaagctgggctgcacgcggttactgatggcgagtttcggcgttcatactggcatctggacacgttctggggctttgaagggatcgcgcatactaagccggcacatggctaccgtttccatgatgaagaaacgcgggctgattcagctcaggttgaaggcaagattcgttttaacggtacgcaccccgatctggaagccttcaagtaccttaagcgcttaacggatggcacggacctgatcccacgccaaagcattccggcaccggcgcagctttattctgaacttttccgggatgatgagcacgtggcggccaccaaaaaatactatgattctgaagatgacctgatcaaagacgtagccgctgcctaccatgatctgatcttggcactgtatgatgccggttgtcgcgatgtcaagctggatgactgtacctggggactgctggtagatgaagactactgggcaactcgttctaaagaaggcgcggatcgggaaaaattggaggcaacctatctaaagatcaacaatgcggctttggctgatctgccggctgatcttacggttacgacccatgtctgccgcgggaactatcattcaacctgggcggccaagggtggttatggtccagttgccgactacctgtttgccaaagaagacgtggcagccttttatctggaatatgattctgaacgggcaggcggctttgaacccctggccaaggtaccagctgacaaatacgtggtcttagggctggttacctctaagtctggtgaattggaagagcggcaggcaattttggatcgtattcatgaagctgcgcaataccatgatttggacaagctgtgcctgagtccacaatgcggcttttcctcaactgaagaaggcaatattctgactgaagagcagcaatgggctaagattgcgttggtcaagagcgttgccgaagaagtctggggcgcttaaaccaagtcttaaccgctagcggatcggccacgctacgatagtctgcgtgagaattagtgggtgggaaagcgaaacggatcagtcaaatcctaaatttccaatacaagtactcttataactctccttaaatttaaaagacagcgcacctcaaaaacaaaaacgcggctgttccgtttataccaatgaaactacgcgacgcatttctgaaattaacgttctgacacctcaattaagaaaactcctgattaattactgaatcccaaaactcgcttggcagattttgccaggcgagttttttatttgcgcaggactccgaatcgctaaccagagataccgcacgcagtcagttttggtagtcgataaatggggtgtgtcaattcttaccgcagtcgtttttgactagcggtagaaaaaagcgaagcaatcagaaatttgcagttaggcaaggacttggtttcattgataagcagttgctcagcagtcataaagtcaaaggcggggatcaatgatgcggtttatgcaaaaaaatatgcataaaacatatgacaaaaagatcattacctacttttctcaaaaatcgattgcatagtaggtaaaaattaatgtatatcgagttagggttccctaacattacctactattagcggaaaattaccaaatagtaggtagttcacaaagtcggtctaacccaatcaaccccaatcagctcttaaatatacatctttacctactatttcggaaaaagatgctgaaagtaggtaaagttaaaccggccgagtatgcagctacctacttccgatcaaaaatcagcgtaaagtaggtaaatttggcccgcttaatctttgaatgactgctttctggaggatggctggcgataaaaggccacctgttaatactgaagtacccatgacaacagctgaaataccattgaccgtctgtctataacatgaaaaaaaactcatattaaaacatttttgttcattttaacaaatattaatttcttagattgttaaaaaatacaaagtaaaaacacgaacaataaatcttattatatcggcgttctggaatattaaataaattatacttatcgatttttaattttataacggatgaaatcagcctgatttgagttgtgcaaacgattttttgttgttgctttttaaattcgtgtctataatcgctcagtgaaatttgaaagtctatttaataccttttttgtagattaaagatacaaggtggggattaaaatggggagaaacaatcaaaatgaccggcaaaggcaattaatgtcgattttgccaagatatgctctgcgtaaaacaaagcttggctgtgtctcgatgttgattgcagtcggttttttccttggtggtgctaatgaactaaacgttaaggcagatgcgttgcccgcgcaaaatggcaaaacagctactgttcaaagcaaggctccatcagcagattatgaatccttggcagctgctgccgattcttttacagcttcggtaaacgagaaaagcgatcatccggcaaaagcatcgtccttaacagcaacaacaagtgcggcttcagtagctgccaatgtcgctgctgataatagtgatagcaaggtttcttgtgatgcgttaggtagtgtgcaggctgaggcttctactgacgactcgacagcggtctatcaaaacagctcggccttagtcagttcatcagcgcgaggccaagctggtgcagccattagcaattcagccgatagtgcgcaggatcccagcatggttatggccagtacagcccaaaaagtgtcagagccacctgccgttcaaggcaatgctactgaaccatcacttagcaatactactggtgcagtcatgaacgatccttcgctgccggctgaagacgtaaccgttgatgccaaaaacttcaatcactactttgatatgcatggtacggcaactgaccggcttaactctgatggctcggtaacgattacctttaccaaaaaagggcagcagtattcagctgggggcatatcgctaaaagaaaagatcaatatggacagcagttttaccctaaatggtcagatcaatctgggcaactttggcggtgctgatggcatgggaatcgtctttcatacgggaagcgttgctgcgcttggtcgacctggcggcaatctaggaattgcggggctgccggatgcggttggctttaagcttgattcctattatgactactacaatgagccaacctcgagtctgccaggcgatcagatcccgcttccgcaaaacggtgaggatgactccaaatatggccagtcacaggatccaacaatggccgttccatgtggcgatatcgttaccaccagtcatgaacaggttacaacgactactggcaaaaaggcttggcgatggtgggtcaataatcaagacggcacggttcagccactgactaccagtttgatggacggcaggtttcatgattttcaaatgcaatataacggtcaaacccatgtcttgacaatcaggctaaaagaaccagctggacatcttaatgacagtgttcagacgcatgaagatgagcaatgggttacgtggacctaccagattcctgatattcctggcaatggcaatgtcgcgatggcacttgatctggcggcgacgactggcgaattaaccaacctgcagcagtttagattgaccagctttactttttcgccagctgcttcagtcaacgttgaatatctcaatgaacagggtcagctgattcatcagactggcgttcactacagcggcgcgccggtaattggcaatacgtattctacggatcagcttaatcttcctggctatacatatattggcttgggaaaaggcagtcttgctccaagcggcacgctaagaaaggagggacttaacggtacggttatctatgtttatggtcgtaccgaaaagatcacggttaattatcaagatgtcagtgcggatgatccgcaaaatctcagtgggtatgatcaagaactgaccggtgccagaaatcagagttcagactatagtacggctaagacaatcaaagagctggaagcaaaaggctatcagctggtcaatgatccgactgacggtaaagtcttgaaatatggtgatggtgcgcaaagctatacggttaagctgaagcaccgtcatcttataattggtcccagtcattatcaagacaatggaattccgttgccaaataatccatcaaagacctatcaaggagtagagcgaaatgacttgaatcagcagaccacgcggatgattaagtatgagtttacaaatggcaagccggcagctgcggcagtaagtcagccggttgcatataccagaagtgctgatattgatgaggttacgggtgatgtggtctacacgccttggactgcagcgcctgcgaagtatccatcgattgcttcaccaacgattcctggctatttcacaaatacgccgtcagttgctgccgcctcgccaacgcttgggcaaaatccggttataacggtgatctaccagccatgtacagaaaagatcaggatcgtctatgaggatgtcagctctaaagatccgcaaagcctcagtcagtatgacaagctgctgacgggaaagtatggatcaagtgccgactacagcacggctgatacgatcaaggcgttagaacggcaagggtatcagctcgtcagtgatccaactgatggtcagattctcagctttaacgacaccagcgaacaaacctacgtaatcaagctgaagcgtcagccagccaatcctgatcatcatgccagcggttccgttaagttgccaacgtccaagccgactgatacgcaagggaaaggtacagcgtcgactgctgccggggtcaagactgatgatcatcaaatcaaacaacagtctttcagccagccgattgacggtcagacggatcagtcgggtaaagctcatcatgtcgtaattgccgattcaacgtcatctgctatccaattaaccaaaagcaacaattatgatgcggtttcagcccccaatgaaacggcatcagtcaaacatcttccacaaactgggaatcggcatgccgacttattgaccggcttaggactcttgctggctggaattggcggctggctgggctttgacgaggttcgtagacgtttcaaacgagtcttaaagtgaggcagacgtaatgaaaccattaatgaaaaaaattccgccataaaaggatgaatttgcatggatatcttaaggtagtcaagttttgcataatctcaattattaaaatctaatgaatgaaggcgaaagcttatggcaaatgaatcaatgaaaaccggtgccgaccttttaatcgacgctctgcaaaaaaatggactgcaaaatatttatggggtcgttgggattccagtaactgattttgcgcgtctggctcagctgcgcggcatgaagtactttggtttccggcgtgaggatgcggcagtggatgcggcggcagcggccggctatctgacacagaagccaggtgtggccctgaccgtttctgctcccggctttttaaatggtttgacggcattggcacaggccaccaagaactgttttccattgattatgatttccggctcatcggaacgtcacattattgatctggaccaaggcgattatgaaggattagatcaatacaacgttgccaagccgttctgtaaggccgcctaccgagtcgatcgcgctcaagacatgggtttggccgttgccagagcagtcagaacggcattgtcgggtcgtcctggtggcgtttatcttgatctgccagctgatgtgattggtcaacagattgaggctgccaatgatgaagatgccggaatctatgaagtcgttgatccagcgcctaaacaagctccaagcgatgaggcaattgagcgggccgtcaaggtgatcaagggtgcgcaaaaaccattgatcattcttggcaagggcgcggcctatgcgcagagtgaagagctggtacaaaaactggttgctgatacggacattccattcttgccgatgtcgatggcaaagggcttgatctcagatgaagacgatcattccgccgcggctgcccgctcgctttcgttaagtgaggcggacgtagtgattctgatcggggctcggctgaactggatgctttcacatggcgcggcaccaaccttcaacccagatgcaaaattcgttcagttggaaattgaagcgaccgagtttgattccaaccaaaagattgctgcgccactgcagggtgatttgaattcaattttgaccaaactggtaccagcgcttaaaaaggctgactatcacgctccaacagattggctggcggcaatcaaggccaagactgccgaaaacgtcgctaagtttgcgaaacgcgttgaagccggcgaaaccaatgccaagtttggctactatggtgcgttggaaccaatcaaagagtacttcctgcagcatcctgatacctacctggtttctgagggtgcaaacacgttggacattggccggaacatgattgacatgaaactgccgcgtcaccgtctggacaccggtacgtggggcgccatgggcgtcggtttgggctatgcgattgccacggctgttgaaactggcaagtcagtcgttgctttggaaggcgacagcgcgtttggctttgatggcatggaaatggaaaccatctgtcgttaccacctgccaattaccgtcgtcgtaattaacaatggtgggatctacaatggtacggaccgtgaagttgaggatcaaccaggcccaacaatgctggatgctcaggcaaggcacgaatatattgctaaggcatttggcggcgacagctactttgtaagcagctaccaggaaatgaaggttatctttgcaaaggcggttgaatccaagcggccaaacattatcaacgtccagatcgacccatccatgggtaaggaatctggtcacattggcaacttgaatccaaagctggacctgaaaaagtagtgaaaggggcagagaattatggttgaagaaaagacgaatgaatacgcaccattaaagggaatcaaagtcgttgactggacgcaggtacaatccggtccttcctgtacgcagctgttggcttggctgggtgctgaagtcatcaagatcgaacggccagacaccggtgatccaacccgtaatcagttattggacattcaggattcatggagtctctactacctgcagctgaatgccaacaagaagtcactgacgctcaacatcaagactcctgaaggcaaacagatcatgacggacctgcttaaaaaggcggacgtgtttgttgaaaacgtgcggccaggtgcagctgatcgggctggctttggctgggaagacgtgcacaagctgaacccgcgtttgatcatggcttcgctgaaaggctttaaccaaggatcacgctttgctgatgtcaaggcctacgaaccagttgcccagtctgctggtggcgcggcttcgacgactggctggaacaagggcgctgacaacgtgccaacgcagtctgccgccgctttaggcgactccaactcaggcatgcacctgaccattgggattctggcggctttgatgcagcgggaacggactggtcaaggaacgttggtctatcaatcaatgcaaaacgcggtcatgaatctttgccggatcaagctgcgtgaccagatcatgctggataacctgggcgcgctgccgcactatgccgtctaccctaactataagtggggcaaggccgtaccacgggctgaaaatacggaaggcggtcaggtaattggctggacctacaaggcaaaaggctgggaaaccgatccaaacgcctatgtctacatcgtaatccaagactccaacaagagctgggcagccattgccaatacgatgggacacccagaatggattgacgatgagcgtttcagtgattgggaacaccggcagttacacaaggaagaaatctacccattgattgaatcctataccaagcaatacgacaaatatgaattgacgcaaaaacttggtgaagccggaattccggttggcccggtcattgactggcacgaattggaaaacgacccggacttaaacgaggacggcacgatcgtcacgattgatcaaggcggcaaccggggcaactttaagacgatcgggatgccgtttacgctgggtaactaccagccagactacaagcgggcaccagatctgggtgaaaacaacgtcgaagtcctttctgctttaggctatgatgccgatgaaatcaacgacctggttgaaaaaggcgtcatctccaaggcacgtggccctaagaacccacggcgcgaagtcatcaagggtgaataagccaagccgattttgaacagacttgggtgggatggtgagcatgcgcgatcatcctgccttttttatgagtcggttcggcggaaaagcgattggagggtcgattatggaaaagatattgattaatgatattgttccaattttggtaattatgattttaggctatttgtgcggcaagttctcgttctttgatgatgatcagcgccagggtctcaacaaattggtgctgaatattgccttgcccgcggcactgtttatctcaatcgtcagtgcaacgcgcgcaatgtttgccaaggatgtcgtcttgaccatgatttcaatttttggcgtgacggggctgtttttgctcagctattttttagacaagctgatgtttcatcgaaccacgcaggaagccgcaatctgtgccatgattgccggttcgccaacgattggttttctgggatttgcggtactggatccaatctatggcaatagcgccagcaccaatctggttatcgggatcgtttcaatcgtggtcaacgcggttacaattccaattggactggccctgatcaataaaggacaagcggctgctcgagccaaggcagctaagacgggtggcgaaaaggtcaagatcaagctgccgcaaaaagcagatgaattggcaccggttcaagaaaaagaagtaaccattgccgatgggatcccggttactgatgcagaagccaaggcattgcgcgaaaaaggcattattcgcgagattgatctggcaagagctgaattctccaaccatgaaagccatggcaaaagggacaccagcaattcaacgatggccgcaattatcaatgccattaaacagccagttgctgccgcgccgcttttagccgtgattttggttctgcttggcatcaaggttccagcatcgtttgcccccagctttgatctgattgctaaggctaattcaggggtcgccgtattggcagccggtttatcgctgtcaacggtcaagttctcaattgacaaagaatcgctttggaataccttttatcgtttgattttgacgccggcaatcattgttttggcagcctatctttgcggcatggggtcagacccaaccaagatctcgatgctttgcatggcaaccgctctgccacctgcattctcgggaatcattatttccagccgctacaacatttatgtaaaagaaggggccagctcggtggcaatttccacagttgcttttgccgctacctgcatcttctggatctggctgctgccgattttagctgctcatttctaaagcactgcactaaaattgtttgatactttcctcacagtcaatctttcttcctttggataattccagaaacgaattaacttaaaacttcctatataatagtagaaaaatatcataaataaagatcgcaccatccgcagcctgtatcgggccaaggatgatgcgattttttaattgaacttatgcgtattaaaacggcaatactgagaaaatcaacgaacataaaacgattctgagttgttgggtgttcagcagccagtaggtcatgctttttagtctggcagttttttgctagctgaatcatgtccggtggcaaagctttgcgagggttatctatgcaaagcaacagccgcaaaagcttttgctaaattgcgaaaaccggctgcttatttccgttgacgctgctcggtgatgatggctttaacctctgaagattttcagtattttcaaattaagtgaatccggtttcaaaaaatgcgctaaacttaaagataagtgttagggggagaacgagaaacaggcgggaatggtttaattgaaaaatattgtctatgtagaaaataaatattttgtcgcagtgacacataatggattcaaattaaccaaccttgaaacgaaagagaagcactatctgtcgtttgaggatgttgagatattgatttttgataactcacaatgctatttgtcggctaaagtaattgaaaaatgtgcagataataagattggtctgcttttttgtgatcgtggtcattcgccgttatctgtgttggaatcagtatatggtcagcagaatcgttttgaacggttaaaatgtcaactttcggcatcaagtaaagttaaaggaagattatggagaaaaatcgttatttccaaaattatcaaccaagcagtctgtcttgaaaaaattggtactgaaaaggaatcgactgaggttctaaaatccatgactaagacagtgactgatcatgatgtgcataacaatgaagcatgtgcagctcgattatattttaaaaagttattcggcgatgactttaaaagaggacgcactactgatttagaaaatgccggtttaaattatggttatgccatcctgcgggctttaatcaggcgtaatctagtattaaaaggattcgagcctagtatcgggattcatcatgcctcaactgaaaacccatttaatctgtctgatgatattattgaaccttatcgcccatttgttgattactatgtctttaaaaatattttgcctaccaaccatgaaaccttggaatctgatgatcgaaaaaacattatcaaggttttattgaataaatgcgttatcgataatcatgtgatgtatctgcaggatgctattgagttgactatcgattcattcgtttcaagcattgaggctggcagttcgggaagaatcaagctgccaacctttattgaaggcggtgattagattggtgctgctgctaagctttgatttgccacgcaataccaaacaggaacgtaagcaggcaaatctatatcgtaaacgcttagtggagttgggattttccatgaagcaatttagtctctatgagcgagaggttctgtcaatcaatactaaaaacaaattgattcaaacattgaatgaagaaattcctgatgctggtttaataacgctttatttgcttccagatgaagtgaacgataaacaagttacgattctaggcaaaaatgcaccccactatacgattggcagacctcgtttgatagttttctaaggtgattagaaaacgcttttttagtatttatttgcctagttatttttattaaaatagatattaaagacgttttagaataaaatgcctaattattgggaggagaggtatttgaaacaatatgttttgacctgtgcaaagacgatcccacgcacagaccgaaagttggcagtctttttaaatggctggctaatggagcgcttagactctgatctggtcgataagtttcatcaaactggtgataatcctttctctgtatatattgatgagcagccaacaactgtaaagctggtgtttaatgcattagatgctgaaatggaaactatctttgatgagttattgttaaatccagatctgaaaaaatttgaatttgtcagtgccagtcaaaaagaatttgtaatcctggatcgtaatgtgcgcgtcttaacagaaaaggatctgtccaagcagttttaccttggcaaagctacaggatggtatgacttaaaaatcgtttcgccaatgacgtttaaatcgcagggacattaccagtttattcctgatgtccgtttgttttttcaaagcttgatgcgcaaatataatcaagcaattgaaaatagcgagcagattgatgttgaactgctggatgagatctgtaaaagaacccagattaccaattatcgattgcggactcagcgttgttttattcatggcggttttgtaaccggatttttaggttatttaacttttagatgttatggaagccagaccctaaaagattatctcggtgcattgctgagctttggagaattttctggggtcggtgccaaggcaagtttggggctgggagcaatccagcttaagaatcaaaaagaggagaataatggaaaagcgtaaagttgatttatattatggctctttatttcatgatatcggtaaagcagtacagcgaacgaccggtttaaaaaagaaacatcaactggttggtgctgaatttcttaagccttacatgaatgaaaagccgattttaaattgtctaaagtatcaccacgttaatttacgtaatgataatttggctgatgatgatttatcctatatcacctatatcgcagacaatattgccagtggtactgatcggcggccgaatgatgaagacgttaattacaaatgggatgctaaaacccctctgcaagatgtttttaatcgattcgggaaacatgcaggaaaacgctatctaaagccgggagaactgcggcttgatgatgtgcattcaattatgccaactgatgagcgccatgattacactcatgcggattacagtcggggtgttgaacgttttagagaaggcttaatggcaatcaagcctaccgaagattatatgcagagtgccttgaatctgatggaagctaccatgtcgtttatgccaagttcaactaacatggaagaagttgctgacatttcgctttatgaccacatgaagctgacggcggcttttgccatggctattcagcaatacttggattttgtcgatgagcataattataagcggcgcctatatactggtgcgcaaaaattctataaagaaatggccttcttgatgatgggctttaaattcactggcttggaaaaattcatctatacgatcgttagtcaaggggcacataagcagctgcgcagtcgggctttctatgccaatatgctgagtgaatggttcatcgatacgctgctgagcgatacggaactgactcgtgctaacgtgctgtttgagtctgcaggtcaaggatacattctcttagggaatacgccaaaaaatcgccggttgatagcaagtcattgtgaagaatttaatgaatttctccagaaacaatttggtgctgagattcatgtttcagtaggaacgtcacaatttatgtcactccaggttgaaaaggacaatacttttgattcttatagtagaatttttaaagatattgatcgtgaaatcaatcgttctgagttgcgacagttcgatgctcgtcaaattatggagctaaaccagcaaggcaagcatacaggacgagaatgtgttgtctgccatgctgtcgccagtctgaatcccgaaacaaataaatgtaagctttgtgaaaaattggaaagcttttctaaaaatattcagcaagatgatttctttgtggttaatgctgatgaagaaggcttgccagtcggaccaggagcatttcttagcgttacggataaagagacaattcaaaaaggagcagtcagcggcaggatctattctaaaaatcaattgaatactggatttaagcaacaaacctatctttgggtaggcgactattctgacttaaccaataatgaattcagcaaatatgccgatcgtgactggaccaaaggagataatcaaagtgcagttgggattaagcgactggcggccttaagaattgatgtcgatgatctgtatgctggctttttggctggctttgccaatcaaggagacggaatgtatacaacgattagtcgctatgcatctctttcacggcgccttgccagtttctttaacgtgcatttaaatgcctttgctgagggatgtcatgctacagtgatctattcaggtggtgatgatgcatttatcattggggcctgggatgatattttgaagctgctggcacgcttaagaggatattttgctgattggaccgatcaaaagatgacgttctcagtaggaatttatatgtatcaagccacaatgccgattaatatcgtggcaaggcgaaccaatcaactgctgcaagaagccaagttagcaggaaaacatcgcgttgcattatttgactcatcaatgatttttgatgtggatgaatttatcaatgatgtctattacgataaattagtgaaaattcgccagttctttaaaaaggaaagcaatcgtggcaagtcatttgcctacaagctattatcactgttgcggtcgcgtaatgaagaagatcggatttcttttgccagactggcctatttcctatctcgacttgaagatgacgctgaagatacagaggcgtttcagcaatttaaggaatccatgcttggttggtatgacaatgcccgcgaaattaaaaaagttgaaacggcgctgtcactatacatttatgaaattcgggaggactagttataaatgaacgttaaatttaagaaagacacttatgttgatgaagcagagtcagtgattttaaatttaaaagacgttgatttcaaggttggtcatgataagctgacctcgacgcagctgcgcaatttattagcaatgaccagcacgatctacaacattgtaatcaatcaaggcgttaaagcagcagaggaacgtttagcctacttgagaattcaatttatctatcaaagcggtcgcaatcaggcggtaaaaaagctggttgatgaagcggagattttagatattttgtttgcaattcaaaacgagattgaaaacaacgatgaaaagaaagagcgtgaggacattatccgtttttgccactatatggaagcgttggtagcctacttgaagtactacaatgaatagggaggacaatcatgttatcaaagattaagatttcgggaacgattgaattagaaagtggtttgcatattgggggaagtgatgcttttgcagcgattggcgcaattgattcgccagttatcaaagacccattgactaacctgccaattattccaggctccagtctgaaaggaaaaatgcgctcacttttagctaaggcttataatgaaacgattgcccaaacgcctaatgatgatgatgagcgaattactcgtctttttggtgcaagtgatggtggcggtgaaaatggcgatcaaccagtaccagcgcgtttgatttttcgtgactcgtttttaaataatgcccaagaacttttagataaaggtgctgaaggatatacagaagccaaatttgaaaatacaattgatcgcacgaccgcgattgcaaatcctcggcagattgaacgtgcaattcgtggcagcgaatttaattttgaattgatttatgatttaaccgatgaacaagaaattgatgaagatgtgcagacgctgctagatggctttaagctgttggaattagattatcttgggggtagcggcagtcgaggctatggcaagattaagttcattaatctgcatgctgaaaccgtttttggtgattacgatgctggtgcgatcaacgaagaactaggagcttagcaagtgatggaaacaaaaatttaccgtttgcgtttccgtaatgcacattttggcgatggctatcttaacaccagtgtacctacttttacggcaagccgtttattcagcgcgttatgccttgaagcattgaaaaataactgtttgaaagaatggatgacagttgctgagaatgatgagttcaaaatcagtgatgcttttccttatcaagaacagccatatttgccagtgccagttggtgaggtagctcttaaaatggatttacggacgcttgttgaagataatcaagcaaataaggcggttcgagctttaaagtttgttccattagatcgacttttggatctattaaatggaaaggtgtctgctgaagaactgcttaaagctgaaatgaatcttgcgcagcagaccgttttaatgaaaaaaggtgctgatccctatgaagttggggtaactgaatatcgttcctcactgtatgtattggcaagcagtgatctattatttgaacaattaatgactagtttgcagtttagcggtttaggcgggaaacgaaccagtggctatggacgctttgaaatggagattttgccggtcccatctttaatgggagaaatgctggctgatgataaagctgataagcaggtattactgacaacgagcttgcctaatgacaatgaattagggctagtagttgatgatgctaattatcgtttggtaaaaagcagtggttttacctacagtccggataccagtgagcagctgagaaaagaagatctctataagtttgcgagtggttcggtctttaccagacgatatgccggagtgattgcagatgtacggccaaatggatttgctcatccagtatggaactatgccaaagggatgttttatggattggaggcggctaaatgactgcgggatatcatgagtataggctacggttgattgcgatggcgccagttcatattggtagtggtgaaacgtatactgctaaaaattatatttatgaaaatgaaaactattattttcctaatatggggaaaatgtatttgaagctgcgtcaatatcctggcgtagtcgaggcatttgaaaagtttttggtaaatccaagtcgccgcagcaatcgtttggttgactttctgcatcaatataaaatcatggatcgggattttggaggttataaaattcccgagacaggttatgaaagtgtaaaaagaggccgtttaaatgagattcatgcttttgttaaagatggatacggcaatgcatatatcccaggctcttcgcttaaaggcgctttgcggacgattctagtcaatgaacactttggtaacgacaatattgcttggggtagtgttgacgatatctttaatgagattcgagtttctgatagtgaaccgatccctgttgataaattgagaattgttcaaaaatgggatttgaaccgaaaaaaatttgagcctaaggggttgccgcttttcagagaagcaattcggccacaaaccaagattgattttacaatcacaacaacgactgcacgagcggaaaaactgattgatcaattgccacaaatggctaagcgtttttatgaacgttatgaaaggcagtttttatgcgattttcctgataaatatgtgcagcctaaccattttctggctcctttatacttaggcgccggtagcggactctggactaaagtagattatggacatgttgatcttagggggattcagagacgatcttactggaagatgaagttgaaaggtaaaggggttatgaaactgactcgttataaacgccaatctttaaagcagatcgagaatggcaagcaggtaaagtacatgttgatcaataatgacgatcattattacgaaatgggtaagtgtggctttaaactgcaaaagaagaattagaattatatcctcatcgtgtgcagcgatgaggatttttatatattcataattgatgagacaggtatggtagtggtagtattaaacatgtacctatgttagcgtttgaaatgtccgaagattggacagaattgacttgtctgatggttgtcctgtcccaatattgggcaggcaaaagtaagaaggatgcttgatatatcggcattttgatg

SEQ ID NO: 1884 - DNA, 1089 bp, Unknown
  gut microbiota DNA sequence
gataggcatagtttccattaacgtccggtaactcatcatatcgactttgccagttgacaacatttgcgtgtactgttgcagaccccggctagcatcagcaacgcttgccccactcgccagaaaggcgttattaagggctaatgctgacttactagcctttgtcgcgctacccgtcaatggtgctaactgttgtgcaacggaagtgatatcttgcaatgacgttggtaatccatcaatgcctttttgcattaacttactagaccttgcaacatctcgtgctgaataccccaacgcgtccatgacgactggatacttgttaagggtgtcgaaacggtcaattgccccgccgattgaatctttgacaacgctaaatgctttgcttgcaaccgcaacaagccctaacgaagttgcaagatttttaacagaactggttgccgatgttgtagcgcttgccgtttggttactttgactaacgactttgctaaggctatcaacagccgattccatcgttttggtgaaattttgatcgacggcggaaagaatcgcctcgatgctcatttcttgtgccattctaaccgccacctttccatgcttgcatatcaatcagaccgcgctttttaagctcttgaaattccttgtagcgctgctgaaacagtttcgtggtattttccttatcgctatcgttagaacgtccatactgggcgttaatcgccgataatgacttagtaatgccaacgtccttgagaaacttctgaacagatgcatacttccactttggatttttaccgcctgtggttgcctgaacggcatagttgtaccacgcttgatatgcctggtcttcacgtttacgaatcgctcgcagttcgtacgcttcaagccttagttgatactcagctaacgtgatacgttctgcctgttttaaatcagtaaagcctagatatgccaggcagttgaccagaatcatgcgatatgtttcttcgcttgtctggccattctcttgactatctaggctttcagattttttgttgcagtgcgcgcagcattgcttgacttaagctctttctgaacatcatcaaacagcttgtcaat

SEQ ID NO: 1885 - DNA, 1196 bp, Unknown
  gut microbiota DNA sequence
aattaaaaacttcaagccctatgcccccatatcatgcattaaacttgcgtctacttcgttgttactatcccaatgcccggaactcttcatcacctttacgattgccgggtcaatacgcagcatgccatcgccatcgcagaacgggcacttgcgttcgattgtgtccagataacctgaaccttcacaccaagcgcagcattgctcggtgtctaagatcatcttgtctttcgttactttcagcatttcttcaccttctaaatcatgcttgaccgaacatctgtcatgccgttaaacaccagtcggcgcttttgattccgtgttatcagtctgcttaatagcttctcgttatacattgcttcaagctctgccatcgtgttgtttgttgttacaatcgtcgcttgattgccgtatcgtgcgtctgctactgcaaacagtcccttttgcatatcaactcggacttggctttgtttgtcggtccgcataccgccttccgttccaaagtcgtctaagattagaacgtccaccggctcaatcttcaatcgcttgtcgcccttcatataggcgttcagttcataaagccggttttgggcttgcttgtcgtcaaaacgcattgcatacagttctgctagtgcgtcggttgaaacaaacatagccgtcttgtctgatttgtttctgatgaaatcaaccattgccaacgctaggcttgtcttgccagtgcctggccttcctgctagataaacccgatatggtttgccttctgcaatctctttggctaataagtacgattgattgcctaaattgcgggctaattgctcgtttggttgtttctttggttgccaatcagcatatgtgaatttgattggctcaccagtccatagcgacttgttaaacactcggttaaagttgtgccgtgcgttctctttccgccactcgtcatgcaacggttctgctttcttttgcagataggcaaccgctgcttgcttatcagtcagatcaacatcgggcagttcccaaccttcttttgcaaagattttctttaagctcttaacgccttctttagcgctatcttttacgcttaacatgttttcacctccattaggttttcggatttgaaatccgtaaactaccagtattcgttatccatctgataccgtgtcaatccgttagggtctggctgaccagtcattggattaatc

SEQ ID NO: 1886 - DNA, 660 bp, Unknown
  gut microbiota DNA sequence
tgcactcgttgatgcagattgacttgcactctgagatgcactcgttgatgcggactgactcgcacttactgatgcagacttgcttgtgctttgtgatgcactagttgaagctgattgacttgcacttactgatgcagacttgcttgcgctttgtgatgcactagtcgaagcggactgactcgcacttactgatgccgatttgcttgcactttgcgatgcactgattgaagctgacttacttgcgctttgtgacaaactcgtcgaagcttcttgactagccgagatactctgagaattggattgactaacctgcttactggttgaaaccgactgactatttgaggtcgaccgtgaagcactcgtactttgctgcttgctggtcaattgtgatactgaagtactgttagacttgcttggctccgtaccagaaacagaattcgtaaagtaatttccttcatttaagccgctagtataggaaacgtaaggcgcaatcgtataattcagattacttgatgattcattataattaaaagtaaccgtaatctgttctgaaattactttgttttttccataattattgtatcgggtgctgccattaatgttttggtaggttaagccttgaccttgggcatcaagatcgtagaagtcataagaattacc

SEQ ID NO: 1887 - DNA, 87316 bp, Unknown
  gut microbiota DNA sequence
cgcaaatgtttttgcatcaatcgtaatgattgatgaccctgcacatttgtgttcgtcgaaactgtattcagttttcaaaggtctaccgttgctcgttcgtttcaaacaagtaacttaattagtttaacaaattgtcaactacatgtcaagaacttttttaattgacttatcttggcaattgtgcgaaaaaccaccgaactcaagtgatcagcagcttatcgccgcgacaacgttatctaatataccgagattgcaagtaaatgtcaacgacaaaaataaaacttttttatttatttaagaaatatgaacaatcatcaaagaaactacttgttaatcaatgaaatattgaactttttggcaacatttaagaataaatcatcgttttttcaaatagagccgtcctgcaaaaaagcaaacagcgatcttccaagactatgagtcataagaaggccgctgttgcatcaatccataaactattaccgatgctgccggctttatttaaaaagaatcaactgcatggacgcgacaccaccactaatggcttttgtcagaagcatcgatccaacaattcgcttaaagatcacataagacaggctcgatttgccatcccaaaaccgatatctgatctttttaagggcagtcgttaaatcagtctatttttcaattaacagcagaaaaactgccttgcttaaacaaagcagttaatcgcacgcttaatttaaaaaatcagccataatctgctgcatcgccagattgtcattcggcagaccaatcgtaactcgcagccagtcatcagcaaatccggtgcgaatctgataaccgttttccaagaatcgtttagccagctgatcggcacccggcagcttaaagtagatgaagttagcctggctgggatagtagaaaacatggtgctgttttaaaaacgtctcccatttatcacgctcttgagcatttttaaccgcgacctgctcgacaaactcttgatcagcaaatgctgcctgggccgcgacctgcgacagcgtatttaagttgtatggcaggcgcaccgtctgcagatagcgcgcccgctgatcatcgacaataatatagccaacccgatagccggccagtccatagatcttggagaaggttcttaaaacagccacgttgtcaaattctttgagcagcggcaatgccgaggcaggctgagcggacctgacaaaatcaatatatgcctcatcaatcagtaccaaaacatctttgggaacctgagtcatcaaatcacgcagagcagcgatttgattatatccaccggtcggattgttaggattgcacagccagatcattttggtattcggcgtaatgttgtttaaaaaagcattcaaatcattggcgccgctttgcgagtcaacaggcacgcttttgacggtcgcgccttcgatctgagcattgagaccgtattcggaaaacgtcggctcagcaaccaagacttcatctcctgattccaaaaagactcttgaaaccaaggtaatgatctcatccagaccacagccaaagacgatattttctgctttaacggccagtttttgagcaatcatttctcgcagcacggttgcattgccatctggataccaattgccactcccctgctccacggcatcaacaaccgccgcggcaaccttaggcgaggttccatatggattttcattggccgaaagcttggcaacacggctaagaccatatcgtttggcaatcgtttccgtcggcgttggcggtacatagcttgccagttgcttaatcgtttctttcatcgtatcacctctaaagttttttgattggggcacgatccttaaactggctcatctgaccaacgcgcgaacccagctcttctttaattttttcaaatggcagattgcattcaacgagcaggaccattaaatgatacagcagatcagccgtttcgtactgtagttcagccggatcgctgtttttggcggcgacgataacctcagtcgtttcctcgccgacttttttcaagatcttatccaggccttttttaaagagatagtcagtgtacgaaccatcaattggattttctttccgttgtttaaccagttcataaagttcatcaagattctgctgtgtcattaacattgccttctttcatgatttcaattggattaaaaaagcagctgtatcgtccggtatgacaggctggccctttaggatcgaccaatactaaaagcgtatcgccgtcacagtcaagcgtcatgctgaccactcgctgcgtattgccgctggtagctcccttatgccagagttcttgacgggaacgagaccaaaaccacgtctcgccactggccagcgttttttgaaagcttttttcattcatccaggccaccatcaaaacggctttggtattgacatcaaccaccaccgtcgtcagcagaccattcattttcgaaaaatcgggtttcattggcgaaccggcactccttccttagccagcacctgcttaacctgagggatcgtcagctctttaaagtgaaagactgaggcggccaaagctcccgttactggcgtctgcttaaagacatcaacaaagtcctggattttaccggccccgccagaagcaatgatcggcacgttgacgacccggccaatcgtctggtagagcttaagatcaaagccatctttggtcccatcgcagtccatgctggtgatcagcagctcaccggcgcccagctcaacggcttttttagcccaggcaactgcctcaagatccgtcttttgctgaccgccatgcgtatagacaaagtatttaccggctgctggattccagcgaacgtcaatcgccactaccacggcctgactgccaaagcgttcggcaccctggctgatcagcgctgggttggcaaccgctgccgagttgatcgcagttttatcggcccccgcttttaacatgcgctccatgtcggcgagatttttgatgccgccgccaaccgttagcggcatgaagacctgtttggaaaccgcctcaaccacgttgctcatggtctgccgtttttcattggttgcagtgatatccaaaaaaaccagctcatcagcaccttgtttttcatatgctgctgcaattgcaaccggatcgccgacatcttttaggttgacgaaatgaacgccttttttcacccgtccgtcagctacgtccagacacggaatgattcgtttagccagcatcctcattcacctccgcaatctgctctaaggttaccttgcccgctgcaatcgccttgccaacgatcacgtcttttaacccagcctgcttaagctttttcagatcatcaagactgccaacgccgcctgaggccacaatccgtacttcaggaaacttttgctgcagtccttcaagcagctcaatatttggtcccgtcagcgtaccatctgttgccgtgtcagtgacgataaagcgtttggctccggcatcagccatcgccgcaatcagatcagccattgaagtcgtggactgattgagccagccatcagtcgctacttgaccgttgcggccgtcaacgccgatcgtaattgctcgactgccgaatttttccagtatctgcttggtaaatttaggatcttttagagctactgaaccaagaatgactcgatcaaccccgctttttaggtagcgtctgatcgtctgctcgtttcgaataccaccgccaatttcagtttcaccggcaaataccttaacgatttgacttaccagctcaaaattctgcggctggccagttttagcgccatccagatccaccagatgcagtccgccgatcccggcctctctgatcaagcgcgcctgcctgattggatcggcactgaccagcgtttcttgtttgaagtcgccttgatagagccgtacgctgctgccgttttgaagatcaattgctggatagatcatgctctcaccgccttttcaaaaaaggtttgcagcagtttcaacccgacttgaccacttttttcagggtgaaactggaaaccgtaaacgttgtctttttgaacgattgccggcacggccacgccatagtcaaccgttgatacgatatattcatcagcacacttggcataataggaatgaacaaaataggtatactgctgatcgattgacttaaagatgctttccggctgttgcagctcgttttgattccagcccacctgcggaacgatcctttgcccatcatcatcgggaatccgcacgacctgcccgggaatcaagcccaagccggctgcactgccaaattcggttgacgagtcaaacaagagctgcatgcccaggcaaatacccaaaaatggcgtcccattggcaaccgtgcttttaattacttgatccaggccggtttcttttaagcgcgtcattgcagcaccaaatgctcccacgcctggaaacagtaccacgtcagcctgcgaaattttttgcgggtcagccgtcagctcagctttttggcccaggtactggcaggccttgagcacgttaaagacgttgcctgctccataatcgattaccgcgatcatcaaatcatccccttggttgagttaactccttgaatggctggattgatcgtgaccgcctgccgcattgcacgggccgttgccttgaacaatccttcaatcttgtggtgcgtgttgcggccatataatactctggcgtgcaggttcatctcggcattaaaggccagtgcctggaagaaatcctcggtaatttccgtttcataggcacccagccgcggattggtcagctcggcatcaaataccagataggagcgcccgcttaaatcaaccgtcacttgtgccagcgtctcatccatcggcacaaaagcattgccataacgctcaatctgcgccttgtcgcctaacgcttctttaaagcactgacctaagacgatgccggtatcttccaccgtgtgatgagcatcaacattcagatcgcctttaacctccacgaccagaccaaagcggccgtgcttggcaaacagctccagcatgtgatcaaaaaagccaacgccggtattaatggcaacctgactttgatcgtcaagattcaatgcgactttgatctgtgtctctttagtagctcggtttatcgttgccttgcgcatctgatcagtcctccttgtcaaatctggcttcaatagcgcgggcgtgggcttccaaaccttccgtgcgcgccagcttggtgatggctttcagatcggctttaagattttgacgatcaaactgaataaactgagtccgcttgacaaaatcataaacccccagtggcgaggcaaaccgcgccgttccaccagtcggcagcacgtggtttggtccggcaacgtaatcacctaaaggctcgctggcgtagcggcccaggaaaaccgaaccggcatttttgatcagacccaagtactgcgttggatttgccaattggacctccaagtgttcaggagccacgtcgttcatcagctcaaacatctcatccgtattttccatcaccgcaataaaaccgcgatcctcaatggaagtccgggcaatctcttgacgcggcaaagtgttcaattgacgatcgatctcttcagaaacagcttcggccagtggcttgctgttggtgatcagcatggcccgagctcgcttgtcgtgttcagcctgtgacaaaagatcagccgcgatttctttagcattggcactttcatcagccagaataccgatttcagacggaccagccaccatatcaatggctaccttgccaaacacctgcttcttggccgttgccacgaaaatgttgccgggccccataatcttatcgacagcggggatggtttccgtcccataggctaaagcagcaatggcctgagccccgccaacctgatagacctcatcaacgccagccagtcgagcagctgccaagaccgctggattgatgccagctggctgtggcggcgttaccatgacgacccgtttgactcctgctaatttggctggaatgccgcacatcagaatagttgaaggataggctgccgttccgcctggtacatacagccccacgctggccaatggcgtaatcttttccccgcgcatgatgcctggtgtgctgacgtcaacaaaactgttttcgatttcttgtttgtgaaaactggtaatgttttgcttagccagttccaaagctgcccgcaagtcatcatcgatcgcatccagcgcctgatcaagctgaaaggcgggaattgaaaaatctgccagattgacgttatcaaatttgcgctcatagttgcgaacgacctgatcaccattttgagcaacgttttgaataatctcgctgaccgttttttcgatttcaaaatcaatggtctgttcggtatagcgagcaacgatttttttcatttcattcagtgacttttcgtaaatcttcatcatactcttcctccattgcctgtcttaattgattcgtcaatgcaaatatctcatcacgcttctgctttaaagcaaccggattagccaccagccgactcgtgattacgtccagccagtcgtgcacgaccaagtgattaacccgcagcgtcgttccggtctcagtcaggtcaacgatggcatcggccaagccggtcagtggtgccagttcaaccgagccggcaatcttgatgatctcgacgtcttcgccttggctggcaaaccagcggcgcgccacattgggatacttggtgccaattaccttgcggcgaggctgattccagtcaaaatcgcttttggaggcgacgataaactgacagcgaccggtatttagatccaacagctcgtttacctgctcatcagccccctgttcttctaaaacatcgctacccacgacgcccagatcaaccgctccttttcttagataagtgcagacgtcttccccttttaccagaatgatctgatactgatcacccagattgatgatcaagcgacgctgcttatcgatcaagggctgacagtcaatattgcatttctccaaaagcggaatgaatttcttttcgactcttcctttggtcagcgcgattctcagcattgcttcatccccttttctgcatccaagacgatcagtttcgctcccgccgtttgggcctgctgcgaagcctcctgcagcgaatcagccaaagccagcgagtagttgccgtgcttttcgaccagtgctgcggcctggccgagaagctcaaacggcgcatagacaaagaccggctgctttttgaccggcttaagcgctgcggcctcagctaaggcgtcaatgttgattcccaagccaaccgcgggctccaattgtgactggaagttggctaaaagacggttgtagcggccgccgctgatcagataggcgccagtcgtcttttccacatagcctttcataacgatgcccgtatagtatttttgcggtaccgcactgctgagatcgacaatcacctgctgatcggccagctcaccggcaaactcagccaccgtcttgagctgatcaagcaacggaagggccggctcaggaaccttgacttctgccagcatgtcgttgacctccgccagcgtgccaaacagccatggccatttacgcagaaacggcattgtctggggggcatcaacctgtctgagcagcttttcataggccggaaagtttttatgataaagtgcctgggccaattgctgctgcagttcttcatccaattcaagcgcatcgagaatcgtatcaaccaatctggcgtgtcccagctcaatcgttaactggttgtccagcagatggcggttcagccgatgcattaagatcacgccttccatttctgctttcaatgaaccatagccgatcaattcgatgccagcctgcgtctgctcgctttgcccgcctgaaagctcaggtgccgcttgaaaccgctcgcccagataataaatcttttgggggagcttaacgttggtcgttgccaagaaccgggcaaccggcaaggtcagatccggtctcaagaccaactcatcgccagccgggtcaatcacccgatactgttcactttgcatgttgaactcggcaaacagatcccgtcgctccacgattggcgtaataatgcgtcgatagccacgactgcgcagatttttcatcagccaggcactgatttgatcctttgattctgcctccgtgccaaactgatcacgcaagccagctggtaaagcaatgctgctcatcatgataatgcctcctctcattttttactcatttattttttatataaaaaagcgtcctctctgcccatctggacaaagaggacgcttttcgcgtggtcccacctcaaattcgatcgccccttgcgaaacgatcctcatgctggataaaattcagccctgataacgagtggtcccggaacagcctacttataacctttcagctggtcggctcaccggtgtggttcactatcgcaatcaatctcttcccaactttgcgagactctcttaataatccacgatagctactctccggttcattaccattaaaaaataatgagattcatttggtattgtagttatattattctcattttttaagagtgtcaagaacttttaaaaaatttttcataccgtgccagccacgaccaacctcatctacactatgcgcatccgacccaaaaatcagcggtacttcggcatttaatgctgccaatgcaatctgaatgcctgggtaaaaatcattgcagtattttttgtaaagaccagccgaattaaaatccaagttcagctgccgtttgcgggcagtgcccatgatctcatcaatcagccgctgacatgactgatcaaaagcttccggcagactgaaataatcttgatattttttgatcagactgatatggccgagcttatcgggactaaaccttcccaaatcgcagcgggcactggccaagaccgtttttaaataacgctgatatagcagctgcggcgtcttcagctcattggcaaacccagcctgcagctcatctgtggagtagtcaatcccccaaaattttccttgatcatcctgaagataatgcaccgataagatgttgtgctgggtattttttccgtattgatccaaaaaggcgcgcgttgtttcttcaaagcctgccagatactcaatctcaaaaccaatgctgatcttgatctgatcggcatattcactttgcagctgctcagctaagtttagatagtcgtcaacctgctcccagctgagtccttccgtttgccaatcatcggctggaccggcaaaccgttgaacaaaatcttttggcatgggcgcgtgctcagtaatccaatattcgtcaaagccaagctcaatggcgcgttcaaccatcgcccgcgtgctctcgtgactgccgtggggacaaagctcagtatgggtatggccatcaattttaagcattctaatcattcccttttaaaattttttccagtttagcgactagcttaaaattcgtcaaggcattaaaaaaacagcggtcgaaacaaccactgtttttgagtttatttttagatttttggcattttgataaccacaaaactagccaaagtacataaagcgatgacgatggcaaaacaccaaatctgcatgattcccagcggactgcttttaaaagccagaccataaagcgctggaccaaacgatgctatcagataaccgccactttgcgtcaaaccggaaagctgtgccgttcgggttggtgaaatcgtcttaagtggaaaagtcgttagcgccataatgaagtaaaaagccgtcattgcaccagtaatgattgacaaataataccagtaaacaagtggcatggacgactgccaaaacatcaaaacggccgccaacagcgtcaacagtccaaccacgatcgacattacgatctggcttcgatgcgtggctgtttcaagaaaacggggcagcagcaatgacaccggcatgcctgctgctgaatacattgccaaaacaatgctgatctgaccgccagaaataccattaaaacgcatcaattctggcagccaggccactaaagtatagttaataagcgactgtgtaccaaacatcaacaggcagcaccacgcatatcgattctgccaaagcggcgcggcagtcgtttttaggtctggttcatgaattgatttgactgactgattatcagcgcgctttgcttgagaacgtactggtaccggcaacctgaaaagtatccacatcagccaaggaaacatcgttaacattaataaaacgaccaagacggaccaccagccaaaagtactcgataacggatgcgtcagcaggctgaatactgatgaaccaaccatgatcgccattgagtaggccgtggtataaagcgcggtctgattaggttcataggctgcaactacggaaggcgtcaaaacgtttagatgcgtaatgcccagtccaaccagcaccgtgcctagcagcagcattggccaggtaacgtccagtctcaacaaggcgcctaagaccaacgccgtcaagccaagatttaaagcgcgacgcaggccgaacctggtcatttccttagcgacaacgatcgaaaacagcagaaacataatcagcggaatcgttgtcaaaattcccagattaccgactgcggtctttaactggcgcgcaagctgatcgattatcaatggaatggtgacgatgggcgcacgcatggccaagccaaacgcaatcaccgttaccaaaaccaatcgatcatgatttttcattatcccacctcttactgattgacaatactataagtctgtttaccatcctttgcggtatataatgccgtctgatcatcgttgggcttcatcatgctcagcgagtagccactccccacgatttttttaatctgggctgaagtctgattaagcgagctggttagattcgaccaccccgcctgctgagcctgagccggattttgggcaatgtagtttaaagcctcaaccgtattctcattggttggcataatctgataggttttcgagtcgctgtcatagttgacggtgcccatcttgctgtaggccttctgcagctgacgaagcagatacatttctttttgttcctgagtggcgccgctgtcctgctggttgaagaccgcggtagcgccattgactgaaaagctagaactggaacttgaatcagctttcgaatcggtcgcagaactaagcgacgatcctgaactggcagcactcgtcgtttgctgtgccgattgactatggtgccaatatggcagattgatcgtaccataaaccgtagctgccagacttaacaccagcatgatcgttggcactacccactggcgatactgctgccaggaattaaccagataaaaggcactcaagatcagcatcagtgcgccgaatacaactaagaaaatcatggaaagctcctttgtaatcattaaataaaaatctatttcattactactttacaataattttttacggatcgtactttatttcaatcataatttgagatttttgactgatcagatgcacgatcattataaaaaaaccgtatgacaataaaaaggtcctccactccatgagcgttggaccctttttgtacgaaaaaccaaccgatcagcgactaaaattccatcagcgtcttcgtatcgataccgcgcagatgcttacggccttccagctctttaagttcgatcaggaaagctgcaccaacgaccttgccgcccatttgctcaaccatgtcgaccgtagcaccaatcgtaccgccagtagccagcagatcgtcaactaccaaaacgcgctgaccaggcttaacagagtcgttttccatctgcagcgttgcctcgccatattccagctggtaagaagcactgaccgttgcccgtggcagcttgcccttctttcgtgctggtgcaaagcctactcccagcttataagccaccggacagccaacgataaaaccgcgcgcttctggcccaactaccatgtcaacctgacgttcgcgggcaaatgccgtgatttcgtcagtggcctgcttaaaagcctcaccatctgccatcagtggcaggatgtctcggaagatgattcctttttcagggtagtcaggaatacttgcaacatatttataaagatctagagccatttaaaattctccttattcgtttgctatcagccagtcagcaacgtattttcgcagcgtgcgcgtgtcgctatacagcagcacctgatcgctttgcagatgagctgcatgctgacgatagcatttcgtctgttctaaatcaacatggtcgggatgatccgccagctttagaacgccatcgtttattgtaacaaattttgcctcataaaacaccgtaatcatccaatttagttgttcaaccggcatctgcagcgaacgtgccatcgccggctgctgttggcgatagttggcaatcttaggatactgacgcaagaagcgatacaaaaccgcaaactgctggcgcgtcggcagaccaaagcggactggatttctttcccaaagcagcagccgaatcattgctggttgcccaccattttgccaaagcgaactgagcatctctaaacttggcggacagtccacgatcgtcacctgctgatccttaaagtcagttttgacggccgtctgtgggcttaaaaccgtcccctgtacatgaccggcaatgttttcccgcagtgtctgatcaaaggcgacataatagccggtttccgtaaacatacttggcaaaagctgccgcgttctttgatccagaattgctgtcccctgcgtttgaatgtcctttagcatcaattgcgcggtccgcttgccacgccattcattaatccccaccgtagccgcgatcgtcaccagtacgccagccagcagcaatggcgccagctcagccttgccaaacgccaccacggccgcgctgcgtttttgtccccgcagctcaaacttcagatgttcctgagccttgcccattgttttgacgttgttgattcgatcagcatgtattgcaaaaaccggttctggattgccaggaccaaacggcgctagacactgcagctgatcataaagatcttcgttgatgtcatcaggtcccagttcagccgccagctccagtttagccgatcctgcttcgaaaagtccctgctcaacggcttcctgttccaaggcctgccgcagttcatcaacctggtcaatggtaaatgacatcccgcatgcctgtgcatgaccgccaaatgccgtcatcaaatcacgatgcttttgcagtgccataaatagatcaaaaccgtcgcgactgcgtccagaacccttggcaatctcatcgccatcattaacgctggcaacaatcgtgggcttgccggtttcttcaacaatgcgactggcaacgatgcctaaaacgccttgatgccattcatgcccaagcagcacgagcgtcgatcgatctgcattttcggctgaacgggcctgttttaaagcctcatcagtaatttttgccaccagctgttggcgcgtttggttggcattttcgacttcttgagcaatctctttgccttcgcgatcatccatggtcgttaaaagcagcacgccttcgctggcgtcgtcaattctacccagtgcattcaagcggggtgcgatgccaaagccgacgtcttgatcagtcagccgatcctcattgagcttggccagtttaaccagctgatggagtcccggccgcattccctgacgcagctgcttgaggccccaggtaatcaatgcccgattttcaccggtaacgtcaaccagatcggccaattcgccaattgctaccagatccagcatctcttggggaaactcttccgtcagtgcccaggccgtcttaaaagcaacgccgactcccgaaagatcaccgccttgatactcactgccaggaaacttgggatgaacgattgcggcggcttcaggcagctgggccggcaattcatggtgatcggtaatcacaacgtcaacgccgcgtgaattggcatactcaatctccttggcaccggaaacgccattgtcgaccgtaacgatcagctgagcaccgccatcaatcaagcgctggtattcatcaagattgggaccatagccgtcagtaaaccgattaggaataaaaaattcgacttgagctcccacctcatccagcgtttcatacataaccgccgtactggtaatgccatctgcatcataatcgccatagacgacgatcttttcaccattggcaacggcggcttgaattcgatcaactgctttttgcatatcatgcagctcaaatggatcatgcagctctgccaactgaggatccatgtaccgcttggctgcctggaccgaatcaatgccgcgctggaccaataattgtgccagcagcggtgaaagttgacattgttcttgaagctcttttgccagctgctggtctttattttgggacaattcccacgcatagcgcgcttccatcatttcaccattcctttaaaacatgacaaccggaacctgtttcagtcccggtcgtcgtctgtttatagactgcgcttgtcctgctgatagtcaaagaactttttgattgcccaatcgccaagtcccggccacacctgatagccccatgaaagccaggaggtccagcctggtacgttgatctcacgagtctcatagccaacatgagcccaaacctgcttggccagttccgccggctgcacgatcatccagcgtggcagtttgcttagatagctgccgtcaggatccgccttgtcaaaaaacgacgtggcaaccgggcctggattgactgtcaacacctggacgccataatcggctacttccatgcgcagaatattgtcgaactgaatcacgccagccttggttgctgaataggcagccgcattcggggtcggaatcttgccatccaaagagcctagattgataatggcgccaaagccttgatccatcatctgcttagctacgcagcggctcagatacatcaatgccagcaagttgacgtcaaccatgcgtttcatgaccgtgcgcgactggcttttaaccgcagtaaagtcgcccagcccagcagcattgaccaaaacatcaatctcgccaacctcgtgtcgaatcgtgttcaacacctcgtcaactcggtctggatccgtaacgtccaactgataggcaaatgatgggcgaccagaaagaatcaggcactgctgggcaacctgattgagcttttccagatcacgcgcgcaaaccacaacgattgccccgcggcgagctgcttctaaagccagttctttgccaatgccgctggatccgccagtaatcaaaacaaccttattgcgcagcatccgtaatgccttcattcgcttcatcattgccatcacctctatttaaatggtacgtcaactatatcaaaatcattaacgacgcgcgtgtcagggaatatatcgcgaacctggtaggccagctgataggccgctttgccggtatagcgtgccgagatgtgcgtcagcagcagtttcttagcatgcgccttttttgccgtcattgccgcctgaccactggttgaatggtagtagctgcgcgccatcttggtctcgtccttggcaaaggtgccctcatgaatcaagacgtcggcatccttagccagttcgatggccgctggcgtatgacgcgtatcactgataatcgtaatcacccgacctttttgcggcgcgccgataaagtcatgtccatccagcactcgtccatccggcagctcaacgaccttaccggctttaagttgcccatagattggtcctgatggtacttgggcagcccgcagcttttcgacctgcaattcgcctggatgatcatgctcaaccacccgatagccaaagcaggcgatcttgtgattgagctttttggtataaaccgtaaacgtcttgtcgctaaaaatctcgccatcatcacgcagctcaacgaatttcaagggatagctcaaacgcgattcgctgacttttaacgcggtcttgacaaactccttgataccaacgggaccatagatcgtcaatggctcattgccgccttgaaacgatcgcgagctaagcagacccggcaggccaaaaatatggtcaccgtgaagatggctgataaaaattttttcaatcttgcgggggcgaatcgtcgtccgcaagatctggtgctgagtagcctcaccgcagtcaaacagccagactgcattgcgttcttccaacagctttaaggcaatgctggaaacgttgcgctgcttacttggcgacccggcaccggttcctaagaattcaatctgcataaatcattttcctattctgtcttctattatcatcgattattggacaaattcaaaaacaaacttttcaattcgtaccaaatccccattttcgatgcccttagcccgcaatgcatcgtcaacgcccatatgccgcagctgccgagcaaatcgcagctgaccgtcttcatgatcaaggttggacatcttaaacaggcgcgtcagtttttcgccgcctaagacccaagtgccgtcatcgtcacgcgtaatcgtaaagtctggttcggcttccttagcacgatattcgacgcttgtcagcttgtcatggtgctcgctgtcaaaggctggcgtctgatcaagcagatccgccgtcatctgcatcagcccctgcacgccttgatgcgtaatcgcactgattggcacgactggcggcatcttagcaaacgtatcgtcttgagcaagcatctccttaaagtgcgccaggttttcttgagcgtccggcagatccatcttggtagcaacaatgatctgcgggcgtttcaacagctcaggatcatacgcggccaactcatgattaatctgatgatagcgttcaatagcctgttcggggtcctggctgcccatatcgatcaagtgcagcaatacccgcgtgcgttcgatatgacgcaggaacgtcaagcccaggccaacccctttcgacgcgccttcgatcaggccaggcatatcagccattgcaaaatcacgaccgtccggcagcatgaccatccctagattaggcaccagcgttgtaaattcataagcggcaatcttaggcttagcaccagtaacgaccgaaagcagcgttgatttgcccacggatggaaaaccaatcagcccaacatcggccagcatctttaattccagttccaagtagcggtcctcacccggctcgccattttcagcaatttccggtgctgggtttttggctgaggcaaagtgaatgttgccgcgaccgccacgaccgcccttggcaattaccaattcctggccaggctgagtcagatcacccatgatcgcacccgtatccagatcgcgtaccgtggttccctcgggcacggccacgaccagatcagaggcggctgctcccgtcatctgcttgctcatcccgttttggccatttttagccttaaaaatccggtggtagcgaaagtccatcaaggttcgcaagcccggatcgacctttaaaataatgctgccgccgcgaccaccatcgccaccggctggaccaccgttgggaacgtacttttcgcgccgaaaagccaccatcccattaccgccttttccggcatgggcttcaatttttatttgatccacaaacatgttagccatgaaaaatattctccgttcttaaaatagtgactgctaggtctagtataaggaaaaatcttgcgggcgtcaaaatcagtcatgactgctgccttttgccacatctgccttgccctgcaaagatattttgatcaattgagccgtcttttgattgatccctagtgcctggatatcctcaaccttggcatcagcaatccgatccaatgagccgtacgcttttaacagcttgttgcgcgttcttggtcccacacccttgatctcgtccaatcgggaactcagtgaatgtttggtatgcacgctgcgatgaaaggtaattgcaaatcgatgcacctcgtcttgaatccgctgtaccagataaaatccctgactgcgcggatcaagatgcacgtgatgatcgtcttgaccatataaaagatcagccgttttatgcttgtcgtttttgaccatccctacgactggaattgccagattcagctcattttccaagacatcgcgggccgcgtccatctgaatctcgcccccatccataaagatcagatcgggcagaggctgcccctctttaagcagccggctgtagcgacgccgaatcacttcgcgcgtactggccgcttcatccgcatgatcgattaccgttttcaatttatacttgcggtacagctttttgatcggctcgccatcaataaagactaccatggcgctgaccggatcggcaccttgaatatgcgagtggtcaaaagcctcgattttatgacattctgaaaggcctaaagcatccgtaatctctttcattgcgccgctagttttagcctgatccatttccagcagccgaaatttctcattcagctgcaattgggcattttcataggccatgtgcatcagatcgcgtttttctccccgctgcggcgttcgcaccggcacgcccagaatctcgctgatttcatgattgggcagcccggtcggcaagagaatctctttaggcagaatattgtttttacggttataaaactgcagaataaagctggtcatttcttcagctgccgtgtcgactaccggaaacagtcgcttttctcgtttcatcagtcttgcctggcgaataaagaacacttgaatactcagccagcctttgtccatataaaagttgaacagatcacgcggcgttttatcgttggtaatgattttttgtttttcaaccgtcacctcgatatagtgcaattgatcgcgaatctcggccgctctttcaaattcaagatcagcactggcctgtttcattttggccaacagctgctttttgacgctggcagtgttgccatttagaaacgacttgatttttttgatctgagcatcatagtcttcccgcggaacttctttaaaacaggcacccaggcactgtcccatgtgatagtaaaggcagggccgtccttgatgtcctcggcagcggcgcagcggatagaccttttgaataaagtgcagcgtttcttccgccgcgtagacgtttggataagggccaaaataataggcaccatctttttttatctgaccggtaatctcaatgcgcgggtcacgctcattggtgatcttgatgtaaggatagccggttccccgcttaagcttgatgttatagtaaggctgatgtttttgaatcagcgtaatctcaagcagaaagctctctttgttagaatcggtggtaatgatatcaaaatccgcgacctgatcaaccattgccgcaaccttccccgtatgactgctcttaaaatacgagcggacccggttcttgagattctttgccttgccaacatagatgatctgaccattgatgtctttcattaaatagcatccgggcttatccggcagcagcatcagcttatgctccactcgctgtgtggtcattgaacgcctccaattagttaattatctttaattctagtacagactggcagctggtcgcaaaagaatcgcctgtaagttgatttacgtcatttccagtttgtgataggatatttgcaagcagcaattaaaggagggccagccatgggtttggtaacacaacgcaatcaaaagctggaaaaactgttcaacgacttggcaatcgatccaaaagaaaaagccaaggaaaaggccaagtcggctgaccagacagaagccagcgacaaaaacaagcaataatcgttttgcatcataagaaagcaagagggtcccgtatccggtcagttccggacatggggccctttttgctgattcatgactgattgatcaaaaactgctatttttgatcgtgcatgcgagcttcaatccattgccagacttcatccttgccgaatttagtctcagccgagaaaagctgcagtggcgtgtcagtcatccccagcgtcttggtaatctgcgagatcgatttcgttcgtgcgctaggtttgactttatcgatcttggtgccgactaccaaaagcggtacctggtagtatttcaaccactgatacatggctacgtcatcgtcgcttggtgcgtgacgggcatcaaccaattcaattacaccctttaactgtggacgtgtggtcagataagtttcaatcatcttgccaaatttttcgcgctgctttttggagaccttggcatagccatagccagggacatcgacaaaaaagagctgatcttcaacgttataaaagttcagcgtctgtgtcttgccgggctgactagaggtatgagcgaagtttttgcgattgatcaacacattggtcaaagaagacttgccgacattcgaccgaccaaccaaagcaatctctgggtagtcggtcttcggatactgttcttcagcaaccgcgctgatcgttaagtcaacgtgatgaacttccataatctgtttttcctccgttaaaaaagggtcactgctgaccctttctgcctgttatgaagctttttcgtcctttaatacgtaacgcggctcgccatggctttccacgcagcgcttgtcaattacgaccttggcaacgtcattgcggcttggcagatcaaacatgacgtctcgcattacgtcttcaatgatcgaacgcagtccacgcgccccagtatttcgcttgattgccaattgagccattgcccgcaaggcaccatccgtaaactgcagctgactgccatccaagcggatcagttcctgatactgcttgaccagagcattctttggctccgttaagatgcggaccagatcatcttcatccaatttttgcagcgccgtcaaaactggcaagcggccgatgaactcaggaatcagcccaaacttaagcagatcttctggaatgacgtgttggaggatgttcttttcgttgacgtcctgcagctcgccagtatccgttccaaaaccaatcgtcttgtcacccaggcgttccttgacaatattttcaattccatcaaaggccccaccaacaatgaacaaaatattgctggtatcaacttgaataaactcctgttgcggatgtttacggccaccctgcggcggaacgttggcaatcgtgccttccagaatcttaagcagtgcctgctgaaccccttcgccggaaacgtcacgagtaatcgagacgttttcgccttttttggcgatcttatcaatttcatcaatgtagataatacctttttcagctcgttcaacatcaaagtcagcggcctgtaaaagcttcaaaatgatgttttcaacgtcctcaccgacatagccggcttcagttaaggtagtcgcatcagcgatcgcaaatggcacgttcaaaatctttgccagtgattgtgccagataggtcttcccagaaccagtcggcccaataatggcaatgttgctcttctgcagatcagtttcgttgttgtcgcccgtcatcatggcgttgacccgtttatagtgattatataccgctacggccagcgtctttttagcatcgtcttgcccgattacatagtcgttaagctccttgacgatttcggccggcgttggtacgcggaaagtttcattagcgtgatcttcggccagctcttgttcaataatctgctggcaaagatcgacacactcgttgcaaatgtagacgccaggaccggcaacgatcttttttacttcgtcttgcgacttgccacaaaaagaacagtgcacggcatccatgccactggtatcttcaaacatcttgcgtcctcctcttaaaatgattgtgtttatcatatcaaactgtcggccaaatttcgaataattcaaaccatcatcgatacgacaggcaggcttaaataaaaaatgatcgactcagtacgacaacagggcccagcacccggataaccgaacgctgggcccctatgttgttttaacagtgctgattgcagctgtttttaacgcaatttcaaagattacttgtcttcttctgcgtccttggattcaacttgcttagcagaatccgtaaccaggtcaacggccttcttgatttgaatgtcgtgactcagcatatccttggacagagccttcttaacggcatcttcttccataccgtattgagcagccaggtccttgatttcagcatcgatgtcttcatcggttgcttccaggttggcatccttaacgattgcttccagaaccaggttggtcttaacccgcttagcagcatcgttggcgaattgcttgcgcaggtcgtcttcagtagtaccagtaatttggaagtacatcttaggattgatgccttgttgctgcatgcccatcaggtattgttgtacttgacggtccgtgtcgtcgtccagcattgcttgtggaatttcttccgtttcagcgttgttaacggcagcttcaatagcagcatcttcaatggcagcgtgagcagcgtcttctttttgttcttgcagctgcttcttcgtcttttccttcaattcgtcaagcgtgtcaacgtcttcgtcaacgtccttggcaaattcgtcgtccatttctggcagttgcttttccttaacttcgtgcagcttgacttcaaagacggcttctttaccggccaggtcttgtgcatggtattcttcagggaaggttaccttaacttcaacgtcttcgccagacttgtggccaaccagttggtcttcaaatcctgggataaaggcgcctgagcccagttccagcgagtagttgtcagcagagccgccgtcaaacttttcgccatcaacggaacctacgtagtcgataacgaccgtgtcgccgttttcagctggttggtcttccttcagaaccagttcagcttgttgttgacgcttggattccaattcgtcttcaacttccttgtcggaaaccgtcgtgtcttgagctggaacttccatacccttgtagtcgcccagcttaacttctggcttaacggcaacttcggcagtcagtacccatggctgacccttttccagactcttaacatcgatttgtggttggtcaactggttcgataccggtttctttaacagcatcttcgtaagcctttggcagcacgatgttcaaagcatcttggtacagagcttcttcaccgtacatttggttaaacagttgacgtggcacgtggcccttacggaaaccaggaaccgtgatccgtttttgcgtacgcttaaaggcttggtcaatacccttcttagccgtttcaacgtcgatttcaaaagttaatgtccctttgctggcttcgctgtcgcgttcccattttgctgacatttcatttcctccaataacttgcagttttcaactggtcgctgctcatatcacaaatgacagcgacccgtacatactttaatagtttaccgtacagtgccctggatttcaactattcgcattaattatcgccaatttaagcctgatcatcgacttcgagcgttacaaaccgaccattggcaacgtcaaagagcccctcatccgtcaatttcaattttggaattactgccaatggcaaaaagctcagtgacatgactggatcaatattttctggaattcccagctcttggtaagcagtctgattgatctgattttgggccgccacgacctgttcagccggctgatcactcatcaaaccagcaatcggcagcgccatgcgggcaattggcttttgatcttttaccatgacaacgccgccgccctgtttgatcagttcagcaacagctgccagcatctcagaatcactgaccccggctgtcatgatattgtgggagtcatgaccgattgagatggcaatcgcgccatgcttgatgccatatccgctgaccagtgccgtacacattttgccggtggcgtgatgacgctcaataactgctaatttaaccacatcttgactttgatcgtagacaaaatcaccggtttcatcatgactgacttgacggattgcttcatcagtcaagacctcccccggaatcaccttaatcgtccgcaccggcttaccagtcagatgcagcttaaaacaatcgctggctaacggcttaacgtgcatggaggctgccaccgcatcgattggatagcgctgaacctttggcagatactggccatcttgagccaccttttcgcctttgatccaagtctgttccacatgaaaacttcttaaatcatctacgactaccaaatcagctcgtctgccgggggcaatggcgcctcgatcatttaacccgcagtattcagctgcgtttaaggtggccatttgaatagccgtaatcggagaaaggccctgctcgatacagatccgaatgctgttgttcagatggcccagcttcattgccgtgactgcctggacgtcatcgccagccaaaagacaatggcgagcagtttgcgggtttacgactggcaagagatttttcaagtcatgctcagtcgttccctgccgaagcagaacatacatcccgcaagccagacgatctttggcttcttgagccgttgagcattcatgatcattagctacgcccgcagccgcataggcattcagcagtttgccaaagacttgcggcgcatgaccatcgatccgccgatgatactttttggccagcataacctcgtcaatcatcttatcatcattattgacgacgccgacataattcattaattcagccaagccatccacggtaccatttttcaaggccggttccatatctaaagcactaaggttggcgccggcatgctcaaaaggagtcgaaggcacgcaagaaggcatcaagtaacgaatatccatttttgccagcttggcagcctgctccatgtattccaagccttttaaaccggcaacattgacaatttcatgcggatcgcataaagcagttgtcgttccgcacgggacaaaaatccggctgaattcctcaggcgaaacataggaagattccacatgaatgtgagcatcaatcaaccctggcagcaagaagcgcccggccagatcaaccacctgctgtccttcataacgctcaccaattccagcaatataaccagctgccaaggccacgtcgcctcgccgaatggttcctaaaaagacatccacgatctgcgcgtttctaatcactacgtcagctggcacgcgaccagctgccacatcaatcaagtgttttagttctgatttttttatcatgactgaagcttctttcatttttgtcaaaatattataaaaaaggcacgaccgctttcgatcgagccattttaatagtcgttatggcaatacgtttaagacgtacagcatcaagatgaagacaaagagcaatgtccacatgatccaattgatttctttgcgccgtcctgcaaccgtcatcgtcagcgggtagagaataaagccaaacgcaatcccgtaagaaatattgtaggtcaaaggcataccggcaaccaccatgaatgctggaaaggcaatttcaaaatgaagccaatcgatacccgccaatgaactggccatcagcgaaccaacaataatcagtgcaggtgccgtaacctgggtcgtaaccaccgtcagcagcggactgaacagcagactgaaagcaaacaaaacgccgaccgtcaacgcagtcaatcccgttcgaccaccaactgcaatcccagccgatgattcaacgtaggcagccgttggcgtagtccccattaccgaaccactcagcatggaaattgaatctgccatcaaagcctggccaatccgcggcatccgatcgtttttcattaaaccagcctgttgtgccaaacccaccagtgttccggccgtgtcaaagaatgccaccaaaaggaagatcagtaccacggcccacatctgcggcgtattaaccttgcccaggttggtcagcgccacgccaaaagtcggcttcatggaaggagctaacgaaataatatgagcaggcatcttaatcaggcccgtaaacaagcccaatagcgtcgtcagaatcatcccgataaagattgatccaggaactcgtttagccatcaacagtgcaatcgctaataccccaaagatcgtcagccaggtcgttggtaccgtcagtgagcccaattgaaccaatgagctcttgctggcaacgaccaggccaccgccctgcagtccaacaaaagcaatgaacagaccaatcccagccgcaatggccagtttcaaatcatgcggaatcgcgttgattacggcttcacgcaccttcatcaaagaaaggatcgtaaagattaccgatgctacaaaaacaccagccatcgcggtctgccatgagatccccattgccagaaccaccgagtatgtaaagaacgcgttatcaccaagaccaggcgcaatggcaatcggataattggctaaaaatgccatcaataaacagccgataattgcagataatgccgttgccgtaaaaaccgcgcccttattcatgccggccattcccaagacgctgggattaacaaacagaatgtaggccattgaaacaaaagtcgtcagacccgcgagcagctcacgcttgatcgtcgtgccctgctcgcttaaatgaaaccatttctctaaaatattggtagaagcaggcgagttattcgtgctttgacccattaaaattcatctcctatgcatttaatccaacaaacaagatttgattatgcaacaattttcggatttttgcaatagattaaaacgataaaattacgaatgttcgcatctgatttttaaatcggcttttgtaaaagggtttaaatacgattgttcgggaatttaaaaacaggccatcaatgctcaagcctggtaataataaatcaaaaatgattttcaattgttttcctagctacagctaatcaatccatctctgactgaatgtcattgccttgatttttagcgactacataggttatatcagtaatttcggtctgttacggcgctttgactgtatccgtacctaaaaaaattccccgcttcatttttgaagcagggaattaatcttcaccaatctgatttgataaagatccaaaaaaaagagcaagcagaaatctgcttgctctttgattaattgcactaatttgaaattagtccaggatgtcagaaacgacaccggcaccaacagtgtggccaccttcacgaatcgtgaacttcagacccttttcaatggcaactggcttttgcagggaaacagtgaacgtaacgttgtccccaggcataaccatttctacaccatctggcagttcgatcgtacccgtaacgtcagtagtgtggaagtagaattgtggacggtagttggagaagaatggcgtatgacggcccccttcttccttcgtcataacgtagacttcacccttgaagttcttgtgcgtttggatggagcctggttgtgccagaacttgaccacgttctacttggtcgtggccgataccacgcagcagaacaccaacgttgtccccggcttcaccaaggtccaacgtcttgtggaacatttcaacacccgtaacagtagacttcaggatttcgtccttcagaccaacgatttcaacttcgtcgccgaccttaacggtaccacggtcaatacgaccggaaacaacagtaccacgaccagtgatagtgaagacgtcttcgattggcagcatgaatggcttgtcagtaggacgctttggagttgggatgtattcgtcgataacatccatcaggtgcaggataaccttttcttgttcagggtcaccttccagagccttcaaagcagaaccacgaacaactggaatgtcatcgccagggaaatcgtattcgctcagcaggtcgcgaacttccatttcaaccaagtcaaccagttcgtcgtcgtcaaccaagtcagtcttgttcaggaatacaacgatgtattgaacaccaacttgacgagccaacagaatgtgttcacgagtttgtggcataggaccgtcagtagcagcaacaaccaggatagcaccatccatttgtgcggcaccagtgatcatgttcttaacgtagtcggcgtgaccaggggcatcgatgtgtgcgtagtgacgcgtttccgtttcgtattcaacgtgggccgtgttgatagtgataccacgttccttttcttctggagcgttgtcgatatcagcgtagtcttcagcctttgccagacccttttctgccagaaccttcgtgatagcagcagtcagagtagtcttaccatggtcaacgtggccaatagtaccaatgtttacatggggtttagtacgttcataatgttctttttcagccattaatgaaatcctcctgataaattacaagtataatgccagacaaccaaatcattgtctgacacacccttaatgaaaattgtactacttccgggagccaattaaaagtttaaaaaccggttttccgaaagaattcttaattataatatcagctctatcctgatttgtaaatgaatttaaccgaaactttttaatgcatgcccagttgctgagccagacgcgcaatctgattctgccatcgtttagctaaaacaacgtcttgatcttgatcggtacttttagaataagccgtcaaagcctgataccaagcacctgcatcaggaattgccaattcaaccagtggatataaataggccagttgcaagtgaaattcttgattaaacatctgatatgacaatggatcctgctggctgaaatctcgtttgatcatttcttcaacctgtgaaacaaccggtatcgcttcaacatccgacagttttgccagatcaatcaaatgctctcgttcatccagccaatagatggcaatctttcccgtaagatgcaatcgctgcaatatttgcatcagacttgatctgatcaacggattgacaaacggatcacgaaccagaaacttggccccaatcagatactgcttaagcggcaggtgactggcagctctaaaacgacgctgctgttcgctaaaactgccatcgcccaagtggtagaactgttttagctgactgttcagcgtcgtctgatagtgagcggcaaactcattttcggcctgctcgacctgaccaataaactcatcatgccattttggcagagcattcagctgcacgcgcacgtcaataaacgcttgggcatgcagctcaacgttgatcaatagctgcatcagctctttagaagtcacatagtcattgagatgctcaattgcataaaaagcggcctcagcatactgctgatcttcatataatgctcttaccagctggcgattaatagcaaactcgtcaacctcttcatacaaagcggcaaaccgttgggcggcctcatgatagtgctgctggtcaagcaactgatctgcctgatgaaactgctcttgttgtaaaggcgtcatagtcttaaaattcctttctaaaagtcaaacagcgtgagcacttgctgatgctcacgctgctgattatttgcctgccttggcttcggtcttgcgctgacgcttagctccgcgtccccgaccacgatgcttgacggcagtctttttggctgttgattcctcattagccttgtcattgttctttttagagtggttcttgcgctttggatgctggttgatttccatgattaccggcaaaattaccggatgacgcttagtttgattgaaaaggaaacgattcagcttttcgcgcacgtcagatttaagatgcgtccagtcaaactctttttgatcaaggttttcctgcaccactttttcaaccagatcggcactttgcttcatcagttgccggttggtcttaacgaaaacaaaaccgcgcgaggtaatctgcggccgcgccacgatcttcttctttttacggtcaatcgttgccacgactacaaagatgccgtcctcggacaatacgcggcgatcacgcagcacgatattgccgatatcaccaaccccggtaccatcaatcatggtattgccaacctcgacgtgggcccctaaatggaatgccccgtcttcataggtcaagacatcgcctttattagtcaaaaagatgtggtcagccggaatgccaacttcttcagctaaaatggcatgctgatcaagcaggcgatattccccttgaattggcataaaccattgtggccgcataaagttaagcatcagctgctcatcattttggttggcatgaccggatggattcagatcagccgcaataaacttgacgctggcaccggtccggtaaagcatgtcctcagtcttttgcaccgttgtttccatcgcatatgatggcgtcgttgtaacaaaaaccagatcgttttcgttgagcgtgatgtttttattgtcaccattggcaatctgctgcagtgccttgattggctcacccatcttgcccgtttctaagacaaccagttcctctggcggcaattttttggcttcttccagcgtaatcagcaggtcatcttctggcatcttcagcttattaagggacatagccgtgtcaatgatctgttccaggtcgtggccagaaagaatcaccttgcgtcccgttgccgctgccgcgtttaaaatctgctgaacgcgcataatatttgaggctacgctggcaaccaccacgcgtcctggagcagcttcaaaagtatcttgaatgtaggctgcaatatctttttccttggtattcatgccggtaatcccagaaccggccgaatcagacagcaaaagcaagactccctgctggccaatctgagcaagccgagccaagtcggtccgatagccttcagcagccgtttgatcaaacttaaagtcaccggtatagacaatgttgccttctggcgtctgcaaaacaatccccatggtatcaggaatcgagtgcgtggtcttaaagaatgaaaccgtaacgtcgttgaagtcgatttcagtagcagcatcaacaacatggaagtcattgaattttttgactttcttgtcggcactgtctttaacggccagcttagccagggcaatcgtcaattcgctcccaaataccggtacgttaaaatcagccaggaaatacggcaacccaccaattgcatcggcatggccctgggttaaaaagaccccgacgatgcgatcggcactgtcctttaaaaatgaccagtccggtacgaccacgtcaattcccatcagttcgttttccggatattttaaaccgcagtccaaaataaaaatctgttcgtcaacctcgacggcatacatgtttttgccgttttcgtgcacgcccccaaaaggcgtaatcttaatcttgctcatgtttgctcctttatgattgtatttaaacgcgccacggtcctggacggctcatggcaatttattcgttcataattgctgttattcatcttaccacagaatcaacacagattgataattaaccattctatccatgaaaaattttaattaaaaagagcaacaaaaaaagccccgacatttgtcgagacttaagatctgagcagacgttagaattaacgacgcaggcccagacgcttgatcagttcacggtaagcttgcaggtcagtacgacgcaggtaagccagcaggttacgacggtgaccgatcttcttcatcagaccacgttgtgaatggtagtcatgcttgtgcgtacgcaggtggttgttcagttcgttgatgtcagcagtcaatacggcaacttgaacttgagttgaacccgtgtcgccttcgtgcgtagcgtattccttgatgatttcgtttttgcgttctttagagatagccatgttgctattcccacctttcaaattttaatgcgccgagttctaggtagagcgtcggtgaggatcgctgaaccgagaagaggcatgggccgtttttagcagcctttgataatataacggattctgagcaaaattgcaaccaacaaagccttttttcaaacgataggactaagactattgcaatcgccaactgacttttgtataatgacaaatgttgaaaaattctggtcaactaattaaaccgggttaacggaggtgaaattcatgccaatcatcaaatcagcaatcgaacgtgtacggaccagcgaaaaggctcaagcacgcaacgcttcccaaatgagcgaaatgcgcacggctgttaagaagttcgacaaggctaaggtagccggcgccgaaaaccttgacgacctgtacaaggcagctatttccgctattgaccgtgcccactccaagggcctgatcaaggcaaacaaggctgctcgtgacaagtcccgtctgacggctcgttacaacaagtagtgcttaaataaaacaaaaaaccgatgtctcagcggcatcggttttttgttttacccagcttttttagcaaactgcagcataaacagctgaaacagcagttctggctcgcgcgaagtcgtttttaaggctttttcacagcgaataagacctaaataggctcttaccaaatcgttcatttgaaagcgacgcgccgtctgcataccaagcttaacccggtatggatgcactttaagccgactggccagcgttccctggctcagcccccgcttgctcaataccttaatctgaatcagcagtcgaaactgactgaccaacagtgcattcagctgcagcggctcgtgattggtttccaaaagctgctggtagatatccaacgccttggcctggtctctttttaagactgccgtaatcagatcaaagacgttctcatccaatgactgtggtaccagccccatcacgtcatcgcgtttgatgcatttgctttggtatgccaaaagctctagtttctcaacgttccccatcatcaagccataatcagcattggtacgtctgattagttcatccatcgcaccattttccaagcggtaaccgtcacctaagagcttttgttcaacctgatggcgggcatcctgttcgcttaaaggcgccgcactgacctcaactgcgacttttttcagttctttgaccagtcccttgcgattgtcaagtttttcataaggtgccattaataccagtaccgttgacggctcaggatgttccagatagtttttaaatgcgtctaagtcatgattgaccttgaccttggcaggattacccgttaaaaaatatggcttgttgatcaaaaccaagcgccgttcgccaaaaaaaggtgccgacattgcatcatcaagcgcaaccgaaagcggcgtcgtctccatatcgtagctgccaacgttcatcacccgctctgtttcaggaatcagattcataaaagcatcacgcgcctgctgctgcaaaattccttgcgttcccaatattacatagatcattgccggcgtctggctgattagttgttggcgtaaggtggcaacatccattttaattcatccccttttagtctggttttccagtatccttgattttgatagtaacaatagctgatcatcccatactgctgagtcgaaaccggcgtaatccccaaacgccgcagattttttatcgtcacggaattaggatgaccatagcgattaaagcgaccggctgagatgataccgtaacgcggctgcagacggcttagaaatttaggatcgctgccagttcggctgccatggtggcttaatttcagaacgtcggctctcagctgtgaatagcgatcaataacggcccgttctcctttgcgatccagatcaccggtaaaaacaaagtcaagtgatccaaagcgtcctgccagcaccattgagtcttcatttttgcccgtcccagatttaaagggatgcagcacctttaagggcagatcattgggctggtgatcggctcgcaccggtatgactttaagcggctggctgaccaggcgcttaaatttcggattacgctccattccactggggaccagcacctcttttacgtgcattgatttgagtacggttggcagatagccgatatgatcagcatcgctgtggcttagacaaatagcatcaagtcgcgtgatgccacgactctttaaatagctgatcgaagttctggctgccatatcgctggtcgtctgactcttggcccattgcggcagacgatactgcagtcggccacccgtatcaatcatcactacttggcggttaaacggcgttcgcacaatcgcacagtcgccctgaccaatatctacaaacgtcacctcaccagctggcgctagatgaatcgacaaaaaagccacacaataagcagcagccaaaatataccagctgctttttttagcaggctctgccaacagccacaaagtcaaaagcagaattataatagccccaggtgaagatagttgaccaaacaccagcatgcctggcccagcagccaattggtccaaaatccgatgcagcagcttcagcatttgattaaagctgtatgccaaaagcggcagccagctggcagtcagagccgccagcagcgtaagcggaaacagcactgtgccgaataatggtatcagaagccagctgaccagcgtgcttaataagtgtacctcataaatataatgaaacaggctgggcagactgaccagattcagccaaaatgctctttttagatccgaaacgtttcttagcgacaacggcatcagcaaagacatcaaatagctcagctgtccgccaagcgtcaacaaaacgtatggatcaagcagaatgccgatcactaggctgatcgaccaggcatcaactcttgaaaaacgcagccgatgactcaaaaggcgcacttcagccataatcgatgctcgaatcagactagccgcaccaccgccaataatcagataaaacggcagcagagcaattaaaagccagtcgatcgtttcaatattaaaccgcaaccggatcaaaagtcctcttaaaattgcaataaataaaaccacgtgcatgcctgagatgcaaaatagatgaatcacacccagttttttgactgaactcaacagctgcgtggtcttaaaggtattaaggccaatgatcagactatcgcaatactcgctcaacggcgagggcagcgtctgaaaatactgatgcagaccaattcttagacaatgacagcgttcaatcagcgtatgtggtttttgcggctgccaatgccatttttgtgcccgaatctcattatagatatgatgtcgccactggtacttttggtagtcaaactggccaaaattggtaggaccgatgattggctgctcttggcctttgatctgccaaaaaagcacggcttggttgtgaaccagcgccgccttttcttgtgaagaacgcagtcttaggaccactgattcacgctcgcctgaattcagattggttccctgcatctgaaccagattaccgttaactataatctgatcaggcagtaccttaaaattgcattcaatcggctgcggcgttgtcagcggcttagtccgagcgttataaagcgcatagccgcaaatcaggatcgtcgtcaaaccagctaaaagcaccagcttgatcgttgtaaaatcatgcagcgtccaaacgcgaaacagcaaatagagcagcagcagacacagccacagctgactgctcaggataatcccggtaaccaaagcagcggttagggcaggaaaaagccaccgtgaatcaatcaatccttaaatggcttttgcggattgatgtactggtccaaatgggcttcttccaaaatgttggtatcaagcttgatctggtgtaaagcgacatgtttcaagcgaatcagcttcattgcatagtcgtcgttatgataattgcggatataattgatctctttgattccagcctgtaaaagactcttagtgcactgcaggcaaggaaaatcggtgacataaaggctggcgccatccgttgaggcaccaaacttggcacattgcagaattgcattcatttcagcatgaatcgtccgcacgcaatgaccgtcacgtaaatagcagcccgcgtccagacaatgatcatcgcctgaaaccgagccattgtatccgccagcgataatccgcttgtcacgaaccaagacggctccaaccgacagtcgctggcaagtactgcgggaagccagtaaggccgcctgcatcataaaatactgatcccaatcaattctatgttccacttttatcatcctcttttttgttctgctaaccagtataccagattcaatctcaacaccaacgtcaattttaaaccgccacttggtcttttagcttggcaaccgtcttatcaccaaagccatcgacgtttttcagctcatcgatgcttttaaatggtccatgctgctgccgatactggatgatcatatcagcttttttatcgccaattccgttaatctgacataattcttccttgctggcctgattaagattgatcttgggcgtatcctgtcccccagtcgaagtactcggcccagtttgatcagctgccatccctgtcgtcaaaccgcctggcagctgttcgccttgagctggaacatagacgacctgctgatcctgcagctgcttggccaagttgacctggcgcatgtctgcatcggtatggacgcctcccgctgctgcaatcgcttcttgaacgcgggcattttttcccagcgtgtatactcccggccgattgaccgctccttttacatcaacacaaactttggcaggcgttgtcgctgccttgcttttatcaacggctgccggcttggtgctgacagccgtggcaaaagttggattggctggcgccggtcgggaatacagccagccaccgatcagcagtgccaccccgcctaaaacgatcaaaatcgtcttgcggtgcagctcccaaaattcttgccactgcattttttcaccccctcaatatgctttacgccaaaaagacttatttgcattaaaaaaagccgaaaattcttaaaatttccgactttcacattatttctttattgatgagttctcaggtactcaacagcgtcattgaagctcttgaccggtacgaccttcatccccggcgcatactttttggccgtctttttagccaattggtagttggtctgatggccttcttcatatttaagaattgttttggttggcttgacgtaaggagcgaagaaaatcgtcgcgccggctttatgagcggcaatgaccttcttatcgatgccgccaatctcaccaaccgatccatctggggcaatcgttcccgtcccagcgattttgcggccatgccgtagattctcgccagatacctgctgatagatctgcagactgaacatcaagccgccggatggtccgcccaattgtcctggatcaaccttcacgggaatcttggtatgaatcttgacgttgtcagtcagtaaaattccaatgccggcacgatcgcccattatcttgatcagcttgtgcgttgtctgatgctttttgccgttgtgcaggtaggtaatcgtaaggtcttgacctactttctgattggcaatgtatttttgatagccttgagcagtatcaaaatgcctaccgtcaacctcggtgatcgtgtcgccaacctttagatcatttttgaatttggattgcttttcaacctcgagaacgtaaatccctagatactgcttggtgtattcctgatgagcagccttgtaggcaacggcaatcgcctcattaatggcactcttcatataaaaattttgtactttgttataagtggcaccgctttgaccgcccgtaacatcagaagccttctcaatcgttgcctgcggatcaaaatgggcccagatataggttgcgggacgggcctgctgcaagtagacggaggtaatcatatagcttcccttgtgcttatctggatgccccttaaccgttacatatgattttagattatcggcggtccccggcgtctcaatataatagttcagtggccagaacaaaaaccagccaacaaacaaaaccgcggccagaacccccgcaatccgcttgagaatctgcttatcttgtctgctcattttgttcttttacctgctccagtttttgttcccgcagccgtttctccaaagccttattgatattgcctggcaaataagcagaaatatcgccaccagctgcggcggtctcctttaaaaggctgctggagagatgctgatatttaggatcagctaaaaagaaaatcgtttctgcctgatcgtctaaaaactgattcatcgctgcaatatcgcgttcgtattgaaaatcagtaacgttacgcagtccacgcatcaaatagtcggcgccaatcttgttcatcagatcaacggtcaagccctcagccgtgattaccgaaacattggaaagtccggctactgcttctttaacctgggcaacgcgttcctcaaccgtaaacagcggctttttggaatcattgctcattactgcaaccgccagctgatcaaacagcgcgctgccgcgacgaataagatctaagtggcccagagtcagtggatcaaatgacccgggaaaaagtgcaatcttcattaggcttcatcctttctaaaacgataaatcgtcaataccgtaataccataagtctgctgtcgcaaaaactcaaagctgccccaattctcagtcggcagctgagcttcttgattggtctcagctacgattaaagcttgatcgttcaatagattcaagtcaaccattttttccagatcatcaataatatgctgcttggcatatggcggatccaaaaagaccaaatcaaaatgctgtgtttgccgactcaaaaaatgcagggctttttcggcatcctgtttataaacactgaaacgctcagggtgcttggtaacctcaatattttttttgatggttttgatggctgcatactgccgatcaatcaaggtcgcatgatcgattccccgcgaaacggcttcaatactcagcccaccgctgccgccatatagatctatactggtcccgccttcaaaataggggccgataatattaaacagcgactctttgaccttatcagtcgttggtcgcgttgccattccaggtacggcattcaagcgccgtccacgaaactcgcctgaaataattctcattctttttcatcctcatcatgttttttgtacagtcccgtcacttccagatcggtcaattcaggatcaatttccggccagtgtgactgcattacttttctgacattacgcagctgccgcaatttttcaattgtattggcaatattttcttcatcaacgtacaaaaccacgtaatgcatccggcgcgatgaatattgaacatgaccataccgccgcagcgacttgaccgtcttcatgctgtttaagtagacgatcaagccgcgccggggacgaatcttaaagctcattacccgatccccctttgtctaattgcctgtaggcgccgctggtttttacgccgcagcttttgccgaatgctgacattcatcgccaaaccaagcgcaatgcttaacgcaagcatactggatcccccataactgataaatggaaacgttacccccgtaatcggcagcagaccagtaaccccaccaacgttaattgcagcttcaacggcaataaaagtacccactccatagcagagcagtccctcatacatattgtcagagcggaccccaatccgaatgatctggcagatgatgaccgccaaaagcgccaggatcaaaaatacaccaataaagccaagctcctcgctgacaactgataggataaaatcggtattgggctctggcagatagcccattttttgaacaccattgcccagaccaacaccttttagcccaccattgctgattgcatagtatgaattaaccagctgactgccggcaccgctctgggttccaaacggattgacaaacgctacgaatcgcgcgacctgatagtttttgatatgaccagttgccacaaccttagccaagctgggcaaggcaattattccaatcaaaagcaggccgtcaaaaatcagaatcgtccagcgtgaattatagcccgatgccatgatcatcacggcagcaatggcaaagttgattgaaaaaccaccgacgtcaggctgaataataataagcagcagcaaaaggccggttttaaacaacgccatggaatactcacgcatgcttggacagtgcagctcgtcattgaccttagcacagcgattagcccaatagataatcagatataattttgaaaattcggctggctgaatactgatcggccctagattgatccagccattggcaccattaacagcgcgtccaaagaacttaacgaaaaacaataaaaaaagaatacctacataggtccaccataaaaagcctcgcccgcgaagtatatttaggttgaatgaagctaaaactccaaaaaatccccagcccaccaagacaaacacgatctgcttaatcagatagttgactggtgagccgcccgtctgcattctgattgcggcactggccgaataaaccatgactacgccgattagacacagcaccaaatacggaatcaaaatccaatagtcgatgttgcgcatttttcgatagattttttttaacgtcgtcttcaactagccattcctcgctttttgataaaatcaagtaacattatacaccactattcatgcaaacatgcggcaaatcacaagccggctgaaaactgaacagcatttaaaaaagactcatcatccggtcactaggccgaatgatgagtctttatcggattttaatacatgcatcaagcactgactacttgcgtgaagctgcccgacgacgcttggcttccttttcacgagcattcgtgttcaaaatctgcttacgcaggcgcacgttttcaggagtaatttcacagtattcatcatcgttcaagaattccagtgattcttccagtgaaaggtgcgttggcgtcttgatccgcgccatttcatcagaaccagcagcccgcacgttggtcaggttcttacccttggtgatgttaacggtaatgtcattttcacggttattttcaccaacgatcataccttcgtagacttccgtacctgggtcgatcaaaagcgtaccacgcgattcgatccccatcattgcataagtcgtagccttgccagcattcattgataccagcgttcccttagtccggcctgggttccagttcttgataactggacggtattccttgaaggagtggctcatgatcccataaccacgagtctgtgacatgaattcagtcgagtagccaatcagaccacgggaaggaacttcaaagatcatccgcgtttgaccgttcttggaaggttccatgttcttcatttcacccttacgctttgcgagtgagtcaatgatgccaccagtgtattcatcaggaacgtctacttggacttcttcaaatggctcgcaggtcgtaccatcgatttcacggtagataacctgtggacgagaaacctgcagctcgtagccttcccgacgcatcgtttcgatcaggattgacaggtgcagctcaccacgaccagaaaccgtccaggcacctggttcgtcagttggatcaacccgcagtgaaacatccgtgtgcagttcagcgttcagacggttttccagttgacgagacgtaacgaacttaccttcccgaccagcaaatggtgagtcattggtccggaaagtcatttgcagcgtaggcggatcgatccgcaatggcttcaaggcttcaggatgttcagaatccgtaatcgtttcaccaacgttgatgtcttccatcccagaaatggcaatcaagtcacccgccttggcttcttgaatttcttcacgcttcagaccaaagaaaccaaacagcttggtaacccggaagttcttcttggagccatccagcttcataacagaaacattgtcgccgaccttgatcttgccacggaaaatccgaccaatcccaattcggccaacaaagtcgttgtagtccaaaatggcaacttggaactgcagtggttcatcggagttgtcgattggcgctggaatcgtcttgacgatcgtgtcaaacaatggcttcatcgtgtgttcctgcgttgagacatcagagtcgtagctggaagtaccgttcatagctgaagtgtagataactgggaagtccagctgatcttcatcggcacccaattcaatgaacagatccaatacttcatcaacaacttcttctggacgcgcgcctttacggtcaaccttgttgataaccacgattggcgtcaggtgttgttccagagctttttgcagcacgaaccgcgtctgtggcatcgtaccttcaaaggcatcgacaaccagcagcacgccatcaaccattttcataacccgttcaacttcaccaccgaagtcggcgtggcctggggtatccaaaatgttgatctggtacttaccgtacttaacggccgtgttcttggagaggatggtgataccacgttcacgttcaatggcgttggtatccatggcccgatcctgaatttcgaagtgttctggcaaagtgtcagactgcttcaacatttcattgaccagagtagtcttaccatggtcgacgtgggcaatgatcgcaatgttgcgaatatcatcacgtgttttcaaaagttatcttcctttcgtctaatcaatattctaaattttgtggggcagcggccttgtcataaaaaaactgtgaccactgtcacagtcttgggctattcagcgatggtcaaaagatcttgaccggcttgcttcgtcgctactaatacaaggttagatgataacacattgagatgatcatcgtcaattggtttcacaactaatcccagttcttcggccaagatgcggccagccgccaaatcccatggatgcaggtgcgaaacgtatgcacctaagcatccggtcagcacatagatcatttcaatgccggcactgccatacattctcagaccacgcgctttgcgagcggctttttgcagtccatgaacgttattcatggtcaaatacccattcattaccatcagactatcggccagtgatttgttttcgggtgtatgcagccgctgctggttggcaaatactcccatgcctttgccgccatgatagagcgttccctcgacaacatccatgatatagcccaaggttggctgaccatcaacgtatagtcccatcataatcgcaaaattacgcttttgcataacaaaattcatcgtgccatcaatcggatcgacaatccaaacatgcccctttaaatcatcaacctgatcgccaaagccttcctcactgacgattcgacaggcaggatcaattgttttgagccgttcatcaatcattttttcattctgcttatcaacagtcgtcaccagatccctggcactggttttttcagcaacgttaaattttttggtcatcagctgcagcgtttgctgacggacttcccacatcaaccgctgcgcctgctgatcaatttgttcgagcattcctacacctctaatgttattttacgcttagcttgatttgtcctgctttttgctcacgagcggctttgatgacatcatagagctgatagccccccgtcaccttggcaaattctttacccagccttttttcctcgcttttagctggtaccacgttcttaaaatctcgataacagtccatgatctgctgacgattgatgcctgtttcgtaagcatcttccacaactcgaaacattgcaatcacggtttcaatctcagctgtactccagccaggatccagtggataggaataatttttatcgtgcactgtcttcacttcctttttacggtattctgcttatctcatctagtatatgccttcattatcaaattgacaggcttctgtccgcttttttttgagtttttatgatagactattctttgaatgtttaatatggaggcgaaaccaagtatgtttttaatgaaagacattgttcgtgatcccgaccccgttctgcgcaagcgggcggccaaagtcgagttccctctttctgaagatgaccagaaattggccaaggacttgatggaatacctggtggtcagtcaagatcctgaactgtgtgaaaaatataagctgcgggccggcgtcgggctggcggctccgcaagtcggcgaatccaaacagatggccgctgtcctggttcctggtgaagagccagatgacaagccggtttttaaagacgttattatcaatccagtaatcatcagcgaatcggttcaatatggcgctttaactgaaggcgaaggctgtctgtccgttgatcgtgacgttcccggctatgtaccgcgtcatgatcagattaccttgaaataccaagacacgactggtgaaacgcacaagatccggctcaagcattatccagccatcgtctgccaacatgaaatcgatcatctgcatggggtcttgttctatgatcacatcaataaggaacatccttttgaggcacctaaagatacgattctattcgactaggcttagccgattcaagaagtctgagcacaccgcttttcgtgcgcttggtctttttatgttgcccaagttacgtctgacaagcgatatcaattgttctgattcaatttgcgcagatccattacgtattcgcgcgtggcttcattatagatataggctacgtcaatatgcagcatttgttcgtaggtccaccaatcagtcacgacaaatgttttggctgctgttggcagatgatccagatgcttttctttcgcataggcattcagcgccatttcaacgtctttttcttttagttccgtaacttttttagctttgagcgtatattcaaatgccagcacgccttttccccaaacatcggctaccagctgtgattccggcatcgatggcagctgcagcagattttgcttcaatgcataagccatcgccgcatcggttgccgcttgagcctgtttgcgcagcatgagggttgctcggttgatcatcgtccggtgaatcagcagatagattgcaatgacgataattgccgaaactagaatcatgataaacagtcgcattttaaattcctccgttttattattcttatcttaagaataccacatggttcattaagaatggcgacactgctcgttagttgtgataaaataaattggtgatttatcgagatccaatatctaaggagagaaaaaatgacttttaaagtttactatcaaccagataaaaccatgactcctcgacgtgaaaacaccaagtcgctttacttggaagccgactctgaagcagcggcacgtcagctcgtggaaactaagaccgaatatcaaattgaattcattgaattgctggatgaaaagtctttggcatacgaaaagcagaatccagacttcaagattaccgaattttaggctgaatggtctttaatggctgggacggcaagtctgtctcggcttttttattatttttaaggagcgttgcatggagtattcaatcattgttaatccattagcaggcagcggccgtgctaaaaaaatctggcagcagctgcagagccgtctaaacaagctgaatatcgtgtatcaagtcgttgaaacccgctatcatggacatgccgtcgatttggccgagcgaattgctcatcattttgcttctgctgtggctacgcatgtcgtaatggtggttggcggcgatggaaccttgcacgaaacactcaatgggctgattaaggcgaactcgtcattaccgctggcctatattccggctggcagcggcaatgactttgctcgcggctatggtctgtcgcaagatccaatgaccgccttgcaacaggtattggacgctcagcacccgacacggatcaacgttggtcattattatgatgcgatcaagcaggaagaaggctactttttaaacaaccttggaattggctttgatgccgccattgtcagtcaggctaacgcatcaagagccaaaaagcggctgaatcgctggcatctgggcaacttatcgtatttgtcgcaggctttgggcgttttatacaatcaagagccctttgcgacgatggtgcaagaaaaaaacggtcatcatcaccttttccccaaaacttttattctgattgccagcaaccatccctacatcggtggcggttttaagattgctcctgacgaatccctgcattcatcaactctagagcttttagtagttgaaagacgcaactggctgattacgttttggtgtctgcggcagtttgcacgcggcaggctgaatcattctcgttttgccaaatgcttccgttcatccagactgcattacgttacgacctcactagaatttgcgcaaaccgatggcgaggagatgggcagtcgttttatggatctgacgctggatacctgtcaatatccgttttggggcacttcgctaaaagaaaaaaagtttaattaaaaacgtgcgaacagcaggcgttatcgccgcagctcgcacgtttttaatatcctctacagttggaaacgaaaaacgattactcaagcggacttgaaataatcgtttgtttttatatttattaagccgattaatcctcagaagcttccatcgcctcaagaataatgcttagctgactgcattcctcgcgcagacgctgcatttcatccccaaattgaggttcgatcgttatcgtttgcgtaccggattgagcggcattagccttagattctgcctgacataaccggttaagcttgttttgggcttcaactaaatcatgttgaatttcaaacttgttgctcactttaaacaacctccaataatgaaaatatttaaagctgatccggattggataaacataatttaacactctctttaaaaaatgttaacctttttcattttacaagtttgttacgtttcaataagaaatcttttagtattttgtactttcaaaacaattgcttgttcgacgcaattagaaaagcagcccgcagatcaagccggctgctcttttatttatggatcagcggattaccgtccccgcaaagcttggcataaagtaaggactgatcgtctcaatctcaacgttttgcccaggctgtggtgcagctacgtactgattgttgccgatgtagatggcacaatgataggtactgccatgattgccccagaataagatatcacctggctgagcttcagcaactgaatgctgactgacgcagctttccaaagataccgtatagtgtggcagcgagattccttccgcattttggaaaacataatcgaccaaaccagaacagtccattccggaaagcgaagccccgccccatacgtatggaatgttggcgttggccagcttaaccgccagactcactaccgaaccagtcgtcagatctgaactgctgttggttgaagcagtagtgtccgcagcaacagtcgtactattggtgcctgcctgttctgacgtactggatgaactagttgaagcagccgcagtggaatagtcagtagtcgcagtctgagtacttgccgctgatgaatcggcggctgccggactggtcgaagaagctgcttgctgattggttgattctgcaactgatgaagccactgtagactgcgttggttgttcagccgatgcgctttcgttgattgcatttgccgaactgattgccgccgcggtcgttgttgtgctggatgcagcagtctgctcaacgggtaccgtttcactggttgagcttgcagccgtcgttgcagcggattgatcatcaaaactggaaactgtatctgccgaagccatattagcagctgacgattccgcagataccatctctgatgatgctgctgtagatgattgttcagtgccgctggtcaaatcctgcgctgaagttactgcaggagtggccgcttgacttaaagcagctgcaggttcatcggcttgacttgcctgtgatgccgcattactgtttgaatccgtaccatctgaggcggtcgattcagctgagacaaccggtgctgtctgaacgactgtttgactgacggaaccggcattagccgttgctggtacgctgacagcagtatttgatgcttcagctgctgaggttgaagctggcgtttgactggcagccgccgttcctttgacaatcagttgctgaccaatcaccagctgatcaggattgctcagatgattccagcttaccaggtcagcaagcgatacatgcagccgttcactgatctgactcagcgtgtcgccacttttgaccgtgtaagagtcactatcaacagctgaagtttgactgacagtactgttttttgacagttccagctgttggccggcatagatcagatcaacgctgctgttgatttttttaacatgaggattggcatcttcaattgcgttaacgctggtttggtattgattcgccagatcccaaacagtatcaccatctttaacggtaacctgatcagctttggcatgagccgttgccagcaggctcaatgcactgaccgttcccaacagccattgccggccatgccgctgatgctgagctttgatccgtttaaccatgaatttaacacctctttgagctttactcgattgacgtcaagacgccacggaaaaaatttatactcttttaatttaacattttttaccgcatatttgaaggcgtcaccatgttcgctttattggtgataaccagtcaatcgcttgctaaatgccgtgttaagccttttcaaaaagattaagactttctaaaaaaagtcatatttgataaattttatttaacaattggtcaattagtctttatattattgtcaaacttgctaaaatgtcttttaaagcacataaaaggtggttcgttcaaatggttaatctgtattttcatactaatgatccttccaagcgcaaagccgttcaatggtttgccaagcatgatatcgcgttgacgcagcgcaacattgagaaagaaccattgagcgcagccgagattcagcagctgctgacgatttctttaaatggcactgacgacttggtagctcagcgctctcgtgaaaccaaggccttaaagattgatcccgatcaaatgacgctcaacgaattaaccgcagctattcaaaaaagtccgcatatcttaaaaaacccgattatttttagtgagaataagttgattacgggcttcgacaaagaaaaaatgggactctttatctccaaacagcagcggcgcatcgagttaaaacgacttctacaaagtttcgccacgccaagtccgcaggctaaaccggcttaggctgcccaatacttaatataactaaaaggattcagcattgaagcgctgaatccttttagtttagtcttcaaccggcttaacttccggcatgttgtagagatagtgaatcgattcgtgattatgaatgcttgcaacggcgccggccaatagatcagcaatcgacagccgcaccagcttatcgatccgtttttctgccggcagatcgatcgtatcggtaaccaccatgtttttaacggccgagttttgaattcgttcaacagcgccttttgataagactgcatgcgtggcaacgccatagacttctttggcgccacagctcttgagcagttctgctgagttggcaactcggacgccggtatcaacgatgtcgtcaactaccagggccgtcttattggcaacgtccccaatgattgaggttggcgtttccgtagttttggcgccgcgctgctgttcaagattacgattatcaataatggcaatcggcgtccctaaaaattcagcaaaacgccgtgccaacgtaaccccagcatgatccggcgctacaataaccgtattttccaagtcaagatcactttgcgcaaagtaggaagccaaaattggtgcagcctgcaggtgatcaaccggaatatcaaagaaaccttgcagttgtggtgcatggaagtcaatcgcaatcaagcggtcaatttgatccatctccaacaggttggcaatcagcttggccgtgatcggttcccgactgcgggcttttcgatcttgacgagcatagccatagtaaggcatgatcacgttgatttttgccgcactagcccgccgcaaggcatcgaccatgattaaaagctccatcagattggtgttaaccggctgagaaacggattgcaaaacatatacttcgcgaccacgaacgctttcattgatggtaatcgagatttcgccatccgcaaagtgcgtaatcgtagcatccgacagcggcaatcctaatttttcagacaatcgccgtgccagtggctgattggagttcagcgcaaacagacgaacgttttctgcattttcaatcttgctcatttaaatcctccacgcaattatgttaaacattaagaacattatcgcaacaaatcccttgttgtgcaagccgtatctgatttaatcgtcattaggcgtaacgttttgcattccaatcatcgggtcaatcgtctcttgttcaatcagccgtgcagtcaaacgatcaggcaactgtacggctggctgcgactgggcctgaggatcgttgttttggtgatgatgctttaaaaaatcaattgcttctgctttaggaacgttggcaaacagattgattccctcatcatcactgaccggctcaggtgctcggtaaaagtctggctgctgccaaaccttgagcaagcgatcaggcagcatcgtgtgccgagccagggccggctgctgaatacaatcctgaaaagcttctggctggccaagcagcaacaggaaatcagtcgcccgtgtgactcccgtatacagcagattacgctggtacatcaagcggtagttggccagcatcaataggatcaccattttaaactgactcccctgtgatttatgaatcgttacacagtacgccagctgtagattggccagttctttgcgattatagctaacctcgttgtcattgttaaaacggacggttaccttaagcggcttttgggctgatttggtctgtggagcattgtcgcctccttcaatcgcggcaatgattcccatgtcgccattatagacgttgttgcttggatcgttgactgtttgaattaccttatcgcccttacgaaaaactgtctcaccaaatttaacctcctgccgatttggactggcgggattcaaatgatcctgtagattgcggttttgctggtcaatgccggcaattcctttatgcattgggatcaagacctgcacgttcattagatcacatcccggctggcttagcccccaatccatcagctgattgataaaccggccagcattttgagcatcagttggaataaacgagcgatccggcaaggcctgcttaaacaagtctgctggtacctggccttcattaatgctttttgacagcggaatgatcgttgatttagctgactgacgatgaatctgcgtcaagcgaacctgcggcagttgggcaaagcttaaaagatcccgaaaaacctgtcctggaccaactgaaggcaattgatcctgatcaccaaccaaaaccacatgcatcgtttgaggaatcgcagcgactaaagtcttaaacagcaacgtgtcaaccatcgacatctcatcaacgatcagcagactgcctttcaaacggctagctgtcattttagatggcgtttcttggccagtcagtcccaacagatggtgaatcgtgctggctggcatcttggttgcagccgccatttgctgggcagctcgaccggttggcgccgctaaaatgatttcttcatcatcaacaccatgcagctgagcaaagctgttaacgatcccccgaataatggtcgtcttccctgtccctggtcctccagtaagtaaaagtaccttggattcaagcgccattttgattgcttttttctgctgctggtcataatcgatccgggctgccttttctgcagtctggacggccttatcaacctgtttttcgtcaactttggcttcagtaaataaaattcgatgcagatgctcagcaatcagccattcggaattatacaagaagcgtggatagatatgttcggcatcctcagcctgcagttgatgggttttaatcagctcagccagctcgttttcaaacagcgctgcatcggatacgttgcccagctgacccattgcacgtgcgatcagtgtcttttgactgacataggtagcaccttgattcatggtttcttgatttaagacttccaataaggctgccgcaattcgccgcggatcatctggtgcaattcccaagaccccggcagcaaagtccgcccgaccaaaaccgatgcgatcaatatccaaaaccagttgatagggattctctttgacgaccttcatcgtatccgcgccgtatttattaatgatccgctcactgagacgatccttaaaaccgagtttggccagccattctacaagttcatcattcatttggtgctcatcatggcgggcattgaaataatcagcagccagcttgcgatcagcctcattagaaatcttgatcttctccagccgcttaggatcatcaacggttttggcgaccgcttttttaccaaacttcttaaacaagcggtggctgatctcggccgcatccgtaaccgcaatcccagcctggtttaaggtcccagtcagctcatcttctgactgcggtagggcaatctgacatcccgtagcttcgaattgccgaccataattggcattgtcgaccagccgaccggtaaattcgtacatttggtgttttttaatgtctcccagtggtcccttgaccgtaatctccatttctgaccagggaaaactggcctcttccacatcaactacgcagatacgaaaagccctaggtccttcttctttagcaaacttgataaaattaaccgtcccccgcagactctctttagctgatgcacttttactcttggccatgcaaatcctcccttacttcctggtagtcgacggcacgaaactgattgccaaaacgggcgcgcgtctgccagtagccaatgaagcgataggcctgaccgacttttagctgaccaaagcgtccaaccacggtaatctcagcctgcttcttggcaaacggcgcttctaaaacctgcacgtataagacttgataaaaactgttcggcgcaacaaaagccgcccgacgcagaacgccgataaatgacgttgctgccggacggctatttttttgagcagcaatcatttatcttgaccagattgcttttgcaaaaagtgctcaatatctgaaatacgtttttcgctttgtgcataatagtctggatcaagctgctgtgactgattcaggtaatcctggtaaggctcgcctaagaccattgccaccagtcctcggttgaactgcgtatcagcacggcctgggtgacgctttaagatcaggtcatagtagtttttagcctgtttaaactcgcccagtgccaatagcgaatccccaattgcctgattgatttcaggatcttgcggacgcagatcatgggccgtcaaaccatatgccaccgcctgctgatagtttttctgcttcatgtaactttgtgcaagcatcaaataagaatcggccttcagcttggcatcatcgattttattgtactgcttgattgcttcattgatcttgccgactgagtaatagacgttgcccaagccatagtttaacaggttaacggctttggcatcatttttcttttcaaagatgcccaaagccttcataaacagctcttctgcctgctcaaagtcgttaagacgcgtcaagagtgcacccaggtcatagtaattgttgaatttgtctggttcttcatcgattgccattaccaagcggtgaaccagcttttgagtctgttttttctgttcttcgcgattgatttcttggttgctcatattattcaccccattaaatcgtatcagtcggatctagatgttctttatgcagataagtggtatcgttccatttttccaattcaaaatgctcagcatcatcggttctcaaaatcgtagtcgatgtattgctaagtccgccacgatcctttagatgggccattggaactgcaagcaggccattaatggcggcatttaaagcggccccatgggaaacgatcaatagattttgattgccggaatagcagcgtgcgtactctttaacggcctgaccaacccgagcaatcacctcaggaaaactctcgctttgcacgatcgaggcatcatagcgatcaggatgatgccgaaaactgtccaaaactgcgggccacttttcagcaacggcgctgaaatgcattccttccatcagtcccagatcaaattcacgcagccgactgtcaatcgtaaacggcaccgtctgctccagattgtcaagcagcgtcattgccgtaacgcgggctcgtttaagcggactagcataaacatgagcaaaagcggtgttatttaatgatttcgctaacaactcaatttcttgataactgcttttcaagagcggtgaatcgccatgggcaccttgatagcgcgattggaggttccactgagtcttaccatgtctgataaaatagatccttgtcatttttctcttccaaatgtctgccttttttgatgtgtctgcttatatgataccaaaaataactgggagataaccaatatttatcattataaatataaataaagatatcattaaagtactcaatgatagcaaaaaaccgctcgcgggtaactgcaagcggctctgtcaaagacagtcttgattatacgtattgaagttgatgatcatgattgtaggcacgatcgataattgcactgcccaagcattcctgaccgtcatagaaaactacggcctggcctggcgtaattgcccgtgccggttcatcaaactcgaccgttaccatctgatcgtcatcactgattgttaccgtaacgccctcatcgatctgacgatagcggaacttagccgtacagtggaaatgtcggccatagcgactgaccacgtcatcaacccagtgaatgtcgctggcttccagatgagtagcatacagatgctcattttcataaccttgaccaacataaagcacgtttttggtaatatccttgccgattacaaaccaaggctcattgctttccttattgccgccaaggcccaaaccacgtcgctgaccaatcgtgtagtacatcagaccggcatgctgaccaactaccttgccatcaacggtttccatgttgccgggctgtgctggcagatactggctcaagaattcacggaaatgaccatcttctccgataaagcagattcctaccgagtctttcttatcagcaaccgctagtcctgcttccttggcaatctcgcgcacctgctttttggtgtagccagccagtgggaacaaaacatgatccagctgagcatgatccagctgactcaagaaataggtctgatctttatgcggatcagccgcccgcatcaagtgcatattgccatcagcatctgctttcaaatcagcataatgaccggttgcaacgtactcggcacccagctgatgagcatattcaataaaagccttgaatttgatctctttgttgcagataacgtcaggattaggcgtgcggcccttcttgtattctgcaatgaagtacttaaaaacccggtcccagtattccttttcaaagtttactgaataatatggaataccaatctgcgtggcaaccttagcgacgtccttatagtcctcagttgcagtacagacgccgttttcatcagtgtcatcccaattcttcataaagacgcccacgacatcatagccctgccgtttcagcaaaagcgccgtgactgaggagtcaacgccgccgctcatgccaacgacaacgcgagtcttagagttgtctgtcattttatcaccatcattttcaatagattctggaacaatctacgagtgaaggtcgcgtgttcacagtgcttttcattgtaacaaagacacgcccggtttgaccagtaaaaaccattattgacgatcaaagatatgccgctcgaccatttcattcaagatgaagtgatactgagtcgtcaattcatcagcacgcggatgcttaaaaatattgacttcacgaaagccgttggtattgacggtttccattttaaaacccgtcatttccggattgatacgaatcttcaaacgagcaactggtttgaatggattttgtcgatccaggctgcctaagtaggtatagacgccccgcgccgactgttcaaatcctagatcaagcagcgtgtacttttttatctccgggctgattgaatatgtgtcagtatcgccgggaagctttagtttagaaacgaattcagccatcttatccctcctgagcgtttagatcgctaaacagctgcaaaagcatcttagctgagcgcttaccggcttcgatgataaactcatcaaatgagacattggccttttcatcaccagtatcagacattgcccgcacaacaacgtaaggaagcttgtgatcacaggctacctgtcccacagcagcgccctccatttcagcggacagagcatctgggaagtgctgcttgatcttggcaatcgcagcctgactggcaacaaattgatcacccgaaacgatcaggccgcgcttgacgttcaagccagtcttttcacccgccgtcatcaaggcactgccccattgctgtgaggctttgaaacgaggcgttttttgcggcagctggccgtattcatagccaaaagcagtcgcgtcaacatcatgataggccgtctctgaagaaaccaccacatcgccaacatgcaggccttcgccaatcccgccagctgaaccagaattgataatgacgtcaacggcaaagtccactgccaaatgctcagcagtaatcgcagcctcaaccttgccgatcccagattcaaccagtacgacgtcttgaccatcaatttgaccggcaaagtactctttatcgcccagcgtcttggtccgattattttttagagctgcctttagttccttaatctcctcttgcatcgcacaaataattccaaacttcattaagatcttccttccatcaacctacaaaaaacaaaattagatagacgacgataatcgccagactaagccctagaattgcccaattcagccggcgctttaaacgagcagtcttttcttcagccagctgctgtgcttgagccttttttaccgtttggcgcggttgcagcggcgttggctcactgacatcatcaaacggtggttcaggattttcctgaatttgctgctgctgtttttgccattcacgatactgctggcgcgtcattttttctggatcaatctgctgatttttcattattttcctttaatttttgggccaatgtctgcgcctgccaataataaaccgctacgatcgtcttggagtcttgaatctcaccattggcaatcatctgcagagcctcctcaaggctgaagcggtagagcttgatgtcttcatcttggtcttgtggcagggcacgttcaaccggtttgaggcctttagccagataaagcgtcaagaattcatcgcaaaagcctacagaactgtaaaaagacgtaatcttggtcaatctatcagctttaaggcgcgtttcttcgttcagctcacgaacggccgcgtgtcttgcatcgccgtgatcgcgttcatccagcttgccggccggaatttcccatgtaatattctgcactggggctcgccactgtttttccaaaatcatcttctgatcatcatcaattaccaacaaagcaattgccggggcatgacgcacgatctcacgcacagcagtatttccctgcggtgttttgacgtgctgaagctcaacgtcgactacatggcctttgaagaccgtctgtcgatcaatcgttttttcttctagatccattgtcgtccctcatttctaaaaattatccaatggtcgaacatgagcagcttgcggcccttttcttccctgtacgacgactaaggaaaccagctgtccgggctttagctcacgatggccgctgccttcaatgccattaaagtgaacaaagacatctggctcgttttcaacttcaataaagccccagcctttttgggcatcaaaattttttacgcgtccttttagcaattttttcacctgccatttcactgcaaaataaaaatgcatcaaacagttaaatgctgcttgatacattttacaccgtttattaaaccttgtctttaaccggtcaataaaggttcgtttaagattacttttctaggccagtagcaaccgtttcggggaagttttcccgtaccagctttgcacagcgcgcacaaagcattgggtaaacagcatcctcgccaacatcttctttgaccatccggcagcgttggcaggtttcgccagcagcgacggaaacctttacggcaacgttgtcgttgaacttctcggcatcagctggtgcttggtcagcatcatgaacgtgcagtgccgatacgccaaacagcagcccggcatcagcgttcatgctgtccaaaagcgtcttttgactgtcggttaagtacagatcagcctgtgcttccagcgacttaccaatcagcttggcatcacgcgcttcttccaaggccttcaaaacatgagagcgaatctccataaagtcgtcccacttgttcagcagttcttcttcattggcgtaggtccgtggctctggaatttcagtcagctggacgaactgttctggctcatccatgtattcccagacttcttcggtcgtgtgtggcagaattggcgtcagcagcttaaccagcgttaccaagatgtcgtaaaagaccgtctgcattgaacgacgcgcatgagaatccttggcttcgacgtacaagacgtccttggctacgttcatgtagaatgccgacagatcattgttcacaaagttgatcagcttcttgtaagccgtcatgaagtcatactcatcaaacagatcgcgcatttcctttaagaagcggttcagcttaacgaccatgtattggtcaacactttccagcttttcataagaaaccgtgtcatcattggcatcaaagtcagccgtgttggccaaaaggaagcggaaggtattacgcagcttccggtaggcatccgaaatttgcttgaacgtatccatcgaaacccgcacatcagctgaagtatcggcactcattacccaaagacggataatttcggcccccatctgcttaacgaccttgtttggatcaataacgttaccgatcgacttggacatcttcttgccgtccttgtccagcgtaaagccttgcgaaacgatggacttgtatggcgcatgaccagagagcacgacgctgcagatcaggctggagttgaaccagccacggtattggtcagaaccttccagatacatgtcacatgggtaggtcaggtagtcacgctctgccaatacgccttggtgactggagccagagtcgaaccaaacgtccatgatgtcggtttctttcttaaactgaccatgtggcgaatgttcactggtaaatccttctggcaacaggtccttggcatcgcgttcaaaccaaacgttggagccatactcacggaacaggtcggaaacatggttgatcgtttcctcagtcatgattggcgtgccgtcttcagcgtagaagattggcaatggtacgccccagacccgttgacgcgagatgacccagtcgccgcgatccttgagcatgttgtgcagccgaaccttaccccagcttgggtagtacttaacttcatcaacagcattcaagatttcatcgcgcatcttgtcaattgagacgaaccattgatcggtagcccgaaagacgattggctttttagtccgccagtcaaatggatagctgtgttccagcggttcctgctttaagagtgcatgatgctgcttcaaaagatccaacgaaatgtcgtctgcatcctgatagaagacgccaccaaactcaggaccgttttcagcagtcaagacaccttgatcgttcattggtgcaaagatcggcagaccatacttcttgccgacttggtagtcatcatcaccatagccaggcgcggtatgaaccaaccccgtccctgcttcaagcgtgacgtgatcaccattaacgaccagcatttccttgtcgttgtatgggtgcttgctggtcatgcgatccatgtcttgaccagacagccgatcaacgacttcatattcatcccagccgaacttttcagcacatttggcaaccagctcatcggcaattacaaacttacgatcatcattagccggcttaactacggcatagataatcttagggttcacggcaacggcttcagaagctggaatcgtccaaggagtagtcgtccagccaaccaggtacgtatcattgtccaaacgtcccttgccatcaataacctgttcacagaagtaggccgtcttggctacaacgtcatgatattcaacttcggcttctgccaatgcagattcagatgaccatgaccagtagactggctttttagcttgatatagcagacccttcttggcaaaagcaccaaagactttgatctgttgtgcttcaaactccttagccagcgtcaggtatgggttgtcccattcgccagaaactcccagccgcttaaagtcagtccgctgcttgtcgacctgttccaaggcaaacttgcggcacagattccgaaattcagtcgtgctcatcttcttgcgatcatagcccatcttggtcagctgatgctcaatcggcagaccgtgcgtatcccagcctggtacatatggtgcccgaaaaccagccatcgacttgtagcgaacaataaagtctttggagatcttgttcatggcatggccaatgtggatgttcccgttagcatatggagggccatcgtgaagaataaaagttggcttgccctgattcaatttttgccgctgttcgtagactttgttgtcttcccacagcttttcgcgttgtgcttcggtttccggcaagcgtccacgcatagggaacttagtcttgccgatgttcaaagtgtctttgacccgcatctgcgaattcctccttgtcaattctctaaacttaaaaatcgcgtccaaacgacaaaacgctccgtccgcaatgggacgaagcgttttcgtggtaccacccaagttcaaatcagttgtctgattccttaagtcatttggtaacggcaatgaaccggccaatgctactgagttcgcattgacgttcagagatgatagctgcccaggccttaattgccaacctctcaccattcgttggctcgctgaaatacgacgctgggggcgtgattctcctcaacagtttgttcgcgattaattatcaactagtgtgccgaactgtcaggaaagacaacgaccgtctcgccatcatttttagcagcaggcttggccgcagctttttgatcctgctttggtgcttgactttcctgagacttttcagcagctggttgatcgattgcttgtgattctacactgtttgtcgaatgattgtcaagactgcttcccaaaatcttttgaatttcgtcatatttgctcagatcgtcattagccaacagctcatcccaatccttgctcttaactacttccagctgtgattccagcattacctgcagtcgctgtctgaaaatccgtgtctgttttttaagatcattggtttccgtagtcagtttccgcgtttcatcggcactgttttcaacaacttgatttgccttggcattggcttctgaaacaatatcggttgcctgtttttgcgcctcgcgaatcatgatttcggcttcgcgtttggcattgttcttaaccttgtcggctgcttcttgcgcgaccagaatcgacttgttcaaagaatccttcaagtccgtgaagtattttagtttttcttcattggccttgatagtttccgttaattcatgattcttagcctgcagtgcctgaaactcactggccacttgacgcagaaattcattgacctcgctgggattatagccccgcattttgttgtcaaactgctttttgctgatttcttcaacggttaacgtcatttgcttttcctccaaactaagcatgcaccactgacatggcgacgcgaatcttattttttcttgtagttccttggatttcatcaatccgaattcggcctgcatgccgtactgaaagcaggtcatgagcaaccagcggataatcgggacgcatctcagtctcccagtttacccgcgcatcgccatgttcaatcagctgcttggcacggttgcgtgaatagttaaagccggctgcaatcacagcatccaggcgcattgatgaaaccgtatcagtcatggcttcccaatcttcttggggcgtcacgatcatttctggttcaaccggcttcattttaacgtggatcttgccaatctgaccaacctgctgccgcagatagtcggttagactgcggctgactactacttgccagcgcattccctcgttgagcacgtcaccaaatgatgaacgcaccaagccagtgccaatcagtgttcccaagatctgccgatgatgcagctcggtgaatttggttgggtagtcgatttcaatcagctgcagctcaaagtcagtctgctgcggctcataatagctgggataaaacaagatccgctgcatctcagcatgctcccagccgccattggcccgtattttaacatcatcacgtcgattggtcagcgtttgagcgatatagacctggcgcggattcaaaaaatcagtcaaaatcggccggtattgatcagcggccatattcagccaatcctcgacctgagcaatcaagggcgcttcatcaggacgaaaatgctgcttaatgttttcttcatccgtcatttttctgctcctaatagcctattattctggtcagcataataatgccatactgtaccagatatagcacgaatacggccaccaccggcgcaaaactgatccctcccagtggcggaatgtgttcgtcaaaaaaacgcagatacggctgaaccagcttagtgatcaattcacctaaacggctctgcattgcacccggaaaccaggttaaaagacaccagacaacaatcagtaaaatgtaagcatcaataattttattgatcagccatgcaagataagcaaccatatttctccttaaagtcgttcactgttattggaattaagatcaccggccagcttgccggcaacatcaacgtcacgtggcacgcatagaaagatctgctcgccaatccgcttaatttcaccatcaattgcatagacggccccatttaaaaagtccacgaccttgttggcagctttgttgtccatctgagtgaaattaacgataacggcatgatgactcagcagctcatcaacgatttccttggcctcgccatacaaccgcggctcaaacagcatgatcttgccattttcaaccggtgctggcttagccgcagcatgctgtgctcgatcaatcgggaccacctttttgctgatggctggcgttacgggagctgctggtgcgaccggctgcggctcgtaatcttcagtttctgattcagagccgattccaaaaaagttatttaaaaaattagccatttttgctcctcctttaattctgagctgaagatacagcaaaagggagcgcctttattcagctcccccaaatcactaattaatcatgacgacggttcttgaagaatggtggcatcgtcagattatcatcgtcttgttcgtcggatgcagctacatccccatgaaagacattgaattctggctttttaacgtgattgaactcatcgttttgttcacgcgtatcggttaaatgagtaccagcggttggatcatcccagccagcaaatggatcctgagaagctgctcgttcactccgttgattttcgactggacgttcttctacaggctgttcagcaggcttgctttcagaaactggcttggcctctggttcaacacgggcagcgtgcgtttcactggcagctggcgtgcttactggccgagcagcggctgcctgttggcgctgctgtttggccttatcgataccagtagcgataaccgttacgcgaacctcatcgccaagcgtgtcatccatggccatcccaaaggcaatatcaacattggtattagcagcctgactgatgacgttggaagcttcctgggcttcaaacatcgacagattcttaccaccagtaatgttcatcaggacatgttcagccccgtcaatcgatacttcaagcagtggtgaggaaatggccttcttcgtggcttcggcagcccggttttcgcctgtcgaagaaccaattcccatcaaagcagagccctggttttccatcgtatgacgaatgtcggcaaagtccaggttgatgtagccaggattggtaatcagatcggaaatcccttctacaccttgacgcagaacgttatcagcctctttaaaggcttccatcattggcgtcttcttgtcaatcatttctaacagtcgattattggcaacgacgatcagcgtatcaacgttttgctttaatttttcaagtccttcgctggccaatttggcacggcgctgaccttcaaaggtaaatggacgcgtaacgacaccaaccgtcagcgcaccagagtccttggcaatcttagcaacgactggagcagcaccagtcccggtaccaccacccatgccggcagttacgaataccatgtcagcaccttcaagggcttttgaaatttcagactcgctttcttgagcagccttggagccgacttccggattagagccggcacccaatcctttggtcagcttggggcctaattgaatcttggtttgggcgtgtgaggcatccaatgcctgcaggtcagtgttggcaacgataaaatcaacgccggacactttatcattgatcatttgattaactgcgttgccgccaccgccgccgacaccgataaccttgatcttcgcaccctctaattgcatttggtcagtttcattagttaaattgtccattcgttggttcctccgtcactttaaaagttagtctaattagtcaaagaagttctctaagaagcgcttaatgccacccttgctcttaggctttttgacgggcttttccggcgtcattggctcctcttttgcttgctgaggttctgacgaggcatcaggcattggtttttgatatgactcttgatagtagctgcgagtcgtttccagcttgcgcgactgctcggcttgatgagggctcataatcaaggcaccttgctgaacgatttgtttcagcagacgatcaatatcgtttaggtgatcctcatacattcccagggcaattgccagcgcaaagccaggatgacggactcccatctgttcaggaacaaaagtctttacattggtcgtgaaatattctttggccaactcaaccacaccaggcaaggccgtcacgccaccaagcaaaatgacgccaccaggcagattaggcgcatgcacctcttttaaacgattgctgatgcgttggaaaatctgccgaatccgagcctcgatgatttctgccagatacttttcagaatattcgaccggctgattttgaccaacgacatcaactgccagctgcacgttttcatcagccatgcgactgtcggcatagccatgatctcgcttgaggcgctcagcattgcgcattgaggtatttaacaccgtcgagatgtcgcgcgttactaattgaccgccttcaggatcaacatagacaaacttcagctgatggtcgtgaatgatgctggccgtagtctgaccgccacccatgtcgacgaccaacgtaccaaagtcctgctcgccatcgttgagaaggttaaagccagtggcaatcggtgagacgaccagatcttgaatctgcagccccgcttgttcaactgccttcttagtgttgtgaacgatcgtcttagggccagtataaagagtagctgccaattccaagcgaacgccaaccattccccgtggatccttaattcccttaaagccatcgaccgtgaattcttgtggaaccaggtcaatgatctcgcgttcaggcggcagattctgcgtcagcgttgactgagcaacgtcgattacgtcttgattgacgatctcacgcgactggccttgattggcgatcgtaatcatgccatgaacgtgacccatttgcagatagttggctggcagagcaacgacgacctttttgatgtcaatgcccgacttggccgcggcctcagcaaccgctcttgaaattgcctgcgccgttttgtcaatatcaacgatcacgccacgattcagcccagcagatggttgaacgccagtgcctacgacttttaattgtccttttacgttttcgcataccaatactttaattaaagtggttccgatatctaagcctacgtagacttgtgaattttccatctgcctggaaccctcctgttttctaaaattcaacccggattcagattgtagccataaactgtactaaattttaccatacttaacacgatacaaaaaaggtccaaaccatgtttatttggcgcttgatcaacgaacctactcgtctttggtgccatatgagtacgagaaagccccatattgcagatcaactacgccgtttgccttcattttggaggcaattgaaggataatagcgcattttttgattcagattgtcagaacgaaccaaaatctcgttgccatcattcatataaatgcgcagacgcttagtatctgatgtcgttggggcaaaggttacttctgagatgccaccccggatcgcggcgggaagcctgccaatctgacgggctgtctgctgcatgatcttttcatgatgctcaaaaccggcatagcggacaaaattagagattgagcgattcttgactggagtcagccgaccattgccaatcagcagctgattgaccccattatgctcaattacgccaataatcggatattcagtgacctggattttgatcgactgcggtccagttagactaaccttgagcgttttaacctgcggattggctttttgggccgtctgttcaagttttttttgctgaaacaagactcgccagatcagagctccctttttgatctgggctgccgattcaactttagcagccgacagatcttgattgccagttacctggatttttttaatcttgcttaaaggagaaacgatatacagggccagcagcataatgatcaaaaaaggaaccaagatgctgagtacgcgccgtgagttgtcaacgcgctgtgcacgcttgatacccacgacacgactgccaatgccctgttcttgatagcgacgacgacgatcaaaagccgcggcactctgcgcttctaatttggccaaacgtcgtgcatatcgctgatgctcttgatttcgttcttcgtcgcttttcatgtttttccccctttatttttggtgatcggcaatcgctttgtgcagaatcttaatcaagcgatcagctgcatctggacggcccatcttttttgaggcctgtgccatctgatcacgggcagcctgatcttccattagacgatcagcttgaaccagtagtgagcggccatcaagctgatcttcggtaatcatggccgcggcaccgtttttaaccagcgccatggcatttttgacttggtggttggccgttacgtaaggacttggaatcaaaatcgttggaatgcccagtgccgtaatctcagcaatcgtggttgcaccggctcttgagaccaggcaggcaactttaggcattttagtcggcatatcttcaatataaggaacgaccttgacgtttgatccaaccttaacgtctttaagtgcctctttaacctgatcatagcgcttttgacccgtggcaaaaacaacctgataatcgcgcttgctgaattcaggaatggcctggaccacactggcattgatcttaggtgctccttggctgcccccaaagatcatcagaaccggcttgtcatcacttaagccgtagctggtccaagaaaaatcggaattcgcattagcggctgcctgctgcgcacgtggattgccgcacatcgtaaccttggctgctgggaactgatctctagcagcatcaaaggcaatggcaatctcatcaacgtaacggctcaaaaatttatttgtaataccgacaacgctgttttgttcatggataaccgttggtacgtgcagtttggctgccgcatacaaaacggcgccgctgacatagccgcccgttcctaaaaccacgtccggcttaaattctttaataatttttttggcatcatgaacggcttttaaaaacagataagccgtcttaaagttttctagcgacaatgaacgcttaaagccctgcgtatgcaaaacctttagttcaagtcctgctgctggaacgattttgttttccagaccgcgatcagtcccgacataaaggacctgggtatctggctccacttgctttaagcgctcaatcaacgctaatgctggatagatatggccaccggtaccgccaccggatacgatgattctcattagttctgctccttttgtccagtcaattcttcaaccgccttgataaatttgtcgccgcgtacttcaaagctggggaactgatcccagctggcattggctggcgaaagcaggatgacgtcaccaggctcgctaagtttccaagcttctggaaccgccgtaatggcattttcggtttcaacgattttggcaatgccagcctgctcagcagcatccttcatctgctgcttgcattcaccaaagacaataattgccttaacgtgtttcttgaaatatggtaccagacgctcaaacgtatagccacgatccaagccacctgcaagcagaattaccggctgctcaaagccctgcagtgcaacttcagtggcttcgatatcagtcgacttggaatcattgtaaaaacgccgcccttgatagtccattacgtactgcaggcgatgacgcactccagaaaaagtcgtcaacacggcaacgatatcctcattggaaacgccgctcagcttagccgcggcaattgctgccagtgcattttcaacgttttgcggtccaatcagtcgaatatccttggctgccatgattgcttcatcccgccaataaatcatgccatcttgctcataggctccctcatggctcttgttaagccgggagaacggaataatcgttgcattggagcgtcgcgcaactgcctgccattcatcacgatcccagttgatgatcaggtagtcatccttggtttggttgcgcgtaatgttgagcttggcattgatatagttttcccgatttttgtgatagtcgaggtgattggcaaaaatattggtaataacggcaatatggggatgaatcgttggcgcgcccagcagctgaaaactggacagctccgcgacgatcgtatcatcggctcccatcttttcagcagtcttgctgaatgacacgccgatattgcctgcataggcggtctggtgcggattgctcttggcaaccattttttcaatcaaagtcgtggtcgtggtctttccattgctgcccgtaactgcaatcagatgacccgcaaaaatctcgctggccagttcagcttcagtaatgattggcgttttttgggccatgaatttttgaaccagcggaacatcataagggattccaggatttttaacgacgacatcaaagtcctcatcagccagccataaaggattctcacccgtaattacctcaatgccgtctgctttaagatcagctacgaccgccggatcctcaggcgtcttttgatcattggcgaccacctgggctcccagcttgaccagcagatgcgcagcgttaatgccactaatgccaaaccccaatactaatgcctttttgccttgatacttcgttacttgtcgcacgaaaattcacctcgtattttcatcaattataaaagcaaaaattattttacctggtctttaatcataaaaataatcatagaccacttatactgatttatatttaaagttatcgttaaaaaccagctgactattcaaacagcatgatcgtaccaatcgtcaggatcgaaaacagcagcgtaacgctccaaaagacgatatcaatcttccattcactccagcccttcatttcaaaactgtggtgaatcggcgtcatcggaaagattcgatgaccggttgtcttaaaggctgctacctgcagaatcacgctcaaggtctcggcaacatagatgatcccaataaacaaaagcgaccattcatgatgaagaagcagcgcaacggcagccaacgatcctccgattgccaaagaacccatgtcacccatgaagattttagccggtttgtgattataagggaaaaagccggccaaagcccccaccattgccagacagaacaaagcaacctcatattgacgctgcataattgccaagaacaggtaagctaaaaaggatacgataccgcagccagttaccaagccatccaagccatcagtcaggtttacggcattggagaagccaaccatccagaaaataataaacaagccataaaaccaaccgatctgtgagctgccaaaacccatttgaaagccttcatgctgatagattaccgtaaagatcatggcagcaacaatttggcaaagtgctttttgccatggcttaaagccctcattttgatgattaaagattttgatcgagtcatcccacatgccaatcaatccataaaccaccaaaacaaacagcaaagcccacatcgtgttggttaagactccttgccagactgcaacccacaagcaggttaccaaagcggcaatgataaacaaaagcccgcccattgtcggcgtcccggcttttttagcatgccaggtcggaccttcttcccgaatctgctgtccttcttttttggcccggaaatagcgaatcaaagacggcatcagcaagaacgtaatcaaaaacgagctgagcagcgtcaaaatgacaactaatatactcataatatcctcctagaatcaattctcatatgattttattttgccttgtagcggacctgcaaggcatctccctctttaaggaccgtattggccttgatgctttgtgaaacggcatagccaccaccagtcgattttaatttaagccccagcaactgagcaaaacggctgacatcggcctgtgaccagccagaaatatccggcatcgtaacctgcccgcccgtcagcagaaagacgcgctcattgataatcacgctgctgcctttagcggccgactgctttttgacttttttgccatttcctaaaacaaccacattcagtttcttgttctgcagctttttttgcgcatcagccgcactcattccaacaacatttggcagcttgacgacgccctggtgcttagaatccttagccgctgcccggtccaaaagctgcttggtgactggattgactacctcggccatgtactgctcggcggctttggtaatgtgctgcggctgtttcatcgtaatatagacgacgtattttggatttttagctggtgccatcccgacaaaagagtacagatagttggtgctcccggtttcataaccatgcgagctgccgatctgggccgtcccagtcttcccagcaatccgatagccgctgatcttatatacttgaccagtcccattcttgttatagatgacgccctgcatataatggagcaccttttttgccgttgcctggctgactggatgaccaatcgtttgcggtttggttttttcaagcgtctttccatcactggctacgattttttttatgaagtagggcttgaccattgtgccattattggcaatagctgaaaaagcctgcatcatctgcattacgttgacggtaatcccctgaccaaatgccgtgttggcctgttccagcgtccccttatagctggtatagcctttggactcaccgctcatgccgtagacgccgacatttttaagcagaccgaacttttggatgtactttttccaggtagctgatcccatgtcctgttcaatgtgggcaaaggcaacgttactggaacgataaaatccttccttatatgtaatattgccccagccagccgtattccagtcagtgatcttaccgccgccaagctcccaggtccccgacttgtacacggcctcggggttaaagttgccagaatcaatcgccgccgccagtgctaaaaccttcatcgttgatcccggctcataggtatcttgtaccaaggcattgcgccagaccggggttgatgaattgacattaggccgctgcgttgctgccaggatcttgccggtcttggcctccataaccacggcagtcatcgaactagcctgtgtttctttttcagctttggtaattaaagtctcaagctgctgctgcgttcgattgtccaaagtcgtatagacgtcggcaccatctttggcggggcggccctttacctgactgtcagccagctgatagccatagacgtcctgcttgatttcctttaggccgttgataccggtcaggttcttattgaaatagctttctaatcccagtcgcccaaccagcttggtctgaccagtcttgtcattggtcttggcagtagccagaccaatcaattgactagcaaattcaccggccggatattggcgggcaggcgttgacgtaaactgcagtcccgtaacgtgctgagccttgatttttttcatcgtgctgactgaaataccgctgccagccggaccgaactcaacctggtaaacgttcttgcgctttggcgacatgatcgacaaggcctttttttccgtgatatccagatacttagccaggaccttagctgcttttttcttattggttacgtaattaggctttcccttggcagtcagactttgatgactcaagaccgctgttacggtataggttttggtatcctgagccagtgcattgccctgcgcgtcatagatcgtacctcttttggcctcaataattcgtttcgaggtgtacattcgactggccatcgtctgtaaatttcgattttggacatccttggtcgttgcaatgacaaaaaaacgaacgacaaacagaacaaaaatacagaaaaatgttaggaataatgcgataccgaacattttgcgatttttttgattctttccaatcgttcgttgttgttggtttttcattacttattaacgttccttacgcttgaattcgcatccgtgaggccatatttctgcgcaatctgctccaatcgcgcttgaccggtcagcgtagtaacttcctgctgatcgctgacattttgctgtttaacattggctacctgcgtttgcagattctgcagacggtgctgctgcttaacgactgacagctgggtagttacgaccatgatcatcatcgaaaatgcaatgagagcgccaaaaatcatcaaaatcttttcaaacggcgaaaacggcaagcgatgctgatgagactttacttgtggcgtcggctgattagggcgcggcgtcaattgaggcgttggttgatttaattttcttgccgcatttgaggccatataaaacacgttccttactgatttctacttagttttttcaataatccgcagtttggcactgtgtgaacgatggttgtcgcgcagttccatatcgcttggcaggattggctttttatttaccaatttaaagctgggttccatgtccggtggaactactggcaatcctggcggtaattctggcaatgatgcctgttctttaaacattgtcttgaccaatcgatcttccagtgactgaaaggtaatcacactgatgcggccaccaacgttaagcatctcaaacgcctgctccaatgagtcctccaaggcgcccagctcatcattgaccgcaatgcgaatcgcttgaaagctctttttggccggatgtccgccgtgccgccgagctgccgctgggattgcatttttaacgacttcagccagttcaagcgtggtcttgatcggagcctgtttgcgctgtcgttcgattgcccgcgcgatctgcttggcaaacttttcttcgccatagcggtgcagaatcttgaccagacgttcatatggccattcattaacgacttccatagctgaaagcaactggctctgatccatgcgcatatccagcaatgcatcgtgctgatagctaaaaccacgcttggcatcgtcaaactgtggcgaagaaacgccaagatcatagacgatgccatcaatcttcgttacgccctgcgcattcaaagccgattttaaatggcggaaattgttcttaataaaggtttcttggccagcctttaagtacggcttaagatgctcctgattatagtcaattgcagtctgatcttgatcaaacgagtacagatgtcctgtcgtaagctgttttaagattgcctcactgtgaccgccaccaccaagcgttgcatcaacgtaaatgccagttggcttaatgtttaaaccagccactgcttcgttaagcagcaccgtaacgtggttgaattcagtcattaatatacctcctttctgacaagctacagatcgaagtcaagatcctcggcaatctgatcaaaatctgcagccgtatcgtccatataccgctgccagcgttctgtatcccagatttccaaatgttctgatactccaacgatcgtgcactgtttatttaaagcagcatgctgtcgcagtgctattggcaaattgatccgtccttgcttatcgaactggcattcggtcgcggcagcatacaaaaaacgcacgaaagctcgtgcattgcgttttgtcattgataacgactttaattttgtttccaattcatgccagacactcagcggataaccagtcaaacagccatccaagccacgagtaacgacgaatccgtctcccagttgcgaacgaaatttggcggggatgatcagacgacccttatcgtcaatcgtatgttcatattcacccatgaacatactaatccccccttttggaccaatgttacagatacagtctaccacaatcccccacttctcaccatggattttaataattttgtacagcctaaaaaagccgctgtcccttgaagcgagacaacggctttgaaaccctaaacatatcttctttctaaacgaccggcagatatgatccggctaaagaaaccaagaaagctgcaactgacacgaccagcgttacgcgccaaaaagccggccaatactgtcgatagatgaactgatgcgcggccgccagctgtaaaaagatcaggccgatactcagcagcatccaaacaatcaacacgtagcagtaccaataaaaccccagattccaaaagctcaagaccatcagcagcgtggcccaaagccaggtactacgctgcttgggcagtttaaacagcttaatcgttaaccgttccagcatgccatagccaatcaagataatgaactccatgatcagttgtcttatcattcaaactgcctccgcaaaatttagtcaagtctcattctatcacagatcaacaacagatttgaatttgggtgctaagatgtgtaaactgataaggataaattgaaaggcgggattagttaccgatgcaacgcaagaaaaagacccgattccaaaaaattactatggtggccgtttggctgatgctgatcgcaatgctgggctccttgattttaggggccgttgcttcactcggcttctaactgatcggtataaatataaagaggttttggccaaacagctaaaacctcttttttactagattaaattttaagcagcttagccctattgcgccggcaagtctggtttcttatagacttcacgcggtttagagccattagctggaccgatatagccacgctgctccatatcatcaatgatccgcgccgctcgattatagccaatgcggaaacgacgctgaatcagtgaggttgaggctttttgctcttgggcaacaaactgcagcgcttcgccgaacagctcatcttcatcttctttttgttcttcttgctgcatctcagcatcgctaaccatcatctgatcatcatactctgctggccgctcatttttgatgaaatcaacgactgcctcaacgtcatgatcagaaataaaggcgccttgaattcgaatcggcttgttttgatcgattggctcaaacagcatgtcgccccggccaagcagtttttcagctccattggtgtcaataatcgttcgcgaatcgaccccactggagaccgcaaatgcaattcgtgaaggaacgttggccttgatcaaaccggtaatgacatcaacgctgggccgctgggttgccaaaatcatgtgaatgccggcggcccgccccatttgcgcaattcgcacgatggcatcctcaacgtctttagaaacagtcatcatcaaatcagccaattcatcaacgattaccagaatcaacggcattgtcggctgctgttcattcggatcggtatgattttgattttctttttcaaccattcgattatagccatccagattgcggacgcctaaagcagcaaacaactcatagcgccgttccatttcaccaactaccttgcctaatgcccgagccgcttttttcggttcggaaaccactggactgagcagatgcggaatcccgttatacacgcttagctctactttcttaggatcgatcatcagcatcttgacctgactgggcttagcctttaacaggatgctggtgatgatcacgttaatggcaaccgacttgccgctcccggttgctccggcaatcagcaagtgcggcatcttagtcagatcagccgtcattacctgaccagtaaccgtgcgaccaagcggcacgtcaagcggtcgatcatcatggggagcagcttcgatcatatcgcgaaaacctaccgtggcaatctgttgattaggcacctcaatcccgatcaatgacttgccaggaatcggtgcttcaatccgaatatccttggcagccagcgccaaggccagatcatcagccaggttcgtaatccgactgaccttaactcctacggctggacgcagctcatatttagttacggaaggtccaaggttcacgttttcaaccgtggcatcgacgccaaacgattttaacgtatcctgcagtttttgcgtattggacttaatcgaatcaagatcagcactttgatccgttggcttcactttggtcaaaagatccagcggcgggaattgatagtcctgatcctctttggcttcaacccgattcaaggacagttcaacatcggtctgatccttggcattcaatgatgctggccgctcattctcgctggctacggtaatgcggggcgcgcggctttgctgatcagatgcagcggttttatcagccgctgattgaccaatttcaaattctggcagctctcgtgattgttgctcacgtttccgttcagcatgcggcgttggcagatccttttcatcgctcggcactgccattggctcttttggctgacgttgccgacgctctgcttgccgagcctgccgatcagcatttaattgatggaagcgttctttaagctgctttagcatttgtgcaatcgccaaacgcagcttttgcaccggcagatcaaaaaagaccacaacgccgataatcatcagcaaaacagccgctgccttggttccagtactgccaagcagatacccgctgccagaatataacgctgcccccaacataccgccgccaatcggcatactggaatcatcatttaagactgccgcagttacgctgctccaggtctgattccaaaaatcactgtggcggcctaattgatcaaacatccgcgcatgcagcatcaataagagtcccagataaaaaatcagcattccccagacccagcgttttctaaagcgcggccattgagcatagatcgtcagtcccagactgtacaggattacgattgccattaacaatggatagctttgaccaaccaaaaccttaaaaatatcctgcacgccagcacctaaaattcccagtttaaacagaccggtcagcgttaaaagaatgatggccagaccgcttaagctgcgaatagctcgctcgtcacgcgctggttttcttgatcgccgcttggcagccgttttattggaacggcggcggatcgtattgtttttgcgggccatgcaattcctccttttaccttaccgattatttcagcttatcgtccgaatagcgatgcacacgggctaatttaggaaatccttgttgacgaagcgcttcataaataacaatcgccgcgctgttggaaaggttaagcgcacgaatgttgttgtcgtcttgcggaatccgaatacagttttgcggatagcgtcgcataaacggttccggcaagccggtcgtttccttgccaaacaaaaaatagtggtcgccaggcaaacggtagtcaacttcagtatagtcgcgttcggcaaacttcgaaaccagatacagctggtcaaggttaggcaccgttgccataaaatcaagcagatcctcatgatagacaaccttaaccttgtcccagtaatccagaccggcacgcttcatatgcttgtcatccgttgaaaaaccaaggggcttgatcaaatgcaaaacagtgtcggttccggcgcaggttctggcaatattgccggtattagctggaaacaagggttcaaacagcacaatatgattagtcatagtcagtcttctctctcctaaaaaaggcaataaaaaaagcagggtctcggtgtgggcacggcgaaacgctgctttaatgaagtactctttgaccaatgccaacgattaaatcgatgtcctcagtcaaacgatttctataagataatatactaccatcacttaaaaaaaacaattaattaatcaaatttttttaccgattaacaagctgacgtcaacggtaacttgttttaatgatgataaatcgctttcatcaagctgtttcgcattgcgaccccaatgcagcggcgacatctctaccaaatcctcagccagccccagcggaatctcaaactgatattgaagcggtacgatcctggcctgctggtaatgctgcataaaacgctcgactactggtgtattgtcgtaggcagcatgctgatcgttttgatcgtataaaaggtgacgcagctcgatcaggtagttggcgttgggaatgatttttaaaagctgaccacctggcttgaggatccgatcgaattcttgataatcagatggtgaaaaaagctccatcacctgatcaaacgactcgtccgcaaacggcagccggcgcagatcagctacgcaaaaaaacaacttacctggcagctgagtggctaattgcacaccggcctttgaaatgtcaaaaccaatggcagcatctttttgatcccgcaaagtctctaattgaaaaagcggcgttccctcacccgtgccaacgtctagaatcgtctgtggctggtctggcatcacggcattgatctgcttaagcattggcaggaaaagtcccgcgctcagcatgcggcgtctggcttcaaacatcgcccgatcatagtcggtaccattgccattattcaaaaaataaagatacccatgcttgttaaaatcaatagcatgcccctgcttacagaccagactgttttcaaaaacgcccttgattggtgcctggcagactgagcagcgaaacagccgtcgatgctcattgacccattgtttcttaattacgatttttttcattgatgatcctttcaatttgctcataatttctcaattctaagcgaacagtttctgctattatataggtgtacatttttaaaggagggcttcgttttgactgaagactttttaattggaacctacaccagtaaatccagccgtggcatttacggcgtaaccttagacacggaaaaagaagaattgaccaacgttcgcctggtggctgcttccggcaagccagcctacctgcagtacggtgaacaaaaacgcctgtatgccttaaaacaggatggcgagcgtggcggcgtagcgtcatacgatctgtccggcgacaaggctgaactgatcgatgccaaattagaaaaaggacctacccctgcctacattggcgttgatgaccagcgtcacttgttgttctctgccaattaccataccggcgaactcaaggtctttaagattgccgctgatggcaagctgacccaaactgattccgtcgttcatcaaggagcaaccggcccccaaccagaacaggatgcgccacacgttcactatatcgatttaacgccggacaatcgtcttatcgtctgcgacctgggaatggatctggtcgttgtctatgacgtatccgatgaaggcaagctcacggctgcatcccgctaccagttcgaacccggctttggtacgcgtcacctggtcttccatccaaatggcaagatcgtctatgtgctgggtgaattaagcagcaagctggccgtaatgcgctacaacgctgctgacgcttccttgactcacctgcagaccatcaagaccattccggctgactggaccgctcataacggagccgcagccattcacatttctgctgatggtcgatttgtctacacttccaaccgtggtgaaaataccattgcagtttttgccgtccagccagactttacggttgcccacgttcaatccatcagtacagaaggcgattttccacgcgactttgaattgagccatgacgacgcctacctggtaggttcaaatcaaaatagcgataacctaacgctttacaaacgcgatgctcaatctggcctgctgacgctgctgcaaaaagacgtggcttgtccagaaccagtctgtgtcaagcgctggcctaaataactgctgacaattcaataaataaacggggtgcttaatcagcgtcccgttttttattgcgtcattttttcaattacggcagtcatgtcgcttggaattggtgcttttagctcaatctgccggtttaaaaatgggctatagaagctcagccactgacagtgcagtgcctgccgagccattacgtctggtccgccatacatggcatcgcccaacagcggatgaccaagatagctgaagtgaacgcgaatctggtgagtacgcccagtatgcaaccgaatcttgacgatcgaggcattcaagcccggatatttcagccaatactcggtaacggccgctttaccatccgaaccgacttgacgctgaacaaacgattctggatcacgctggatcggtgcatcgatatagccatgcctggttgccacctgcccactgactaaagcaacgtattccttttttactaaatgccgcttgagctgattatccaagacggcatgagcaaaacgatgcttaggaaagatcaccaggccgctggtgtctttatccagacgcgtggcgacatgagttacctgattttcatatccttgtttttgataatagtatttaacgcgattgaccaagctgtcttgttcggcaacgttatgagccggtactgttgccacgccggcagctttgttgatcaccaaaaaatcccgatcttcataaacgatatcaaatggtttggaacagatcggaacatgatcattaggtacttctggcggtagctcaatggcaaaacagtcccccggctcaaccagatcgacggcccatttcacctcatgattgatcgtcatctgaccaccatgaaagatggctactttgatcaatgaactggtaacgccctgctgtttgagtgccgaacgcagcttgatcggcttttctccggtatagacccaggaaaactccattattggatgcctccaataaacgaatccttaacgcggtcccagaagttggtatgccggtacttggcaaaacgaatcactttgtcggatacgcgataggatacgtcgaccaaccgatgcgactgcgaatccatcataatctgatcgcgatcacagcttagcaccgtcccggaatcatcaggcagccgcagcgtcagtttggtatctgagccaaaaacgaccggcgagcccagcgttcgaaaaacccggttgtttaacgaggccatctcacccagctggaaaccgataatgcgcggatccaaaattgcgccgccaactgatttattataggccgttgatccagtcggtgttgaaatgaccagtccatcaccgcgaaaacgctcaaacagctgattattgatgtatacgtcgcaaaccatggtcttgacgatattgcgcagcgttgattcattcagcgccacgcgtcgttcaatctcaccatcatcataagtagcactcatttccagcaatggatagctgacggattgaccactgtcgttttgcagactttcgaccagatcctcgacctcaaaattacgccaatcggtataaaaacccaggtgtccagtatgaataccaacaaaacgaatcgtcgacaagcgatcctcatagtgatgaaatgccgaaatcagcgtgccatcgccgccaatcgtgataacgacatctggctgctgctcatcataggtaattgccgtttcctcttccagacgattcagcaacagtttgcgtacgcgcaatgactccggcgattcatagttaaaaatggctacccgcattggttaatccgctccttttttatcttccagcgatgagttcagcagttcatcaggtgcttgcttgcggccaaacaacgtctgtgcctcttgaatttcttctctaatctcagacatctcctcatccagcttaaaagcagcctctgccgcccgctgcagacgatcagaaagttctttaggaaacgcgccttgatatttgtagtttaatgaatgctcaatcgtcgcccaaaaattcatcgccagcgttcgtacctggatctcagccaaaacctttttttcaccagtaaccagctgaacgggatactcgatcacgatatgataagatcgataaccgcttggcttaacgttggttacgtaatcacgctcttctagaatcgtcatgtcattgcgctgacgcagcaggtcaacgacttgatagatatcttcgacaaactgacacatgattcgcaagccagcaatatcttgcatgtcttgctccaggcgttcttctaagacatgccgccgcaccattttttctttaatactgtcaaccggcttaacacggccagtaacgaattcaatcggtgaatgctgatcttgatcttggaattgtttacgcatcccccgcagcttgacttttaattcattgactgcttgttgataaggtaataaaaaatgctgccaatcttcaatcattgcaatcccacttccttgacaatctctgtttattttatcatagtttcgtaatgacttaactaaagactgcctggttcaactgaaaaacaagtctagtattttcacagatatcgtaactgattagctaaatgattgcttcaaattattttatgtaaattcatccaaaacagatcgctttacatcgtgctcattctttgtaaaaatagcattgttcaataaccgataattctgcaacgaacaggaggagcggctgtgctcgaaattcatctttttgttaatccattaggcatgcgctgttttcgctgcgaacaggatgttttgcgcattgaccagcaattgcgcactaaagtcaactatcaatttattccgctgtttaatatggacacgattcagcagactatgaagctttatcatctcaacgatcatgatctcaatgttcggcagcagacttcggctacgctttaccagattatcttggattataaagcagcactgtttcaaggacgcaagcgtggccgacattatctgctgcggctgcaatctgcgctgatcaatgaaggagctgattattcagaagcccttgcccaaaagattgctcaacaggcgcagcttgatttggacatgttttgggaagatcgtaaatcagaactggcaatcaaagcattcaaaaaggatcaatacatggctgatgaaatgggcgttacccaaactgccactgcagtcgtttttgattccgaacagcctgtctatggatatatgatcaacaactttgactatgaatcgctgattgaatcataccgtaatcatcagttttgcctgcagcagactcccgaagaatttgcgcaaagttttaatgataagcatcatcaatcaacactgcggattctttagctggctgccagttttttcaagtaggccagcttgcgttcatagctgctgaaccatcgcggcggctgaatcaattcaacgacctgctgctggtagcggatcacgccagccagattcagctcttgggtatagcaggccaggcttcgatgacgaacctgctcgacttgaagatcactcagacatggcaaaggaagccaattggcactttgatttaaaaagtcataccaggctggccaattccaacattgatgcgcgggacactgctcaagccttaaaataacggatatgcgccattctaatggggtctcattcatcaagctccattgaaaatgcgtatcatgagcaaccaagggacaggtactgattgctccgtggcccattagataggtttgattggctaattcacaaagccgcggcgttgccaaacgaatctgtcgctgcagctgctgagtctgccaaattaaaatctgccagacatcttgacgactttttcccgatttggggccaaaaagccgtcttttttgatagtcaggctgctgtcgttttaaattccaaaatggtaagatcagctgctgatgatgccattgtaaaaactgagctgcttttcccggctgcagccgatgcgcataggttggccccaaaaaccagcgataggcaattcccagccgctcgtatccttgattgcgttcaatcagccgcgtcaagccaagcggactgcactgaaactcaatggctgcccactgatcattaatcttggtcaatatgtctgggcgctgcttgattgtcggtaaataaacctcagaatagctcggccagccttgctgattcagccacctgccaatctgctgcttacccaactgatgaatagcggtttcattagcatcacatctgctttgggcataatgcgcaaaatagggacgatgatcggttccctgacataaatgaactttttgaccacagtccgggcaccaatacgttcgctgcgcttttttagcttcagtttgggcccagaccagttgaccattccacaaagcggtctgcataattacacctccactttgctatatgccaaaaaactgtaattgttattaaaaaagctgagtcattgaaatgtccaatgactcagcttttcaatttaactattcaaaatacgttcgcaccagttctagggcagcctgtttcattaatggcttaccgtgttctaaaatgacatcgggcgtcagattggttttttgaccatactcatatgccaaagccagctgatccttcaactgactcgctgacagtgagccatcatcaataaacgtcaagagcaggtagtcattgttctgataacgataaagatcggataccgcattgatgttgtcacgtgctgatttggccagggctaccagatcctcaaaatcatcaatccttaagacacaaacgtttttttcaatgtctggattatcaatggcagcttctggctcatcacctgcggacacattattttcttgattatgatctggatgcgattcctgacgatctctgccaaccagctctttttttatcaagttggtaatctggtcttgatccaatggcggctgaccagcgggcgtacctttttttaggctggcaggatccgttttggtaatataaagctctaaaccatcttgttggggacgaacttggaacgtaaccagatcattatcctgaaattgatgatcagcatcgacttcttctaaaatactgtaaaaaaagtcttcaatctgttgattatgattcagcaaatcaagtacggtaataccgcgctcatttagatcttcattattgagcagcacgcgaatcgtattttcgttaatgcgtttcatttccatatgcatcgcgccccctttgattcgctaatttttcatacggtcgctccggctttgattcaagcttaaaaagccgaacgatattaaacgtctagttttcattatagcattctttttccgataacagttcgataaaaaaataaaggtgacgaaaaatcgccacccctttagttcaagtttgcttttcgacgtgcttcagccagctccaatgctcggacttcacgtggcaggaaccgacgaatctcatcttcgttatatccaatctgcaatcttttatcatccataatgattggtcgtcttaacaggcctggatttttacgaatcgaatcataaagctcggtcattgacatctcatctagattaatgtttaaactttgataagctttcgaacgttttgaaatgatgtcttcagtaccgttttcagtcattcgtaaaatgttttttacctcgtccatactcagaggttcagaaaaaatgttgcgctcggtgaaaggaatgccatgctccttcaaccaggcccgcgccttacggcaagatgtgcaacttggagacgtatatagtgtaaccatttgttgggcctcctttaaatcaaaaacatgtttaaccttgatcactccataaataattataacttattttagaatgattttgaaccactgtcagtaattttcttgactttttgtaagtgaaattaaaaataacgtctggtttgctcatcaacaattattaaactaccatcgcgaacgatacatttattgatataatgggcatcattgattaattagttgcgctttccaactcgttattcccaattaatgttaatgagcggtataattgagacaattaagataaggaggagacaatcatgctatcacaaattagttttacttttggctcaatgccagttttgcttgaaatcattaaaaagcacccagatcgtgacttccggctgctacaggcaactggtgacaacagcaagctggctctatttgacctatcaggtaagccaaccatctttaacagtccaattaccttagagactttatacagtgttggtaatgacaagttcaaaggaattcttcattttgaatcatttgagctcggcactgaagataagaacctgctgcgcaaacaggcaaaaattgctcttgatagtgctgaccattctaaaatgacgactggctatatgttctcacgtcctgatcaaaccaatgcaactattttgataacgacttggacaaatgcagttgccattgatgactggaccagcagtaccgactttgcaccgctcgccggatacatggatcacagtccgcgcagcgtttactactatgaggattatcgtccagctgaatagaaaaagtgcaatgcagttcaatgcattgcacttttgttttacctagaaatctgaatttgcaataattgcaatcacccaaatatcctgactttacgcgggtttacgaaacctatcaggggcttcagtcggcgcaatgttgacgagtttaacagtgccaaatacgactattccaacgggctactgaaaggc

SEQ ID NO: 1888 - DNA, 1297 bp, Unknown
  gut microbiota DNA sequence
aacttaaaacgcagctgttgtggcttccgcaattttgaaaatctattgcggcgcattgactgtatccgttcctaaaaaattctccacttcatttttgaagcagggaattgatcttcaccaatacgatttgacaaagacttaaagtaccaagttttctcacgagctttgccaacaaaaaaacatgttgccgaaacagcaacatgttcaatcatacggtccgtacgagactcgaactcgtgatctcatccgtgacagggatgcgtcctaaccaaaactagaccaacggaccaaaattgcgggggctggatttgaaccaacgacctccgggttatgagcccgacgagctaccaggctgctctaccccgcgataataaattaagtgacccatgcgggattcgaacccacgataccagcgtgaaaggctggtgtcttaaccgcttgactaatgggtcatgatcataaaagcaacttttgcaagttatgggtctaagtggactcgaaccaccgacctcacgcttatcaggcgtgcgctctaaccaactgagctatagacccatttatcgcggcaggggggatcgaaccctcgacctcccgggtatgaaccggacgctctagccagctgagctacaccgcgataacaattttcattgttaatcgggaaaacaggattcgaacctgcgaccccctggtcccaaaccaggtgctctaccaagctgagctatttcccgaaaagtgcacccagaaggagtcgaaccttcaaccttctgattcgtagtcagacactctatccaattgcgctatgggtgcaaaagatgccgaggaccgggatcgaaccggtacggttatcactaaccgcaggattttaagtcctgtgcgtctgccaattccgccaccccggcattatggaattgacaaagcggaagacgggattcgaacccgcgacccccaccatggcaaggtgatgttctaccactgaactacttccgcataatattcaagatgccgactagagggctcgaacctccgaccccctgtttacaagacaggtgctctgccaactgagctaagtcggcgtaaaaattacggtattccgcatctcaaagcctctctatggcaatgagccgtgacgggttcgaaccgtcgaccctctgattaaaagtcagatgctctaccgactgagctaacggctcatgagcataatgctcaatggaggatacagggctcgaacctgtgaccctctgcttgtaaggcagatgctctcccaactgagctaatcctccataatgcatggcaatgc

SEQ ID NO: 1889 - DNA, 605 bp, Unknown
  gut microbiota DNA sequence
gctgctgtactaaagcggaggtgaatatcaatgccaaaaaagatttattttttcgaaccaaccaacaagaacgcgtttagctactttgacatctttgaagacgatgcacaagttcctgcaaatgcaacgaccgtcgcaccatttgacagtgaagggaagccgttgcttaacccaacttggaacggttcatcttgggacggtgtagacgaagaaacttggcgaaagagcttgccagaaatcccacacgaagaaaccaaggaagaaccaaactctgatgacaaaactatcagcatgcttactgctcaactgctgcaaacgcaaatgacggttaagcaacaaggcacgcaaatcgctagtctgactggcgcactactggcaaacgcaaaggcaaaggcaactaactaaagagaggtaaaaactatgtattccatttttaagatgtactacccaatgggtctgttcacggtgcaacaatgcaaggacgcggtttatgtcggttggctgaccgctgaacaattcaaggaaatcaccggacaagattacgtggctacgtaatcttttttattttgtcgcctaagaaagataacagtaccacgtggggcggc

SEQ ID NO: 1890 - DNA, 335 bp, Unknown
  gut microbiota DNA sequence
cttgtacactttttattctaggcccaaatcatgcagaaacacggcattaaagctgatgtccgtcagaaaaagcgcagccgtaagaaagaacaacaacagtaccaagaggataatttattggaacggaaatttattcagatagcgcctaatctgatttgggtgtccgatacgacaggactaacctatggtcgcaacaataaagttcgcttgcacgtagttttggatttgtatggtcgttacgtgctcagttatcatatttcaccaactgagacggcagaagccgcaattgaagcctttaaacgcgccgctaagcaggctgggaccttcgcaccaat

SEQ ID NO: 1891 - DNA, 2341 bp, Unknown
  gut microbiota DNA sequence
attaaggctaagcgtagatgtcttgccaatcatcaatcaagttttccgtatgcttcgtcatcaactggttccagccattcgttggatgtttccgtacctggaatgccaaatgccagatgactgaaccagctgttttgcttggcgccgtgccagtgcttgacgttggctggaatctcaacgatatcgccaggcttcagactttgagctggtttgcctgcttcttgataccagccttcgccatcaacgcagatcaggacctggccaccgccactggctgcgcgatgaatgtgccagttgttgcggcagcctggttcaaaagtaacgttgctgattgccaaaggatcgcctggttttgacaagacgttaagatatgactggccgataaagtattgagcgtaggcgtcatttggctgaccaagcccgaacatcccgccgtgagcattggcaggatcctttaagtcctcagcatagacttctttggcctgattgaaggcggcccaggcatttggccagccagcatagaaagccaggtgagtcagcagttcagccatttcttgtttggtgacgccatttttacgagccgtggccaggtgataatgcagcgaattgtcagtaatgcctttgccaatcagtgcgctgatcgtggcaatactgcgcagctttagcgacagtttatcttcacgtgaccagacctcgccaaacagcacgtcatcgtttaaatgagcaaattctggggcaaactcgcccagtgcatcgtgtcctgcagtttgtttcattagattttacctccataaaccgggaaaaagccatctttcccataatctttaatgtgttccagatgcttcatcgtttccagatcatcagccgcaataacaaagtcgacatcagcattctgcttcatatggtcggggttggccgtcttaggcagcggtagaagaccaagctgcagatcatagcggatgcacagctgagctacggaaacgccatatttgtcagccagctcatttaagactggattggctaaaacggcgccgtgcgcaactggtgagtaggcctcaaccaaaatatcgttctgctgacaaaagtcaatcagttcaaatggcgtgttcgtgacgtgggccagaacctgattgacggctgggcgaaccgttgcgtgatccagaatgttctgcagatcgtgctggttgaagttggaaacgccaatcgcgcgcagcttgccggcatggtaggcgtcctctaatgcctggtaagcggccaggttgccggcttcatgacgatcagcggattgattgacttctttccaaggctgcggactgtgaatgatcatcaggtcaatgtaattcagtcccagtttctgcagcgactcttcgattgcctgggcagctgactcgtagtctttgagctcagcggccagcttagtggttacaaagatctcatcacgggccttgccagattgctgaatgccgcggccaacgcctttttcgttttcgtaggcttcagcagtgtcaatatgacgatagcccagctgcagagccgccgtcactgctttttcagccgcatcgtcatctaaaagccaggtgcctaaagcaagtttgggaatcttgacgccattgtttagctggtagtcttcattaagaatcgtcacttaagatcactccttggtgtttttgcttgataattcattcctggaatctggtccagggctaaattagagatgctgtcgggatgatagacggctttttcggtaccggccttgattgcttcttggtagtaccagtctttatagtcgagttccttgagatagaagttgagctgctcgatctgatcaaggacgtgctgccgctgctctttaataatggcatagcgttgttccagcgttgcatcgccgtccgcgcacaggtcaacgtattttttgatctggcgaattggcattccggtaccctttaggcagtttagaatacgcagccaggggaaatcggtatcttcgaaaacacggatgccgttgacgcgcttaacgttgggcagcaagccttccttatcatagtaacgaagcgtggaaggggtaacacccatcatctgagcaacctgagagatggtgtatgacatttctcatcctcctttcatttcatcagctgatgtctttatgctaaaccttaaagctaactttaagtcaatggttaaatgagatttattacgactttttttgaaaaataaaacagccccagctggaaattaccaggctgagactgttgaattgatgtttgcgttgattgcaggctgtgaaaagtcagatcgatccgagaagcattgcagctattcggcgataacttggccagtaatg

SEQ ID NO: 1892 - DNA, 4788 bp, Unknown
  gut microbiota DNA sequence
aaaaataaaaacattagaaggttgcagacaccgaaatacttgagccagttatgccgcttaaccagttgtttcagttctttcaaatcaatcactccccaatcaataaattctcagctggatgtctttgggcagattattgtagagccaggtcgcgtcttttttggaaacttgaatcgtatcgtcaacatgattgcccagcttaggttccgcctcaatgtcggcattctggccaacgcttaaccaattgatggacttaatgtctttgccatcagtatcgtaatgaaagatcgatggacctctaagatcgccaaccaaaagttgatgctgtccagcagcaaggttgactctggcgttgagaatatagacaacctttttattgtttaaaatgtagatcttgttttgtttaggaaaggcagccatagtaagatgctgaccgctaagtttgggataggcacctttttccgaggattggtcaatttgaagggtccgcaatcgattggtatgaacacgccagctggcataactggttttcagttcagcaggcggttgattaacgatcccacctagattaacgaagactagttcaatcaaaacaatgctgatgctgaattttagcatctgcttgatttcacgattcatttttcaaaatactcctacaagttaatttagccgtaaagattgtttaaataatagcaattggatgatttaaccctggaccgtccaatgcatctgagttctaaaaatctttcatatatgccaataccatcaaatactaaccagattgatcataatgtcaactacgctttatttagctttaaaagcatttgattagatcagctaatttgttttcattaagttttaattgtttaaatgataaaaaggatgcaggctatatcgtccgcatccttttgcgttttgaaatagttcgggatttactgaaataaatcaaacttgtaaggtaatggaattattgatgttgctgtgacgatacccatagccgaagtagagtaccatgccgattgcaaaccagatgccggccccgatccaggtttcttttgacagaaatgacatcataaacaggcaggcaaacccggacagcaatggcagaaccggatacaaaggaaccttgaagccgccttcgttaagaatgtcatcacgcttgcgcaatgggatgatcccaaacgaaaccatcgtaaaggccagcagcgtaccgatgttaaccaggttggtaagactgtctaaggatacgaaaccacccataatggcaattacaatggcaacggcccataaagcaacttttggcgtgtgcgactttttgtccagctggtgcagcgaggttggcaaaaggccgtcacgactaagcgagtagatcagccgagatgaggcgtagattgcggtaaacatgcaggtagccataccaatcagcgccccgatcgaaagcagagaggccagccagccttggtggacggactgcagagcaaacgcaactggattggcaacgtctaaatgcttgtagttgaccatgccagtcaaaaccagcgatacccccatgtacagtaccgtggcgatcagcagcgtaccaatgattccaatcggcatgttcttttggggatgcttgacttcagccgcggaactcgagatacagtcaaaacctaagaaggcaaagaaaacggtcgttgcccccttgaacgcaccgtgcgccccatatggcaggaacggatggtagttggcctttttgacaaagaagatgccaatcacaacaaacgcaatgatgattaaaagtttaaccacaatggcgatattgttgacgcgaaccgattcatgcatcccgtatgaaagtagccaggtgatcaaaagcacgcttagaatcgctgtcaggttaatataggtaccgtcagcgggattaaacggaccagacagcgccttgggaatgttgacgccgcagctggccagcaacgagttgaagtaggcagcccagccagtcgagacgcaggcaacggccaacaggtattccaaaaccagtgcccagcccatgatccagccgatgaactcgccatagatgatgttgccgtatgaataggcactgccggctaccggaatggctgatgagaactcggcataacacatcccagccaagccacatactaccgcggcggccaaaaaggaaattgtcacgcctggaccggcatcattggccgcgaccgtccccggcaggatgaagatcccactgccgatgacagcgccgatccccattgccattaaatctccggcattcatggtcttgggcatttggccgtcagtcttcatgtagctggctagactttctttacgaaacagatccatattatcaacccccagatctgacaagtgataaaaaccgatcactatttaatttattttcaaattcattaataatcttgctaccaatactagtgctctcaaaattaaaaatcaattagaaaatattcaaaaaatctaatgccaataattaaataaaatgaacttggcatcgtttgcaactaaattttttaaacgggtagataattttttagagaaataggaaattaagcttagggatgctgaatcaagcataggtaaaaattcacgcgatttcgtggcttgaaagattagttgttgaaaaccaggtattaaggataaaattaaaatgaattattttggttaaatgaggtaatgaaacatgacaaccgtcttactggttgaagatgaacccggtttggccgattcattaaaaaccgaattggaattctccgaaatgcaggtaattttagccagcgatggcaaacaagcgctggattgttttgctcagtatcaaacgcagatcgacctgattattttggactggatgctgcctaaaatcgatggcttttcagtactgcgtcgtattcgccgcgaaagccaggtaccgatcatcatgctgacggcgcggtcttacattggcgataaggtagcggggctgactggcggggccgacgactatattaccaagccatttgaaatcgaagaactgctggcacgaattgaggttgccttaagacacggccagtccgccaagccaagcgcgaccagctcgacctatcagattggcgacctgatgattgatgacgatacaaagcgggtgcagcgaggaacgcgcctattgttattgacgccgcgtgagtacgcactgctgctggcattggccaagaaccgcgatcaggcctgttcaagagatgatttgctgaatcaggtctggggcgttaactttatcggccagcctaatatcgtcgacgtctacattcgtcaactgcggcataagattgatggcaatcccaaactgcctcggctcattcataccattcgcggaacgggctatatgctttcggccagtctggatgcaggatagggggctgaaggatgaaaaagattccgaccagtgccgatattttgcagcgtgccgtctggaaattgatcgtttttattacgctgggttttgaaatcgtaatcatcggcgcgagcggtcatcagctttacgagcgcgtggtgatcaacagtcagctaattgccagaaaactgattaagaccgagattgattccgaatttgactggcagcattggcgaatgaacagcaatctggataccgaaaacgtctatttcttagaggttgacaatcttcgtcatgccaagccgcagcgtttttataccgaaaatgccaaacagctgtcaaacaagccgccgcggcacctttttaaatcattttggtacagtgagcggtttgggattttataccggaccgtcacgaccaaaaatggcattcgctacgttttatggcaccgcatgtacgagcaggccacgattcttatccgcatcatctgggtaacactggctgcgatgatcctgatcatggcgttgagcccgctgtacgtcaaacgcttggcaaaacgactgacgcatcccttgaccgagcttacgcaaggcgttcagaccgccagcgagcgtggggatgacgatggctggcagctggcggttcccgagcagccggctgaaatcgtgagcttgacacaaaacttcaaccagctgcttaaaaaactttataatcatcaagccgagcagcagctgtttattatgaatgcagcacatgaactaagaacgccaatcgcggccattcgcagccacgtgcagctgttggagcggcatggtcaagatcaccccgagatcatccccaaatcgattcgctatatcgacagtgaatcgcgtcagatgcaggatttggtagattcgttgttgaaactgacccgagcggacgtttctagtctgacgctgtcaaaaatcagcatcagccagaccgttaccgaattggttgaacagatgcagcctaaaatcgaacagccgctaaaatcgcggatagagccagactgctgggcaattgccaatcgggatgccgtcgcccagattatccataatctgattgccaatgccgctaaatactcgccagccgaccagccgattcaggttacggttgagcagcagtcaaatcaaatcatctgtcgcgtcattgatgaaggccccggtattttgcctcaggacctgccgcatgtttttgagcgattctatcgcagtgccgaggtgcgcagccagattcccgggactggtttggggttggcaattgcagctcagctttcgcaattggttcaaggaaaactcacggtacacaatcatcagccccatggcgccgtctttgagctgcggcttttccagactagacgttaagtgactgtaaaaaacgcgcag

SEQ ID NO: 1893 - DNA, 35394 bp, Unknown
  gut microbiota DNA sequence
ggatcgccagcttcggggacaaccccagctgcgatcttttttattggacgcaattctgaagattcttcagaaaagcctcattttaaccctgtatcaagcccagccagcttctcgtatgataataaaaaaacgagaggaagttgatctaatgcttagtcttgatcacttaagtcagattattacgcagctgttggctaataacggctggatggtatatggtggtctgtttttaattatcttagcggaaactggtttggtggtgacgccatttttgcctggtgactcattgctgtttttatgcggatcgatcgccgcgatgagctcgcatccattaaacatctggtacctgctgatcctggtttcaattgccgcaatcttgggagatacgattaatttctcaattgggacgcgatttggcgaatatttaacgcggcggcatccaggacttatcaagccgaaacatcgtgaaaaaaccgaggagttctttgcgcggcatggtaacctggcaatcttttggggacggttcatcccaattattcggacgattattccgtttacggcggggatgggttcaatgccataccgtatgttcatcttttataacgtgctgggcggacttgcctggacgacgattgctcttggcgcgggctggtttttcggcggcctgaccattgtcagaagccactttgatctgattatcgtggcaattatcttgatttcgctattgccgattgtctttacgctcatcaaggatcgacgggaggcagccaacaatgattaaaaagcagaatatgggttgggcatggctcagtttagcactgtttggctttctgggcatctgcattaagctgcataccacgtggatcagctggtttgatactacgggcacaaacctgatgccaagcgtaacctgggccaatactacgatctttgaagccatcgctaatcttggcagcccggcagtcagcctgttggtagcggtcgtagctgctgccttgacctggcgggagtttagaacgcaggccattttgtttggtctggctcaatttggcggcgccggtctgctgttaggctttaaaatgctttttcaacgagctcggccaacgcaaccgctgctgccggaacatggcttcagttttcccagtggtcatgtttttatggcagtaatcgcggttttgatcatctggcgttggagcgactgctatgttaaagacgtggaacaaaagctgaccatccggctgctgggcatcatctggattggcctggtagcggcatcgcgagtctacctgcgtgcgcactatccaagcgacatcttgggcagtctgctgctggctggattttggtggccaacgggacagtttttgatcaataagtgggcattaaaacgacaaaaagaggcgaatgaagcatgaccaaactaatgattatcgtgccggcctataatgagcaggaggtattgaaaagcagtattgaacggttatggcagattgaaaatgagcttaagcaatctcagcagataacgatggattcgggtattctgatcgttgatgacggctccgttgatcagacgtggccaattattgaacagctgcaccaaaaacagcctgcgatcagcggtttgcgtttttcgcgcaactttggtcatcaagcagcgctcttggcgggactgacgacggcggtctgggatgcggacgttatgattacgattgatgctgatctgcaggatgatccagaaaaaattccggcaatgatcgagcagtaccaagccggctgtgagatcgtctatggcgttcgcagcgaccggcagacggattcatggtttaagcgcaataccgcggagcttttttatagcctgatgcataaaatgggggtcactatgattcctgacagtgctgattttagacttttgagcaatcgagccgtgcatgccttgctgaagtactcggaacgcggtttgttcttgcgtggcttggtaccgcagctgggttttcaaacgggccgcgtggaatatcgacgaacgccgcggctggctggaaaaaccaagtattcgcttaaaaagatggtcggcctggcacttaacgggatcacgtccttaaccagtattccgctgcggctgattttttggctgggaatgctggcctgcatgctggcaatcggaatggggatctttacgctgaccgtgcatctgctgggcaagacgatgcaggggtggtcttcgttgatgctgtcactgtggtttatcggcggcgttcagctgatgagcattggcgtaattggcgagtatctgagcaaggtgctggttgaagtcaagcaccgaccacgctttatcgttgatcagcatttaaagtagagtaggaggggtaaaaatgcgcgtttggcagcgaatcttatgcctggcgctgatgattggcatggcagcctatgtcttaatgccgcgtccgaccaactggcaataccagatcttattggcggcagccgttttggcactattggggatcctattccaaccggctgcgcgtttagaaagactttcggcacgccgttttaagaccttgcttggccttttggggagtgctttgatcttgtcccagctgctgattttaatttttttacccgtgacggtttatcacgatccgtttcgggtgctggcgcaggctgctcaaatggctggcggcaactatgactggcacatcacctacttttggcgctattcgcaaaatgtaccaattgcctggctgctgtcacgctggctgatgattaccaactggctgggtctttcagtaaactggggcgtcaatcttttagagctgatactgcttgatggctttatttatttaacgcttttgacggcttggcaattgacgcaccgtaaaaaagtcgtgctgggtctggcagctttcttgatgctgaccccgtttgcctacacgtattatctgcaggtcttctatactgatctgccaaatatgttgattttactgattatttttcggcagctgatcttttggtcaaatttcagtcatcggcaaaaatggatccgtggtctgctgctgagtggactgactggattggggatgctgatcaaagcgaatctgatcgtactggtaccggcaattttgctgacggtgctgctcatgcgaccaaagcgctctttgaaactggccttgggcgcgattatcctgggcgttgccttaagcgtacctgctcatgctgggattgaacgagccgcgcattttcagcaaaacgatgcttataaattcccaacgattgcctgggtaacgatggggatgaatgaacggacgcagggaacctacagctcagctgacgttatccgcaacatcaagcaaaaagatcttgcagcgcggcaaaaagtcgatcaaaaagtgctgaaaaaacgccttgctgacatgggggcagctggtatcggcagacaggtcatcattaaagatggcatattgctggatgtcagtcagatgacggaatggtataatggcggcttcaaaaatgctcctgcctggtatctaagatttgccgatcattggcatgagctggcggtattgatgatgagttcggcagcagtctgtctgtatctgttgaccattatgcgcttatggaaatggcggccccagcggtatgatgatcagcagaccgttttaatgcttttggtaatgacggcactgggatatcttggctttcatgccttgctttgggaagctgagccgcgttatggacaggcgatttttccgctgctgtttatgattctgatgctgaccaagccggcttcggttcccgtagtgcatttgaaatggctaaaacgaccgcggccagctgcatcggtgattatcttgttcggcgtgctgttattggcatggaatcaaggcctgcctggcagcaataccagtatcgtagctgcccagcgttcacagctctccacgcagtatcacgcgcgcccaacgtttttggcaccacgtcagaccgtttcgcagcagatcagactcttggcagccggcagccggatctctgttcagacctatgccaatactgatctcaatgtcgaactgcagaatctgcagaccagacagaaatggcaattaacgcgtcacggcgattcgcattatctgtgccaagacttaggtgtcggtacttatcaagttacggttaccaacccaacctctaaaccgcagccaattgcaatcttaaaaacgaatcgctatcaaatggcagaccggccgctgatttttaatggtcatgcacaaaaagatgcttctttgatttatctggtcagcaatcaatgcgactagctgtcttaaagactggctttgaccactgatagttaaagtcgatataaatccaccatggttatggaccttctatccttgaggaaactcatctataggaggttttttgaatggccaaaagtcggtaagtcgatcccacgccaaagcaaacaaaaagcccacagtacgataccgtgagctaataaaaagagcgcccctatgataaggagcgcccagccggtttgttggctaaaaagcaccaactgcacgcggcctaatcatcatcttagttatattatctgacatcccattaataaaaccttgatgcgccaaggatttgagacgtcgcgcggataactagtcttcaaatgattggatgcagaccaattgatcgtttgagatgtgctcattcaatgcgttggccagatcactagagattaccccagcggcagcctgttgctgaacatagctgtgctcatcttgaaacgccttaatggctaatgtccgcaaaacgttgatgtccatttcgcctcgggaatggaaacgatccaaagtctgctggcgattcagatacatgcgacggaccatcgcgacttcatggacgttgtcgggcgtctgcacttcatcgagaaactcgttgacatcggtcatggtcatgttaaagattgactccagccgatcaaagtactgctgacgaacggccttggatttatcctgtaaggttttatcgtcgtggattttctggagttgtgcaaacgtctggggatgatgtttatgcagcttatgactcaaacgtttccacttaaaccgataatgccagattcttaaaaaggcaaacagaccatgctgactgtgcattaaggcatcgcgaccaatcatgcggttatagacctgctcttctttggcggtgacgacgccattttcacgcagctcagccagggtctgcatttcaacgccgcgcgcctgactggcaagtcgatcatagacgttgcgattgatcttaaaggtcagtgtcatctgactgctcagctggtcaatcaaaagcgcctgttcttttttgttttctggcgatgcgcttagttcatcgattgcatattgcacggtatgaatcagctgatcttggaactcatcattggtatagtttttagtcttggctggcagcagacgcggaaaggccaatgtgccgaccgtcagactgatcaaaatgacgatggcggccaaaagaatcagctgattgcgggttgccagctgcgcgctttcggttagtacggggatggaaaaggccattgccagcgtaatcgtaccgtgaattccgcctaaagcgagcagcagaccgtcacgtttcggattcgtggaatgcatgtcgactaatttgaaacgtgcccatagatagcgaatcaagctcattgccaggtaaagacccagtgctaagagcgccagtttcaagatcgtggcggtcaaagtctggctgacgacttctggcagcataacccccaacagtacgaacacaaaaccgtttagcagactggcgatgatattccaaagcgtcgtcgtagcgttctgtacgcgcgaagaagtgagccgcagctggtcgtacaagatactgtgcacgattccggctgccacgactgccagaattccagaaagatgcatttcctcagccagccagtagacggcaaatggagtcataacgttgattggaataacgatggagccgatatcgacgtgggttcgcatcagcgtcgttcgcagcgcgatcagcatccagcccatcagtgatccaaaaataatcccgccaaagaacacgtataaaaaggttaagacgccgtggcccagcgaaaattccccagaagtcaaggtcccggtagccagactgaacaagaccagtccggaagcatcgttgaacagcgattcgtattccagcgtctcattaacgtttttcggcatctcaacattggtcgtcaaagacttaaccgcgacggcatccgtaggcgtaatgatagccgccagcatgaaggccagcgcataggtgaaatgctgcggcaaagccagcttgaggccgctgccaaccagaattacggtgacaattgccaggccgactgccattgacaggatctgccgaatattttgcgaaagctggcgaaaagacacgttttggccatcgttaaacattaatggcgcgataatcagcagcatgaaaatctcaggctctaaaacgatggcatgtgtatcaatcggcaagatgctcagcatgatgccggctaggatctgataaatcgccaatggcaaaaccggccagagcagatgaatgatgttggccgccacaacggttatcaatagcaggccaacaatatagacagtggtcataaggttcctcccaatattaatttatttaattataactgattagaccagactgcggataccgacaagcactttattatctcgataatttattgacgatattatatcttatgtaaaatcatgtggcagaactaaactgaattaaatgatttggcttcttttacggcaccccgacttaaccagcttgcacctaaaatcaccagcatgtcttatagtgaagttctcattaagtcataaaaaaagagcgcccttatataaggagcgcccagtcggcttgccggattgacggtccagcttgcacaacgatatattcctaattacgatggaattgtaacatacttttgtgctgtgttacattattttcgcacaactaaagcgagattgacaccctcgactagtgcgggaaggaggctccttccaatgtcgcactggtatatattcctaattatcgtgccaagcaagcacgttaaacaactaatcaagcagctgtttaggtaatggctgccagcactcatcggtttggatactaatcgggcgcttttttattgaaaacagccggcttactaagcattgatgaccgtaatcaaagattgattaaattattttgaagcccatttgactttgagcatgttataatactttaagttttataagactacgattgaaattaagtaaagaagggatctacgtgacacttaccggagcagattggcagcttttagaatcaatcatcgttgtcttgccgaaaaagaaactcaaaaaagtgtgtaagcataccgatgcaaccaagaaagccattaagcaggtacgcaaaggccagtcttttgtaagagaatgggacccaaaagtggcatctcagactttgcagtatttagaaaagcacgtttataaaaaggacctggctaaaatgaatcagcaccggttgatctgcaactatcacgtgatgatcaacgacttgaatcgggcaatctttgatgaaaactatcgtgggcagtatccgccactgacccgtgaatcgcgcattcagattgagcgcaatcctttagtccagccaggggaaggctatcgcaacattattgattattatctggatgatgggctgatgggagcacccagatatgccaagctgcatgaggccacgattggcgaggttttggatgaaatggcgattatggggcagtacagcatttaagaaaacattcaatcaaaaccaaagcgtctggcagcccgccagacgcttttttgatttagctttcaaacagatacggctgatcaaaacgcaccattaaatctggcagccgctgtttcaatcgttgctgcgcggtcagatcataaaaataactggtctgggtttgaacgtctaccatctctagataatgagtataaacctcatgacctgccaattgatcaagcacgacttgttttaaaagctcgtttccctgcttgatagctttctgatcctcaataggggatgtctgccaaagattgagcgaggcattgataaaacgcgaagtgggcgttctctttaaggatgggggagttttggagtcgcgaatcgccatgattatttcggcgtcgctggccgcttgatcgattcctagatagtcagtcagtttttgatgctgttttgcatagcagggactgttggttaagacacccagctggatgggctgaatctttaaatcaagctgggtaggctcgatcagataggtaccagtggcatcgcttaaaagccaatgaaatggatggacgatgtcatgatcgtgccagattacgccatttagtgctaccgagtccaattctgcagcgatttcggcaactgatgcgtgcgtgcccagcagccagccgatcaagtcctgtggcgacagattcagatgatggctttggggatggtcataataaacctgcggaccgggaaaatatagctcagctgcccataagcccgccgaattcaagccatcgccaatcagatagtggtgattgattttgcgcatcccgcctaagatcgcgtagtcgttggcaaatgagtcgcattccggcagactctgccattgataatcgattggcagatatcccagctgccatggcgtggagcgggttggaaagtccatcgtgcgcccgacaaagcgatgccgctgtctggttgtaaaactgattgccgtacacatgctatcaacgcctttttcttaaacttcacggcaattctagcattaatttaagcgaatcactagtttcataaccggctataataaattaaaaggggttgaaagaaaatgggaattctactgcagatcttgagtattttgattgctctggtcgcaattacggttagctggcagatcgtccgtaacacgcatcgcattgcctttcatggtgaatcagcctggcgcaaggcattatttgaggcaatcgacaatccgcgctggacggcagctgacctggaaaaaatccgcaaccgtatgaacttaaagattctggcgttttatgagcatcgctgttttggtaccgatgattcacagcagccatcgtttgaaaagctgcgccacgaactggatcactttgcagaactggacaaaggcgaaaagtcgctggatctgcgcatcttttttgaaattgaccggctgctgcgtctgctcaatgaaagcaaccgtgaaacgctgccatattctgaaacacggattttaaggcagctggtgcgcatgaaactgaaaaacgactggctggtcttcaatggtcagaataaagagttcaataacgacgaaatcatcgaaaaatggctgccataacccgtcagatgactgaggcacggttatttaaaagccagcgccggttttgtataattaagttaaagatgttgtcttcagcaattagtttaaaacaaccaaaggaggaagaatgatgacacgcatgataacccgtttggcagccgccgttttgctggcgaccgcagtatcaggaggtacaattgccgctaccaccaaatcgtcgccaattgcccaggctgcgcagaccattaagctgaacgaaaaacaagctgtggctaaattcaagcaaaaatatgccaaggccaagatcagcgaaatcagtctggaaaagcaccataatcgttatcagtacgagatttccggctttgattcgcaaaaagaatactcagctaagatcgatgcacagactggcaaattgtcagctgccaaaactgaaaaacttgatgctgacgaccatgagacggcaatcaagcttaatcaggtcatcagtcgtcaaaaagccaatcagttagccgaaaaagctgctaaatctggtcaaggccgcgaatggacgctggaaaccgatgatggtcaaacgatctggcaagttgacgtggttgacggtcatcaaaaaaccgaagttaaaatcaatgctgtcaacaaaaaggtgatcagtgtcgagaccgatgattagctaaaaaatgctcgtcaagctgtttaaaacttggcgggcatttttaaggtagctggttctctctgttttttgaaagtagcattaaaattttagttttaatgcgtttatattttaaaaccgttctggatgcctacatttatctatattcaatatgatctatctaactaaggagtttgccatgattaaaattactgccgttgatccccaagacctgccagccatcctgcgcatcgaacgacttggctttaacgaggccgaagctggaactgctgctcagtatcaggcacggatcaatcagcttgccgatacgtttctggcagcacgcgacgccgatcagctcgttggctttatcgtcggtccagtcgttgatgcgcgttttaaatatattgaagactggatgtatgaagctaacgtacaaaatcgcgctcaacctggcggcaatcagatgattcaaacgattaccgttgatcctgattatcgtggccaagggattggctccagtctgctgcaggccattgaaaaacaggcaattcaaaaccagcggcatcacatcgcgctgacctgcctactggatcgcgtgccattttatgagaaaaacggctatgttaatcaaggcatcgcggcgtcagcacatgccggcgaagtctggtacaacatgaccaagcttttgcccagccaaccacagccccttggttagcatttcagcgatttcaatctttaactgcggcttgtcactgaacaaaatgaatcttagaataaaagcagtcaattcgtttttgaggagtgatcttaatgattaaagacggctttatcccttttggcccttaccgaacttattatcggatcgttggcaagcccagcgataaggtacctttactgctgctgcatggcgggccgggatcaacacacaactactttgaggctttggatgagctggcagagcgtgatcaacggcaattgatcatgtacgaccagattggctgcggcctttcctcaatgcccgatcagccccgggtctatcaggctgcaacctggctgcgggaactaaagaatctgcgggaacggctgcatctggatcagatccatctgttgggccagtcttggggcgggatgctggcaatcatgtatctttgtgatgaaatgccggctggaattaagagcctgattctttcaagtaccctttctgatgcccaattatggggtcaagaacagcaccgtttgatcagttttatgagcaaggaagatcaagaagtcattgctcaagctgaagcagccaatgatttcactggtgatgcctatcagcgggtcaatacccggtttatggaactgcacgcagcggcagcacctgatgaaaatgctcctgaatacctgtggcgcgagaaaaacgttggcgaactggcctatcaaacggcctggggacccaatgagtttacgccgaccggcaatctcaaggactatgactataccgccaagctgcacagtctatacgtgccaacgctgatcaccagtgggaccaacgacctttgtacgcccttggttgccaagacgatggccgacgccctgcccaattcgcaatggcatctgtttaacggcacgcggcatatgtcgtttgtcgaaaagcctttggaatatcaagcagtactgcaggattggctggatcagcacgattagaccagctcaagcagtcagactgccgcgatggtacgttgcaaagatgacaaagctccctgctcaggcaaatagccccggcagagagctttttatttatcagtagttgtcattcatccgtaagcacaccataacaaccctgtgcaaaagcattgatagcttagctgcagtggtcgctgaaaactatgatgattattaaaagtgtactattttgtgtacacaaatgttataattaaaccaacaaaccaaggtggtgaatgatcgtgattgaagctgtaacgacacgagaattgcggaaaaatttcaagaagtatgctgatgatatagttgaatatggtgatacggttttggttgcaagaccagaaaataagaatgttgtaatgatttctgaaaaagagtacaactcttggcaagaaactaactatctgctaaaaagcgaggcgaacagggctgctttaaagcattcgattgaacagctcggcaagcaggaacattttttaacgccagaagaatttgagagcttaaacagtcatgaataagctgaatattgtttttacagcagatgcttgggaagaatatttggaatggaaaaaggccaaccgatcaatggttaaacgtattgacaagctgatcagtgatacaattaggcatcccttttccggattgggaaagccagagcctttacaacatgatctgcaaggcttttggtctaaaaaaattaatgacgagcatcgcatggtatacgcggtaactgagacggctattcaaatcatccaactaaagtatcattatcataaataagcagaaaggccccagcgtgtttgctgaggcctttttaagataatagatcagttaatggtgtgattacgttcatacatgcataaagtcgcagtagtagtcacaatgcatggtttgcggaacctgatcccatttgactggatagccggcaccatgcgcgcagaaaaccgaatccggcgtattagccagatcggcagtcggcagatagtccgcctgctgaatgatctcgtcagcattatgacatgatcgatagccagccggcagacactccagctgtccctggccatgcgtatagccgcgcagcaccgtggcatagtcgctcatttgggcaactggcgccaaaccagtcagcaaaacgctgtcagttgtctggtcaccaagcgggtcaacctcgccatgcatccgctgcagatcattaagcgcgcgaccaacctgagtacttggaactattaggcggaaacgataccacggctctaaaagctgacattgctgccgagcttttaaagtcatcagtccctgccgcagcgcgcgactggcagcttgacggaagtccccgccctcagtatgtttaacgtgcgcgcggccgccgaccagcgttactttgacatcagtcagcggggcaccgatcaaaacgcctttgggactggtctgctccagactggtaataatctgatgctgccagtttttattcagcacgtcgatactgcattggctggcatagcgcatccccgctccccgcttggccggttctagcaagagatgggcttcggcatagtgccgcaatggctcaaagtggccgactccctcaattggcgcagtgatggtctcgcgatataaaatgccgcccttgatgaagtcgacgtctatatcaaatcgttctaaaagcagctgctgcataatctcgagctgtacggtccccatgatctgaacgcgaatctcctgcagctgctcattccagaccacgtgcagcagtggatcttcgtcagccagcgtctgcatggcttttaagcattggtgaacgtcattttctttcgggtctaccgcatagctcaacacgggctgcataagcgtctgcgtgtcgtctttaagctttcccagcccttgccccggataggttgtcgttggtccggcaatggcacaggtagcgcctgatgcaacctgattgacaatggtaaacttactgccattgtatacccgcagctgattggctttttgatccggtaaaatcgcagtctttgccttgagactgccacccatcacccgcacccaggttaagcgttcaccccgttcatcatgtgagatcttaaacacccgcgccgcaaactcgctgggaaattcacggggctgagtccattgagcaagtgaagccagcaaggcatcgatcccctgcagctttaatgctgaaccaaagcagcagggaaaaagctgccggtgttgaatcatctgccgaatccgctcatctgaaagccgaccttgatccaggtattctaacagtgcatcatcatcttgcatggccagttcttcatgatcaaatggtttaagattgccattaaaatccgtcaatgcaaaacagcctggcgccaactcagtctgcagctgactaaggacagcctgaccatcagccgtatcagcatccattttattgataaagataaaagtcggaacgcggttttcagtcagcagctgccaaagcgttctggtatagcctttaacgccatcggttgctgaaattaccaaaaccgcatagtctaaaacccgcagcgcctgttcagtctgagcggcaaagtcaacgtggccaggggtatccagcagcgtgatggacaggtcgtcatactcaagcttggcctggtgggaaaaaatcgtaatgccacgctttttttcaagctggtcagaatcaaggaatgcatccccattgtcaacacgtcccagacggcgaatgattcccgtctgataaagcagggcctcagacagcgttgttttaccggcatcaacatgcgcgatcatgccaatcgtaatctgtttgctcaattcaattctcctttatggcagtgagttgccggctgccagatagatatcgtaccattcctggttggtcaaggttatctcgctgccttgagcactatcgataatatgctgcggattcatcgtccccaaaagcacctgcatgttagcaggatgtttgagaatccaagcaaccgcgatcgcatttttagaaacatgatacttatcggcaagctgctttaacaccacgtttaattcatggaactcctcattgtcgataaaggttcccgcaaacgtaccatattgaaacggcgaccaggtttgaatcgtcatttgcttgcgccgcgcgtattccaacagtcccccatcatgattgagcgaggcttgatcagtcatattggtatgcagaccaaaatcaatcatccccgtgtgcatgatcgaaaactgcagctgatcgatcagcaaccgctgggagcaggcctgctgcagcaattcaatctgttgcgggttgaagttggaaacgccaaagtgccgcaccttgccggctttttgcagctcatcaaaagccgcggctacttcttcaggttccatcaatggatcaggccgatgaatcaagaacgagtccagatagtcaatgcccatccgctctaagatgccatctacggcagtcagcagatgctttttagaagagtcatagcgcgtaatgcggcccgtttcatcagcaaacagcccagccttggattgaatgtagaaatcatctcgtcgtagcccactttgcttgagtgcctggccaaaatgaatttcggatgagccgcgaccaagtttgggatcacggccatagatgtcagcggaatcgataaagttgatgccagcttcatgagcggcctgaagcgtcttaacagcctcagcaacgggcagtgtccccatccgcatgatccctaaggcaacgtttgaggcttcccaatttgttgcgccaattttaatcgtctgcataatttaacgccttctttattgttgatatgatcagtataaaccaaaacaaaaaaatctcctaaaactcatgccggttctaggagaatgcagttaatgcgaccgattgggcagatcataggtaaagccctcgccttccacgctggcgatgtcaaacgtagtaataaaggcatgcggatcgatatcattgattaagcgcttcaaggtcacgacttcttcagaggccactacgcaatagacggcttggcctggctgatgcgaataggcaccttcgcttttcagcagcgtgacgccccgttccagctgccacatgatctgattgctgatttcctcggtttgggtcgagataatgatgaaaccttgtgcaggataggaaccagcctgcgtaaaattgaccaccttggaaaagacataggatgctaacagcgtgtacatcattttacgaatatcgatataggaaagcgatgccgttaaaacgatcgcgtcacagattaaaagcgaacgccccatgggaacgccgcgatgcctttcaaacatccgtgcgacgacatctgatccacccgttgtaccatcaaaacggtagacgattcctgagccaaagccgccgatcagaccagctaagaccccagaaataaacaggtcatgctgaatatccagggtgaatgggacgcgctgccaaatccagatccatactgatagccaaatggtgccatagacggtatagattaaagcgcgccgtcccaatagccgatagccgatgacgatcagtggaatattgatgcaaaaagtcgaaatggaaggatcaacatgaaatagatgatagatgatcaaagagatcccggtaaccccgccttccgctaatcgattggcaatattgatcttaacgaatcccagtgcataaatgccgcagccgatcgtgatcatcaacagatccagcagtcttactttgttggtcgatgcctgcttgagcattgcatcacccgcctttcttaagtcatgttcgatcaattcagcttcccatgccaggtagctgattaaataactaaattctagatgcaaaccggttgtttagtcaaatcacgccgtttaacgatataatagaagttaattaaattgggaggcagtgggatgcagaaaaagaaatggagcctgcttttaggaatcatactgggaatgatgatgctgacgattccagcacgtgcggctacgaattcagcaacgtttatttttcatgatcgaaccggcagtcagcgtgacgagacgccattagttaccgccgcgcaaaaagacggcgtgaagctaagcgttttgcatgccaaggtcagtgctcaaggaaaggtcaggctaagcggacaattgacaaaagaaacggcgcccgtaatcgaagtcgagtttgccaagcatgaaggcagctattctaaaactgcgcaatggtcatatcaagttatcaaacaagcacgggcaaagtggcattttaagaccatgaatctggtgggaattggtactggtaatatgggtctgctgaactgcctgatgagacatgccgatactggtcagctgccaagtcttgccaaacaggttgccattgctggtccatttaacggcacgcatattcagccaaacgctgattcaaagctgatgaaaaacggccgcccctatcatatgaacatgctttatcatgagctgcttggcttaaaaaagacctaccccaagtcaaccgccgtcttaaacatttatggcaatcaaggcagtcattcggatggaacaattgccaataactcatcacgcgcgctgaaatatttggtaacgccacgagccaagagttatcaagaacaagcagtcaagggtacgcgtacaggtcatgatcagctgacacgcaatccgcaagtacagactgccgtaattaagtttttatggaaataattaaaacgctgaattacccgtctcaaggatgattcagcgcttttttgatgattacggcagtgcttgatcgatcccccgcgtgaattccaaaacggtaccggttgagaagtttttagctgccattaaccccaaatgatcgcctgtttcactatcatgacgctattgttgtgactgtttgggcgatgagagcactgattcgccagctgataatgtctgaaaatacttgtcgagatagactttgtggctgaccgtcataatcaggttacgcagcatgtgtttttgctcggtatcgtcatgtccaactacggccagttcgttttgcaagccaaatacatatctcaaaacgttttccagctcttcgcaaaaatagtcataggccgtctgcgtgtcatagctttgtcgctgaatccgaattgccagttttagattatccagctgcaggacatttttagccacggcaataaacatcagctcggccagctgctctgtttgataaagcttcttttgcggccgcgagatcaaaccatgcttgacatagttgctgatcatggagctggtcagcttaacgtcgcctaatggactgaggcactgattcagataattggtcgtctgttccagataaaggccaacgttaggcaactcttgatagcgcggcagtttaaaatcaatcaggtcttgggccattctttcttctctcttagtcatcatggtttcctttcacaaatcaattaaaaatattatagctcaggcttgataattaaactaatagtatcttatattctctttccggtttttaaaaaacttgacgttggaattttgatcaactaaacttcaagtaaagagttttcgaaaaaccgctaatgtaatcgaggtaactattaatgaaaaagatcgtcgttgactccggcgccaacctgctggaaaaatccatcaaaaacgttgcatgcgttaatgttccgctcaccctgacaattgaagatcaagtctggtctgacgatgaagccctcaacctgcccgctttcacagccgccctgcagcagacgagccagccagccgcctcttcatgtcctaatctggcccagtggctggccgcttatggggatgctgatgaaatctacgtcttgacgattactggcaaaatgtcgggcagctatagtaccgctcagcaagccgcagcaatttatcttgagtcgcatcccgctgctaagattcaagtctttgactcgctttcggctggaccggcaatgcatttaatggctgaaaaactggctgagctgatcaatagcggcctgtcgtttgaccgggtcgtgatggctttaaatgaatttatgtcgcaagttgagctgatctttgcactgggttcactggataatctcgcggcaaacggtcggatcagtcccgtattggctaaagtggcacacttgatgaacctgcgcgtgatcggtacggcggatcaaggcagctttaaaatgctgaccaaggcacgtggtccgaagaaatgctgccaaaccctgatcagccagatggaacaaaaaggctatcaaggcggcgcggtcaggatcgatcacgtgcagaatcgagcagctgccgaacagtttcaaaagctgctgttggctgagtatccccatgccagcgtagtaattggcgaatgccgcggactatgcagtttttatgctgaacagggcgggctgatgattggctttgtcaagggcaatgagcagcaatagtcatcccgttttactacgattaaaaattcgtatcctactatcagtaaaagttattttacttaataattaaaaaccgctatgctaaaagaaattcaaattgggggacttgaagatgcacgaatttcttttgaaaaagtggcggtggctgctgacgattttggtattggcagtaattagcggtggactttgctggtggcagcgagcccaggcagctcagcaattcgttcaatcaaagacgccgaccttctttttccatggctatggcagcagccgccatgctgaagaacacatggctaacgcggccaaacgagctggagcgaccaatacgattatctgggcaaatgtcgaccgtactggcaaggttaccttccatggtcagatcaaggccaacgccattaatccgattattgaagtcaactatgaaaacccgcgggaaaccaactatcatactgatggacagtgggctttcaacgttttgagcgcagctaagcaaaagtggggtttcaaaaagatgaatctggttggtcactcaatgggcaatatggacattatgtattgccttttggatcatcccaacagccaacagctgccgaaattgcaaaaacaagttgacattgccggacatttcaatggcttgaatggcgagaaccaggcatcatcaaagctggccgcggatggcaagccggccgtaaccaatcgtttctatcgtgagctgaccaagctgcgaacgacctatccaaccggcgtcaagatcttaaatatctatggtaatctgcaggatggctctaattctgatggcacggttcctaacaactcatccaaatcgctgcgctatctggtgtcgccagttgccaaatcgtatactgagcatgaaattaaaggtgcacgggctcagcacagtaaattacacagcaactcacaggttgattccctactgatcaactttttgtggaaaaaataatacagctcaaaacagtgtcagcttgttttcaagacggcactgtttttaattggtctagtttagtttaaaacgatgaatctgattagaaatccaacgaatgattaaaataaagataaaaaaggcccgttttttcttttttaagcaactaaaatcgatcaaaacttgtgattattcgtttgtccccaaaattggtttacatgttgggcagctggtgataaagtcttaaaccataaagagaaagcaaattggtttttgaaaggtgtgttaataatgagaaaagaacacgattcacttggtattcaaagcgtcccacaaagcgcctactatggcattcatactgtccgggctcgtggcaactttccagccgtcagcagcgtcaatgatcgggagctggtcaagaacttcctgcgcgttaagctggcctgtgcccgcgccaaccaaaaagcgggtcgttgggatgatgagcgtgttccattggcgattgtcaaagcctgccaggatctgttggcacactttgaggaatatgaagatgaatttgccatccctgcgatccaaggcggtgctggcacgagtaccaacatgaatgttaacgaagtcgttgccaaccgggcgattgagctgctgggtggccaaaaaggcgactatcagctggtcaaccccaacgatgacgtcaacaaatcacagtcaaccaatgatacctacccaaccgcgggccatctgaccatgattcagcttacggatcgtctgtcgctgacgctgaaaaaagtaattgcaacgcttaagcagctggctgaaaaataccaaaccacgcttaaaatggggcgtactcaattggaagatgcgattccaaccacgtttggccgctcgtttcatgcttatgcctcactgttggaacgcgacctcaaacgtctgaaagccgcccgtgatcagctgttgacggtgcctttgggcggaacggcgattggcaccagcttgactgctacgcatgagtatctcaaaaacgtaatctctgagctgcaaaatgctacgctgctgccggtaaaaggctgtgaagatctgattgacggcgtgcaaaacactgatgaatacattcagctttcgggtgcctacaagtcattggccgttgatctttctaaaatgtgcaacgacctgcgcctgttgggatcgggtccgcaaaacggcttgggcgaactaaacctgccacagcgtcaagccggctcttcaattatgccggggaaggtcaatccggtcatccctgaattcgtaacccagactgcctaccaggtgatcggtcatgacgcaaccatcaccatggctgccgaagccggacagctggaactcaacgcttttgagccggttatgttctttgatctgtttgatgatgcccgcctgttaaatggtgccctgcagacgcttaacgagaactgcttgatgggaattaccgtaaacgtggcgcgctgtcggcagatggttgaatcttccgcggaagctgcgactgccctttccccgcttttaggctatgaaaccgtcagccatctggttaaaaaggccttaaaagaacagcgtccgattcgtgaactggttggtgatcgtctaacaacggcagaattggatcaagccctggcgccgaccgcattctttgttaaataacgttgcttaatgaaaaacaggctcagcagcaatgctgggcctgtttttgtcgatcatgataggttgaaaatcgactgaacctcgcgcagcacgccatcatgatcgttatcataactggtgatgcggttggcaagctttaaaatatcgggactggcatttttcatggccacccccagaccggcttcctgcagcatttgccggtcatttgacgaatcgccaaaggctacgacactctttagctgatcatgatcgtcattgataatcagctcttttagtccggctgctttgttgacgcccaaaggtaagacgtccatacagccaaagccgctataggttgcataaaccggatagcgctcaatcatctgttgggcaaaaccgcggatctggtctggcgtgacttgatgattgagccagattggattaacgttatagatcttatcgtcaacctgagtcagatcgtcaatgaaatcgatattgatcccaaacggccaggcttttaggtcagaaatcctggtgccccaagtatgattccaacccgtcagcaaaattacgtcaggcgtgactggcaatgcgttgactgctttgatcagctcattgacttgtgacttggcgtgcgttctttcaaaaacgacctgccctttttggacgatcagcgcgccattgattgagataaacgtgtcaatcaatggacaaggcgcaaaacacttctttaaaaatcgatagctgtcaccactggccacgatccaagaaacgttttgctgctgcagctgacctaatgccatattcaaagcagcggaatttagatggtgccgactgtcaagcatggtgccatcgacgtcggttgcgatatagcggatacatggcgatcctcccttcaatcgattgaggacaacaatgatgattctgattaatagcgacgcttgcgcagacctaaaaagccaaagctcagcatccccatcagcatgcccataatcgtcatgcccaagccattgcgattgccggtctgtggcaggagccgttcaaaaattgatggctcagcagtcgtaatggcgttggacgtgcttaagagctgactgtcgccgtgcttagcctgactgacctttgttggctcactggttgccttgaccgtaacgtctttaaggctgctctgcttgtttgatttgctgttggacgtcttggtgctggaaccggtgctttgggaggatgacgtctgattagcatccttggcaacggcttcaatcgccattaacaggttggctttttccaacgcatcctgtgctttgttcaaggcatcgacagcatcgtttaattctttctctgcatcgctcagcctgtctttttgcgtttcgacgtctttattggcattggctaaagccgtctgtgtttcattgactttttgcagtgccgatggaatcagcccatagatatgtaaggctccatagttgtccatcgcgacgccaacgtattcagtattggtactcagcagcattcgggcatggctgttttgcgagtgagcatcgttaaacagcatatcccaaatcgagaccgtggcaacacgttttaaatcgcccatggtcttaatcagcgtggaagcaatgtttggattcttgtctgaaataataccaatattttcccagctggccttaaccttgtcgctggtgccattatactggtactcaacgttatcaaaaaccttatcaagatcatgagcgtccgtacgatcaatcagcggctcctgctcatctgctttggcagttttgtttttggcttcaattgctttgttttgagcaatgatttcctgtaacttgatactggtattccagttttggctattataggcataattaacgattgccaatgcctgggctagagtcatatcgttatagatccaagccgtcagcccaaacttagcccgaatctgattgatcaaagcagccacataatcgctgatctcgctttgctgagcctgcgtcagcttagtaggatcaagcgtcatgctttcatcatccagtgtcggcacgacggttaaagcatccttgagactaggatccatttcgtatttctgtgttgcttgattgaaatgccagttttcggtaacgttgacttcaccaatctgattcttaacgttggctgacgcatcagatgatggattgtcaaacatacttaaattggcatttttgatatcaatcgtactgccgtttaaagtggcggcctgttcagcactggatggcatttgtgattgagccaccgcactggcaatggcataattactctgtgcgacactggcggcactggccgcgctgctttgggccgctgtcgctgaatttactgctgccgaagctgaggccacggcggcagaagctgaatcgactttttgctgagcctgggaaacggcggcctgcgcgctggcaacggcacattgcgcatcggtagtcgaagttgcgacatttggattagtcgttgtaatttgtgcagtggaattgttgacggtatcggcatgagcttcctgccagccgccgccaaaaaacgccgcaccggcaatgactcctgccgttaagaccgattgttttaaatgttgattcttcatcttagattactcccttatcaaacaagttggtggtcaaaccaatctcaatatttactttaccgatttccacattttatgtcaaaccatgctcaaaacttagcaagaatctttctggcaaatctgatactatataatagtagaaacaaatagaaaagaggaaacacatggaagccgataagtatttgaaactgatcgatgaggaactgtcgcggctcccagattatgttaatgaatatcgccttggaaccaatcatgccattacgacgacctatcagtatctgactgagattcgtcggtttatggattggctgcgcaccagcggcctggttgatgccaagtcaaaccgagaaattccgacttcagttttggaacacctgcgtcgcgatgacatcatgctttatatcgatcatctgcgccatactaccaatgctcagggacgcgtcaattcaccgacctcaatcaatcgttcaatcaatgccctgcgcagtttgttcaagtttttgacgatcactgctgacaacaacgatggcgaaccctattttgagcgcaacgtcatgctcaagatcaattcgttaaatgataccaagaccttgaactatcgcgcccatgccctggctgcgcatatgtatcgcggtcagatgaagtttgattttattgattttattgaaaaccgttatccaaaagtatgcgacaagcgctcattgcccgcgtaccggcgtaataaagaacgcgacatcgcgattgttgccttgatcttggggacaggaatccgggtttctgagactgccaacgtcaacgttaatgatatcaactggcagcagcagatgttggacgttacccgtaaaggtggccaaaaagacagcgtgccgattgctccgtgggcagtcaaatacgtacaggactaccgtgatctgcgtgcccaacgttacggggcgaccaaaaaggaccaggccttctttttgacggtctatcaaggaaaaacgcggcggattactgccaatgccattgaacggatggttaaaaagtattcgacggcattcggccatcccttgaccccgcacaagctgcgtcacactttggcctcagagctgtatgacgtaaccaaggatcaggttttggtctctcagcaattgggacaaaaaggcacctcggctaccgatctctacacgcacgttgatcaaaaagagcaaaaggcagcgttaagagaaatcagcgagcaggcaaaccaagcgccgcaaaatgaataatcaagcttctgtctggcgatggctagacagaagctttttattagtgttgactttacataatattcaaaacgtaatattcaatcgagatgctttcagctggttcttgttttggaactgatgatggttatcccactgctctttataaattctgcaatcagattgctgccgtcttttatgatttcagctggccaagaaagttgccgattcacaagttaattgcgtttaaggcaactggctaaaatgcttacgaaacgctcattcgataattgccgctcagccacattcaaacgaccaacttacccacgcagattaatttcagtgcgtctgagagccaaattctgtatttacccggttttgggctgatttttagtgttaaaacgataattgtaagacacttttgataaaagaatcttacactaaactgccataaatgccgttaaatcaaggtttttaatcagcagaaaaacgcgtaagattgttatatgcttattttgaaaaaccggcttgttgatttttagctgttaatcaggcggctttaagatcagacagccggtcaactcagtataattaacgtctacaatattatgtaaacaaatatcggcttttaattttcatggctttcttgtatcattaaaaccattaatcaaacaaggatgtgagattttgaagaatatcgtgattattgcaactggtgggacgattgccggcagtggcgaagctggccggactactgaatatcgagcaggaacggtagcagtagctgatatcttaaagagcgtgccccaactaggaaaattggccaatattgaaatgatttctttaatgagcgttgattccaatgaaatggacgagcagaaatggctgcagctgcgcgaggttatcaatcagcaggccgctcgtgatgatgtagatggcatcgtggtcacgcatggtaccgatacgattgaagaaaccgcctattttctaaacttgacggtcaatactgccaagccagtcgttttgacgggagcaatgcggccggcaactgctaccagtgctgatggtcccttcaacatctaccaagccgttgcgctggcagcagatgatcagacctatgactgcggcgtggtctgcctgttttccagtacgatctactcggcgcgcgatattgccaagatcaacaactataaaatcgatgccttcagcagtctgaacgatcatgccgcgctgggatacatgcgtgacgctgaggtctttattaccagtcggccggtatcaaaacacacgattcactccaagttttcgcagcttgaatattcagcattgcctaaagttggcgtggcggtctattacgctggggccccggttgaggttttagaacgactaggacaagactgtgatggattggtagtaattggaactgggagcggcaactattcccaagcctggcgccagaaactggatgcgctggctgaacggggcgtggtcgtcgtgcgcagctcacgggtatcaaattcaatcgtttttgacgaaccgatttttgacccgcacgatcacttcattggggtcaataccctcacctcttataaagccagaattctgctgatgctttgtctgacccagactaacgacattgctgcgattcggcagaccttttttaaatactgaactgctaaaaagcgacccctatctacatttaggagtcgcttttaattttacagtttatatattatgttaaattatcgccaaccaataaatcagcactgctttcttaacggcgcttctcatctttgaggctgcgcagataagtcgcgtcttgtccaacctccagacagcccagataagtgccatcttcacgacgaacggcaatgtattccagatggataaaacgctcaccatgcagactaaaccaaaactcttcgcgatcactggtcccctcatgaaaactggtaagaattttcttaaccttaggctgggccttgggcggatggcagttgtagacggatcgcccaatcacgctcttggtccgcggaaagatgcgatcaggaatatctgaataccagcggacctgatcagccgcgtcgacaaaggtcagatcaactggaagcagcttaaagatcgcgatcaattctgccggactcagctgaccggttgccagatcgattctggcttgcggatcaactggcaagttagctgctggttcttgatgatttggctgagtgatttggttaacctgcgcgtcagtggcggccagttgtttggcgatttcattaaactgccggcccagtgcggagttggtgggcttgtttgccgcatcagcaagctcctgttcagtaggctgccaattgattggcggtgagatcagcgtgtagccgattgaattctcatctgctcgtacgcgggcccagtcagcaggcgtggcaacctcagcaagcattggcagcatgatgtcttcttctttaacgatcattgccaagacttcctgagtggctttttctacggctgcctcaatgacgtatttatcaggcaacggctgctggtcgaccagctggcaggcttttttgatatagccgcgaatgtcgtcgtcaacgccccacatgactttgggcggtgccgtaatgccatatttatccattagtggaaacaaggtattttcttttctggcataatgccgatcgatggtcatcagatcttttagggcctgctgcattcgcttgagatattcgttctcaccgccatcttgctgccactttttaagacagggcagcagttcatcattgattaaagagtcaatgatcttgttctccagtttcagtgtgtagacgggatgcccaggagtatcaaaagcagcggttggcttgcccggcgcgatggcatccttaaacagtgctacatgcacgttgcataatttttgaatctcacgtgggtccagaccattggcaatgagttctctttcggctgccgtaatctcagccacgtcaacgttggcaaattcttgatcaaataactgcttggcctgatcaaaattgccaccattgcttaaaaaagtcagaatcttgaccagctgctgctgacgctgatggagattatgcggttcagtcatggttaatcacctcatacccatgtcgtttaaaagtgtcgattacaaggtgcttatcaatattcatcgctagacagccccgattgatattgacgaaacggccaaccgtgtcaagcatcccaggaatcttgatcttatcaaagccggcttcgaccatgatagcgacaaaatcaggatcctgttgggccagatcgtgtactggccggctaaagtcaacggttttgatggtcatgcaggctacctccaattcctaactgacggcgtgctttgggcgacattctggcaatactccagactggataccagaccagctggacgtgggcatcgcgaataccaggcacgttttgagcggctttttcgatgtcattttgcaaaaagctgcttagcggacagccgggcgtcgttaaactcatcttaatgcaacaacagctctgctcatcgacttcaacttcatatatcagacctagatcaacaatgctgacgttaagctcaggatcgattacagtagtgagtgcgtcccatacttgttgttcaactggagtcatctcatccctcctaatccatttctctgcgctttattttagcatggttatctggttttcttattaatttttttgttgctcaaaatcaacattgatcgaacgctcgctgaaaatcagcttatttttttgctatcgtcgcctgttcgacactgccttatttaaaactaaaaagctggttggaagatcaagtgatttggcactatatcctgtcaagtatacaaggtaaatagataaaattgattatgcggcttgattgctgtaaagctcaaacagttttcaaatttcagctgggtcgtcattgccaaatagcccagagtccagttgtgttcctgctctaacttaagaatcgtttcaagaagtttcgactgttcgtcttgatagcgactggcttttcttttgagccatttatagtatccatctcttgtcattccagcgatttcacataactgacggattggccagccgaattcttcatttagttctttgaatgcttgctgccaaagcgtttgttcaccccccgattgcgtatttcgtttaattttttgcgaaggcgatctccatttagaaaagccctccgagtaactagatgaattttctaattcacctgtatactcagagggcattatagccatctacatttaggagtcgctttttaattttacagtttatatattatgttaaatcatttctgatcaatcactaatgatcattctattcttgatgatgctttttaaaaatcaaatatcttactgtggtgtgttaacgccgatactgtccttagaatacaaggcgtcatcgtcaaccagcttcatgacaatgtcagcaattgaacttattgaaacatcatggccgccaaattgctcacccttccgcgtaatttggtagttgacaggaccaccagtaaaccaaccaggacgtacaatagtgtagtttagatcagaatcttcaattacgttagccgcgtcacgatagctctgcagtactgggtttgaacttagattgccacttgcaccaactgatgctgggatttcattgtagattcccatcgaagtaatgaacacaagccgcgaaacattattgcgatccattgcggctacaatcttctctgcataagcttttaagttaccgctcaaagcggcgaatacggcattctgaccagccatggctttatctagatcagcatcattcatcacgttcccgctgatcactttttcgcgattgtcatcaacgattcggatacggttagtagaacgagcaaacagggtcagcttgttatctgttccatctaaaattgcttgtcgggctgcactgccaagcgttccagttgctccaataattaacacattcttcatagtctttcacctcaaaattaatacgtactcgcaatctggttagcaataatccactttccattactcttagtaaattccattttcatctgcagcggccaggttgcgacttggctcccccacacgctggccatcactttattttggccaacgaggctggcagaattaccttcaattacaatctccttgatgttttcttcaatggatgagaaatacttcatctcaccgttttgaatctggtcaatccactccagctttggttgcatgtaacctgtcatgtgctggagttgcattgatggtgccaagatctcgtttaatttaacaatgtccttatcaaccattgcctgattttcctggcgataaagctcaataattgcttctttgtcagtcattgtcttgatcctccatttctacagccgcatcgttaacacatcgcaatgcattcaaactgcggggatagccaatgtaggggatgttctgggaaataacgttaattaaaaattgcttttcattcccatttaacatgttggccttagcatgtgaaatcagctgcggttcgacaccaccctgcgcagcaaggaaacagaaggtaatcagttcccgttctgcataggtgagaccttttcgagtgtagtagtcaccgaaacaattatcagtcaaccaatagcagatgtggcgactttctactgggccagactcccagaaccctttcataccattaccaaagatatcaacctgtgcctgttcaccagccgctagccgattctcagtcgtggtcgttgcctgtgacctcagaggcaattttattccctgcttttcaaaaacttcattagtttccctcaagaaaggaaagacacgaccaattcccatataggcgaccgcttgataaacaatctctttgatttcaaccggcttaactccaaagttcatagccgctgggagaattgccttgaactcttctttaccttgacaaccaatcaatgttgccaggatcgtaataaaccgagttcggtcatccatgttatcatggttaactacctcatcgaatgcaaagttatcaaatcgttcaatgaattcgggatcagttcgcataaagtcagatttatatcctggaaacatcttttcatgatattttctagcattttcgctaattgccattgtgctgctcctttgttgattttctatattctagtggcgaaaccgactggaaatgattggctatacttatcaattacgaattgaaaagatagaagaattctcccgtctttaattatgttccttagttaattcttgaagtcagtcgatgctgccaaatcagtctgattcttgtattcgttcagacgatcggtcaaacgatcaatcgtagcctgcaatgcttgtgatcccaggacaacgtgaagcggtgccggcttctggtcagccgtttcgataatccggctggccattttatcagggtcaccaggagccaagccattagctggatcaagcatcttcaagaatgaatgcgctggggtgttatcgtattccgacatcagcttggcaatgtgagcgctgccgtaacgaaattcagtgcgggcaccacctggttcaataattgaaacaccgatattgaatggaacaacttcttgtgcaacagattcgcaaaagccctcaattccaaacttggcagcgtggtagagagagttccctggataagcaacctgtccaccatatgaagaaatctggatgattcggccaccaccctgtttcctcatatggggaataactgcccgaatcatctgaattgaaccagtcagattcgttgccaggattaggttaatgtccttatcgctcagttcttccgctgcaccaaagagcccgtaaccggcattgttgatcaaaacatcgatctttccgtgcttcttgacagtactgttgacaacttgtcgaatttcatcaacattcgtcacatcgagatggtaaacatccagcgtatcaggatattgcttggtcagtgccctgatatcatccttttccgtccgaaccgttccgatgaccgtgtcgcccttagccaggagttgctcggtcaatgctttaccaaaaccgctactgattccagtaattagccatgtctgcctcattttatttctcctttgatttgtaattttaatgtgtatcatttcaacgttttttattatcaacttttatcaagtaagaaacaattccggtttccaatcgattggataagtaaaacttatgcaaaataaaaaagaagccgaaaattatctcagcttcttttattttgcaaactgctcttctaggagagcagcaaactcttcaatgtagtaaccagaattatcttttttccagtaggcatagtatttctggtgcaatggaacatctccattatataaaggtacgacttttgttacctcttgattaatcaagctgattgtccgtctattagcaatcagatagccctggttagatgccaccatcagctgggcttcatcctctgttctagtggcaataaatggactctgaattcctaacacatcccgataataggcttcttcttccgcttcctgggttgaaccggcaacaataatgcatggcatgtcagcgaggtcttttgccgtaaccttatctgccgttgtaaagttttgcggcacaaccgccataaaatcagtctccgtgagcaacttgttattgtatccggcggacagggcccgtcgctgatcagaaaagtcgaggtcgatcttgtcattacgcagcagattaaaaagatattcgtgcatcccgctattgatcttcaccctaacgttgggatacttcttcgaaaattgggctacggcctgtaaaaattccttggaaccaaaattaattaggtagcctaggcgcaggacgtactcatctgcgcgttgtgccgctacccgtttggtacctgcaaatagttggtcgatttctttaataatctcttgggcatgataatagaaatattcaccggccgcggttaatttaaaggtgcgacctctgcgtgcaagcaactcaactccgaccgtattttccaattccttgatttgttgggaaatggcggattgtgaaatattgcactccgcggcagcgcgggtaaaactatgttggtccacaaccgcaataaaatacttcatctgttggtacatattgacagctcactttcaatgcttagcctagtttagggccttataaaaatttgtttactcatatttataattctacacaagctgctgccatttctccaacaatgatattatctcaacttcacggacaagcaatttccaaatcggctcttggtttgattaatgactatttaggcgccaggtaccgccaaaaagatcggaagccaactcattggcactgagattaccgttgttttcctcaaatccgcggaatggccgcaacgcttgaattgcaccgtcttgatatttgcgtgcttggtgcagcgcatagtcaaccaaggaattatttttgattttttcgaccagctgaccgcttggcgttgtttcgggatggttgattcggtactccagatcatccaggatttcttgatactcgggtccggcctgaatctgattgacgaacagctgcaaatgacgaatcaaagccttggcagttggtgcatactcgcacggcgcggtcgggtcctccaaggccacgtgctcattcatctcatcagcacgggcaatcacgcgaccagcctcgctctcctttaatgatgggctcataatgaagtagccagccaacaggcgaataaagcgcaaagttcccgttcgaatccccacagaactggtcggatccagatccagcatgcgcagttcgatgtagtcaacgccttctttgaccatcttgtttaaatcgctgttgcccttaaagcgaacctgtccatgaaattcggccgctgactgcagcttgccagccttaaccgcgttcatgacctttttagcatagttttcaaccgaggagtagtcgccggggaatttattctcaaaaccatacttttgactctgacgaatgctgcggacggggcgttttaacggctgctcgccattttcaaaaaagttggcctcagcaatcggactagcgccaaataaataagtcaaaaaccagcgatagcgcataaagccttggacgatgatctggtaaagatagttctgggcagcgaccttgttttcaaaacgctgcggcagctgttgatagaccagctccaccaaatcatcattaatgctcatgttgatatgcgcgccagatggagccccttctgaaatgctgtggtgcttgagccattctttaaagtaggcttctttttcgggaccagcatgcgcgatttgaatcttggcacgatccttaggtaaaatcggcggcatcgataatggccagagcaattcgcctggtgccagcgcggttcttaaaacagtgttgatgctgtacagataatgcattgcatcggtagcattgtcagccggtggcgttacaatctctgacatggtttccaaaaaatcattggtgatccatggattgaccttttcatcgccaatcgtgtcgggatatggctcttgactcagatgaccggtttcatccacccgctgcatctcgatctccagtcccatcttaaagtcggatgcctctaaaacggcctcattgtcaaatataatctgtccaatcttgctaaacattggctcgcctcccagtgtttattaactaaatttggtttattataacgaaaatctcatctttttcaaactatgtaatggttttctttaataaatttaacattaacg

SEQ ID NO: 1894 - DNA, 4305 bp, Unknown
  gut microbiota DNA sequence
ttgtagaatcatttccgataaatcccagtaggcaattggattgtgcaaaccttagcaaatatttcttcaacttttaccgctttctggtataatagtttctgtaaatgatgtaattaagtttttaaggagtgtgacaacacaatgtcagatcaaaaagcgcaaattggtgttgttggtttggccgttatgggcaagaacctggcactgaacattgaaagccgcggctttactgttggtgtatacaaccgtagtcgttcacgtaccgatgaaatgatgcgtgaccacagcgacaagaagctgattcctagctacacggttgaagaattcgtcaactctctggaaaagcctcgtcggatcctgatgatggttaaggccggcaagccaactgacgctgttattgaagaactcctgccattgctggacaaaggtgacgtgctgatcgacggtggtaacaccaacttccacgacacgatggcacggaacgctaagctggacgaatccggcatcaacttcatcggcatgggtgtttccggtggtgaactgggtgccctgcaaggtccttccctgatgcctggtggccaaaaggaagcctacgacctggttgaacctatcctgacgcaaattgctgccaaggctgaagacggcaaaccatgtgtttcctacatcggtcctaacggtgccggccactacgtaaagatggttcacaacggtatcgaatacggtgacgaagaactgatcgacgaaagctacaacattatgcgtaatgttctgggtctttccgttgacgaaatggctgacatctttgctgaatggaacaagggtgaactggacagctacctggttgaaatcacggctgacattctgactcgcaaggacgacctgggtgaagacaagtccaagccaatcgttgacatgatccttgaccgtggtgccaacaagggtactggtaagtggagttctgaaactgcccttgacggtggtgctccacaatccgttattacggaagccgtttacgctcgttacatctccatgctgaaggacgaacgtgttgctgcaagcaaggttctgccagaagacgttgaaaagccaactgtttctgaagaccaaaagaaggaactggttgaaaaggttcgtgaagccctctacttcggtaaggttatgagctacgcacaaggcttcgaacaaatgcggatcgactccgaacgctacgactggaacctgaagttcggtgaactggctcaaatctggcgtgaaggatgcattattcgtgctcaattcctgcaaaagatcacggatgcctttgaaaaggatcctgaactgaagaacctgctgctggacgactacttcaaggacattgccaagaagtaccaaaaggctacgcgtgaagtcgtatccatggccatcaacgctggtattcctgtaccatccctggctgctgccatcaactactacgactcctaccgtgctgaagttctgcctgccaacctgttgcaagcacaacgtgactacttcggtgctcacacgtacgaacgtgttgaccgcccaggcaacttccactacagctggtacgttgaacaataaaaatcaattagacttgatttcaaagcgtcgatccttagtgttcggcgcttttttatactattatcgtaatctaagaactcaaaaagcgtcccgcagctggcaggacgctttatttattattcggttaacagtgcttgggaagttgaacgctggaggtgacgataccagtgatcacctatcatgatctgacccgcgtcatcaaatcccaagcgacgatacagccgttctgccttggggttagcgacatcgacatttaagccgatcgtctcgtattccaaggaagcagcatgttttataatcgcatcaatcagagccgttgcaatccccattccgcgataatcagcatcaaccgccaatgagtctaggtaaaactcattggcaaatgattcggggtccgcgaagaaatcgacatcgcgaatcgacggaattggcgctgcagcttcttgatatactcggttgaccgcattttcgttgttgtctggatagccaaacgctacccccacgacctgcccatcagcctcagcaacaaacgtggttgccacatagccaagtaaggctcggtcgcggtaagcattataaatcatcctctgggggtcttcgtcgggaaccgactcaaattcctccagttccatttcatcataaatcaaagacattaacggtactatctggccggcgtcttcaggctcggccttgcgaatcgtataaataaatatccctccaaatttgtttgatgcaagctcattatatgggaaaagccaactttttggcaaggaaagattaaaaatttataagtattttaagagggaatatcatatactatcaaaaatcatcaaaacgctgatattatgggcttttaataactacccaaatcatcaaatgatgtaataatttatcaaaaatttcccctttttccccttcagtattccttatgaagaaaattgaagagatcacggccaaacttggcagtttattaggaaaaattttaattgatggatcaaactgtcgggcacggccgttaccttcatttcaggtaacggtttttttgtccttgctgatcaacgaatatcattgatcagctgcaatcagtatagcatattcgctaatggttgcaggacgaaaacgacaacttttttgcagaaatgatgaaatcatctcgcgcaaattgttgtcgttagcgaggctagtaattgacttgaagagtcaattaggccgagctttttgatcaaactttttgttaaaaagtttgtctaaggggtcaaggggagcgaagcagtccctttgcaagcattctttgtggctatatgtaatatagtctacaaaagagggtgcttgccttcaatatagtgttctttattgacaagcgagcggttagcgaagcttggagattaagaacactagcacaagaacgcgattgaataatgagcgttaaggtgcttcgttcttgccagcagcatgagcgaaaagcgagtgctgagggcttagaacgctaagcaggaacgcgattgcgtaatgagcgttcaggcgtcgtattcttttaaatcaatagataattagaagtgttatgatcccgaataaagagattctagcgtcaaagtttcgtcataatttcagttgaataaaaaaaaacgctagaaatcaacgttttcagcaacgtaatttctaacattttttgttttgagactgtttctcagcctcttatgttctgtcatcatttaaatgataaatattttgatactataaagttgaacactattgcaaagatctggattatgcatatccaaaataaattattcaatctataacctgtcaaataattaatacctataatagaatccaaagcataagccaacgtatttaatttaaacacagcgataaaaaaagcatagtacttttctattgctaaaaaggtaattaacatatcagcaaacataacaactattcgtccgctaaaaaatgtaattagctggtaaactagagattttgatttttgtttagtaaaaacaaatctcctatttacataaaaagcaaagaaaatagtcaaaatttcagtgattgttgctgaaagaacaggtattacaaatgtatctaataataatctgacgacaaaataaaatactgttgttacaattccccagaataaatactttatcttttcattcttgataagcttaagtacaggtttatttactgacaagatctaaataccatgaaaccattgccaacctgcgccccagtaatgcttcattacttttttagaagaagcactaacatagttagcgttttgtccagcattaagttgcactaatgggacaactgcaaaaacagcaaccataacggcaacaatgcaagccttactcattttattcagtttcaagattactcacctccttaattccgaaagtataccacataatgactaaaataattattaaaagtcctatttttaacaaatgactacaattgtgtacttttaaaaagttagaaaagtttttcctccgttccaaaatctgtttctgaaatatctttcctattattccattcatcaacagatggaatatttttagacttcaaatggggcttctctgttttttctggtacgtcatttttcttttttggtagaacaataatatcatagtcatgcaatacgtcctttaagctgtctaaatttgtcttttccaacagcatcttgcggactttttcgccataaatttccttgtcatgctt

SEQ ID NO: 1895 - DNA, 9638 bp, Unknown
  gut microbiota DNA sequence
gcgcgcgtaactgatggtcagcggcctggtccatactcctaccattcactggggaccgtggcttcaatgggcaatacgcatgcttttggcgttgcgatggggatgaagtactatggctacccagcttcggtaatcaagaagatgattgccaacaaatcgctgattgaaactggcggggttaaggaactgcttgccaagggccggtttgatctgtatcactagtcataaataaatctgacagcggaaaaacgcgctagctcaggtcttaggacttggggtagcgcgttttaattaacgattaaaaagtaaaagggccgctgcagagtgccctgtaaggttatcggcagctagctatcttagccgtgctgcttaatgcgtcaatcatggctaatatgcaaaaaaacctgcataaaacatatgacaaaaccatcattacctacttttcggaaaaaacgatgtataagtaggtaaaagtcagtgtagttcgccagaccccaatttgcttcacgaagccagcgtgtttatgggtgattacccgatagattgttttttccaagtccagggaggttcgtgaggctggtggaatacgtgctgtgatgggttacgggatcaacggactgtatctatcagtaggctgcaggatggctgttgatttgtgatttccgcggaaaatgatgctaaccatggcgttggctggtttgaagggtttaaaattagcaaacccattaaaaactaaaatgccttgccgccaggattgagcgacagggcattttacgctcctaagcttggtcgcatgagtctgcttcgtgtgatgaaggggacttttgttggtcattcagccaattagccagatatttctgcaaagcttgggcatcggcttgattgagtgaaaaagttgcgtcatgcggctcgttattaaagccatggttgctcaaaagcaggtttaagcggtgctcatcattagcaggctgcagactcaattcgttagcacagccgtcatcacgttcttcaccttgataaaaaagatgcagccattgaccatctgtattgatttgatgcaagaggattatcctttctagaaataagttcgcgaagtcagcgctcccggtttcaaacttgacctagcgcagccggcagtgatcgtcaatgaaattaccgcgatgcagactggtcagcatgtcactgtcaacataacgagtcagtggactgttgtcattaagatactgatcattcaaagctgccatcgcaagcagctgacgttccagtttggccagattgatgatgaaaggctgctcgtattcgcgttcgccggtttcgcgactggccagcagttcttggagatagcgctgttcgagaccggttaatggacgcttggccttaaatttagcaaattgatcaagctgcgacagtgagtagagtcgatttcgcattccagaggcgggcatggttgcttgatcggggttggccgccacgaacatggaatgaatgacgggttgcgcgttcattaaaatctggcgtgcgttggcatcctcaaataacaggcgtgagaccgcatgctcgtggttgctgagctgctcagcggcatttttaatctgttcacagtagccgttggggtaggcaatgatgaaatcgccatccttggtcagctgcagcgccaggccttgatagtttttaacctctggaatcaagaccccgttacgagtgatcaatataatgtcaatctggttaacggcagcggtattttgctttttgtagtagtcaaaaggcaggttgagcgagtccaacagttcttcatgaggataaagctcctgcagcagttgatagacgcggcgctccccgatatctccctgcaaaagctgcgtggcgcgctcatgcagctgaatgattcctttaaggtttttagagagcatggccagttcatgtggggagcgatccgtaccatggctgtaccaagaataggttttggccatctcataagctaaaaagcgcaggccggggaatggatcttggaaaaaggcgttcttctgggcgtcagaaaagttttgccgggcctgggtcgcaatctcatcatgatccgcgaccatactgagatgccgatcccactgctgcagctgctctaagtaggcggcattgctgatcggcttggttgtgagcagatttgaccagttcaacggttgcgctgccgttgaccaattaactgggcgtttgaagctaaaccatgatttaaaaggcgatcgttttgatttagctcgtggcctggatgagaaatcagcatcatgggaggcctttgaatcatctttaggcggcacgctggtttgatcttgaagctttgccgctggatttgtcggtatttcagtgttgccaagattcggttggcttttgtgatcgtattgagcggcatcgcgttttgattttgagttgccaagctcgagttgaacagtattctgcttcgattctggggtgccaagatcgtgctgaagattattttgcgctggatttaaaccgatagcttcagtctgcgatgaaatgtcttgctgttcagtagcgctgtcgccgtttgtggccacgaaaccttgttcagtaaagtgggcagagtcattttcatttgaaacagcatcgcgagaatttggctcagataccagcactggccgagattgatctttctttactgttttatgatcatttggcagtgattcagcagattcatgatcatctggcaatggttgagcagccactgccggtttatgctcgtctggtatcgattgaccatgctcatttggcgctgattgagcgattattgttggttgatgaacatttgacgtcgatggagcaattgtttctggttcatgctcagatgtggcatccggctggtgagtagctttttgacgaggcggatgttttcggctgatcccaagccagtccttaaagatcaaaagcagaatgccgccaatcagaatgctgattagatagcgcagcaagggcctgcctcctttcgattttgaatcctgcctttattttatcataactaataaaagcatccccttgattgatcaagcggatgctaaacaaaactacttattcgtatcggcggtctccggatggcgcttttgccaccaccaatagccgagataacaaattaaaacaaacggcagcgtccaatacaacgcgattcgctgctgaggatcaaaccagatcaaaagacacgataaaccgcttgagattaaagcaaataagggaacaaacggatagccgggcgtgcggtacaaaagctcatcgatttgatgtccctgtgctaggaatgcctttctgaaatttagctgcgccagggcgattgccatccagacaaaaacaacggccaatccagaaattgaaacaagcaccaagtagacggtatcagcggcgatcacgctggaaagcagagccaagataccgcccagcatgctgaatgccaaggctaccgtggggatgctgcgccggttggttttagtaaagaatttcggcagcattccttcattactaagcgaccacagcattcgagtcgaggcataaagaccggaattagccgcagaaataatagccgataagacaacaaaattcataatgtcaccggcaaatggaatgcccatcatcttaaagacatagacgaatggactttgagtaacgccagctttttggtatggaatcaaggcggccattacgatcatggaaccaatgaaaaagattataagacgccaaagggtagtgtggatggccttgggtagtgctttttcaggctgtttggcttcaccggccgttaccccgatcagttcagtgccagaaaaagcgaagtttaccgtcagcatggttgtgaagacaccgccaaagccagttggaaataagccatccttgacgaaattctgcaatcctggagcatgcgaatagcccttgagcggaatcacgccaataattgccagcgatcccaagacgataaaagcaattattgcaaacaccttgattgcggccagccaaaactcgctttccgcaaaaatccgtaccgaataaatattgcttatcacaatgccaatcataaacaataggctccagatccagactggcgtatgtgggaaccaattgcgcatgatcagtccagcagctgtaaattcagaacctagcgcaatcgtccaagtcagccaataaagaatggcgacgacaaagccggttgctgggttgatatagcgcttggcatacacgtgaaacgaaccggtataaggcattgctaccgaaagctcgcccagacaaagcatgacgctgtagacgatcagtgcgccaacgaaataggccagcactgttcctaaagggcctgcttgatggatcgtatagccagagctcaagaaaagcccggtaccaattacgccgcccaatgagatcatctggatatgacgcgattccattttacgtgctaagtgttcagtttgtttggcaattgccattttttcacttcccaagctaaaataattgtcaatattaattggttagaatatcattagaaaataataacacaaaagggtgaaagcaatggtaaaaaaatcaattttctcaaatccgttggtaattgatggctcaatgagtactagtcttgagcggctgggctgtgatacggacaatgagttgtggacagccgcggctttgattaaccagccagaactcgtttatcaagtacacaaagagtattttgaagctggggcgcggttggcgattactgatacctaccaagccaatcttccagcacttaaaaaagcgggactgactgaaaaacaagctcgacaagttattgaaaaggccgttgaattagccaagcaggcacgagatgattacgaaacagaaacgggagcgcacgggtatgtggctggctcgcttggaccttatggcgcttatctggcaaatgggagcgaatatcgtggcgattatgaattaacgtcggctgagtatcaagaattctaccgtcctcgtttggaagcaatcgtcaatgctggcgtagactgtctggcattggagacgcaaccgaaattgagtgaggttaaagcggttttggatctgttaaaaaatgagtatcctgaccaaaaagtatatgtttcctttactttgcaaaatgccgagaccatcagtgaggggactaaactggccgatgctgccaaagccgttgcgcagtatgatcaggtaattggcgttggggtcaactgtattccgccgcgcctggtaacgccagcgattaagaaactaaaagaagctacggcactgccaataatcgtctatccaaattcgggagcaagctatgatgcaacgactaaaacctggtcagcagcacctgccgaagatgattttggcaaactgacgaaagagtggctgctcgccggggccagcgcgattggtggctgctgtacgactacgcccgctgatattgcgaagattgcggcagttttaaatgatcaataatattaataaaaacagcgtcatcgcgaggggaaaaagcccaggcatgacgctgttttatgctagccaaaaatctcttgcgcttagttgtggataaatcggcttatttaaggttagaataaatgttctttaattgattgctgactaattgaactaagcagccgttttatttattttcgtggtgatcttcccagaccttgcgcagcattgggtaccgcagatcaccagtttgagctacctgatagtcggccgcactcaaaagttctgcatcgccaataccaattgagatcaggtgagcctgattgatagcatcaatatcagctggagtggtagccagagcaatgcattcgtttggcactgccgatagctgttgggcaaaggcggagtagggatcgccctcattagggatgatggcggtgaagtagtcggcaatctgcagctgttttaaaatgagttcggcatgaccaccattatcaacgacccccatgttgacgtagtgatcgtccaggttgatcaaaagacgttcgatcccaggcattactgaagattcatccagcgagtccagcgctttttgatacatctgttcttgttcagaaagcaaggcggcctgttctgcttcatcggccgtttggtgcagctggttcaaaacaattggcaaagctgcggcggcactgaggtttttgagctgcggggccagtttgccaggtaatcccagcccatactcatacattgccagttcgcgccaagcgtcaaactgctgctgatttgtgtcgacgattagattgttgacgttaaaaattgcacccttcataaaaatattcctttcaataaatacgataattttattttaacccaaagcttggaaaatgaaaacgccaccataacataaggggattcatttccttaatttagccagttgatcaaaaaatattttaaagcctaaaaataaaaatgacgccaactccaaacacttatcgtctggatgcagcgtcatgcttataattaatgggttattgctatttgctggagagggctgggtgaacggctttttcaactggtgaggcaatcaaaagcgcgattaccgagccgacaattccttgaatcaggtttgggaagataccggctgcaccagttgcccaggtataaagaattgcatctgagaagaagtagcctactaccatcacaatcgttcccgcggctacaccggcaatacggccccatttgccacgaacgtatttaaagaccaatccggcaacgatcccttccagaccgtgtgagatgaacgaaaatggtgcatattgggcaaagccagaaatcaagtccagaaacatggcgccaaagccaccgataaagccacccgcccatggtcccaacagcatggcaccgataaagatgccgacatcgcagagattgatgttgccatgtgtccaaggtagcggaattaagaagaaacgaccaaagatcaaagtcagcgccgtcaaaagcgccgtgaataccaaatgtctaaccgttgcagattttttcattaaaatcactcctcttatgcttgcttacatagtgaatcaaatgatcgagacgcagaccaaatcgccgctcgttgtcagggaggggagcggtctgctggattgcgatctccatggcatccgtcgcgttctcaactgctgtttccaacgaccagccttgcagtagccgaccgtaaagcagtgccgagaagatatcaccggtaccatagaaatgaccggactgaacgtcattgccgaaaaaattcagtggctgcttatgataacaatcgctgttgctttgcagactctggtgtgaatcggaaccattcagaagattctcaggccggttttgctgttggcgccaatcaaattcggtttgttgatcttgacgccagcagcagccaatctgttcattcaaatgaacaccggtgacgatgaccgtggcattgatttccgctgcctttagctgatctatcccttgaattaatgtctcagcagttggtagcgaatatggcagaccagccaagaagcaaagctcagtccagttaggcgtaatcagatcagcgtgacggcatagttttttgaccgcctcgacataatcgtgatcaaatccaggatatagtcggccttgatcacccatcaccggatcgacaatttttaagcagtcagtcaggttttgctgttcaagccagctgcctagctgttcggcgagggtgcattgaccaaggtagccaattaaaacgccgctaggttcaatgtcttgtgcctgccaatgtctaagcgaagcctgaatccattgctcggtgtctaaaacggcaggctggccgaatccctccgtttgactggataaaatggttgcgggcagggatgcggttgtaattcccattgcctgcaagacgcttagggcaccaatcaatgagatttgacctaatgccgaaaaatcctcaatcaacagggcgggcttgatcatatcaacaatcctctctaatcattttttaatttgatgatcttactatacggcggctgtcacttactgacaagacgtagccagatattagtctaaattgtattgatacaattattgagctaacgatgattataaaatctgcttgacgatttaaataaaacgcggtagtatttacaactgttggtaatattaattactgatttaatttcgggaaatagctcagcttggtagagcacctggtttgggaccagggggtcgcaggttcgaatcctgttttcccgacttgataaaaattccttgctcagatttgagtagggatttttttgagctttattgattataaaaaatgatgctgtgatgtacgattgaaatttatggattttagaagcggtacctcgatgtggatctggttatcgcattaaattttataagctgccgaaacatttgccttagccgctatcgagtcagaacactggtcatagcattaaactttattggctgacgaaacagtcttctgatgtgcgtctggtcagagctcgctgtgttgcatggcaaaagattggtacgcttttttctactccaagttaagtgttatcaatgattttaaataatatacgtacctagttggaaaatagctgccatagaattggatcaaatatctgatttcggtggtggatcttggtatcaatcagtcagaaaagctgatccaagccgatcgatcatgatcaatgtaatgaatgactggactcatcgattgtcagaatttaatgatcgtcatggtccggaaaaaatcaaaaataatgctggcagcttgaagcactcgtaaaatttcaaattcagccagcttccatcgcactaacaacattctttggtggtattaagtttttggcaggggatttaactatactgatgatcatcaatggggtcggatccagcagcatctctgcgcacagctacagttgaaaatgagcctggatgcaaccgtgtttcgttaatgagaactgtctggaacagattttgcaaaatatgaaaatgtttgcaataataaaaaacatgcatgaaccaccaaatgcgtttaattattgattaaattaaataaaaaataatttattaatcgtgtcagatggaggggtgagtctggcagcgattgttaaagtggggataacaatgcttacgtatgagttgatggtttaccattgttcaaagagctactgtgcagttttgccgccagagcttaaaatgctggaaagccactatcagcagcaggtgtgtttttctgatggtctgccaggcgagctgttaagcggaacggagcgcgataacgttatttttcgggggcgcgtggtcttggaacaagtattgaactgcgcacgctttgacgactttgagctgccggagccgattaagtggtcggaatgccgcaatgcgcagtctcaggtcgaattcataccggtcgcttacctgcagaaaggaacgattcagatttatgaaggccgtcacgttcggttttatcataacagcttaaaatcgccgctggtcaattggcaagggcagggcattaagccggttgagaggccatgtcacgttgctgttgttggaaatgcgtttttcgggctctgccatgactggacagcctaatgtgtttagcggcggctgatttacgtgtcaagacggttctagatgattgatactgaagcaaa

SEQ ID NO: 1896 - DNA, 13239 bp, Unknown
  gut microbiota DNA sequence
tcaatgttgaccagcaaatattcaatcaattaagtcgcttacgggcggctttttatagttggcattggctgctggcttcagttagactaaaagagtaattaaatagaacaaaggaatgaaaactaatgcaagccaatgatgttcaatggaatgcccaatatgacgtggttgtcgtgggctttggcggtgctggtgctacggcagctcggtttgcggctgacgcaggagcatacgtcttattggttgatacggcacccctgggaagagaaggcggcaatacgcgctatgcctcacagcacgttgcaatgggcaaaggaatcggccagctgaccaagtactatcagcagctcaatgacgattatatggtaccggctaagctgatgcagacatatctgcgcggactggtaaatatgccggactattttgaaaagtacctgggcgttaaggcagttagctggaaagacgacatccgcctaggcgatccagtcgttcccaagcactcgctggctgagtatccagaactggccgacagcgagtcagtcgacattgccctggttcaccgacgcgataaggatgcggcgctatggaagatactgcggcaaaacgtggttgagcgcgcggaccggatcgatgtctggctcaacacgcgggcacggcatttgtaccaggatgaacgaaccggcgtggtaaagggcgttcagttgcgtcggcgcggtaaggattatcggattgccgttaagaatggtctgattttggcaacgggcggttttgaaaacaatcgggaaatgattcaaaactatctgcaaaaaccggcgctaatgccaatgggaacactgtttaaccgtggcgatggcattaaaatggcccaagaagttcaggctaagctttggcacatgggaaactacgaaagctatggcacgctggccggactgacgtttgctgaagagggaacgcagcatcggggccgggtaattcaaagctggtcgcagttgaatcatggcagtatttttgtgattggcgatgatgggacgcgcttttttgcggaaaatcagcctgcacgtcatggtcatctatattcacatggtcactgggttctgccgcactatcaaaaacatccttatctggtatttgaccaggcgcagtacgaggtttttgctcagcaggaaaaagatgagcggcgcctgccctatccaaagtttatgcaaaagctgctcagcgcggattcattgccagaactggctaaacagctgcacgtgccggcaatcagtctgacgcagacggttactgacttcaatcattttaaagagattggccgtgactatcagaccggtcgcgatacggataccatgcgtaagttcggggcggggccatactatgcaattaaattggccagcaacgtgttgaatacacagggcggaccacagcatgatgaaaaagcgcgcgtcttaaacgttgatgaccagccgatcccgcatttatacagcgccggtgaattgggcggaattgccgctaactattatcagagtggcggtaatctggctgagtgtctgatttttggcaagatcgcgggcgaaaatgcagccaagccaaaaaaggatgccgtcaacgttgcgcgactgcataatgcggttacggtgcatattaatgatctgctggatctgtcggcgcagcattatatggtagggacggatcagtatctgggcgtttcggatgatggcatgggtggccgaatcgttgtccgtgtaacctatcaaaatcaaaagctgcgtcaagttgagattttggagaatcatgaaaacgaagagatcggtcaggcggcttttgatcagcttgccaaaaacatgatcagtgccaatacgccagccgttgacgccatctcgggagcaacgacgaccagccgcgcgctgagtgaagcagttgctgatgcactgagcaaagtcaaatcaaagtaataaaaaaccgtcaccgaattttgcgttcgatgacggtttttttagttgtctgcaggctcgtggatgtaatgtggattaaatttttaatgattagagtgaacaagagtcagtcataagagatgagcctgccaaacaaggatgatcagacgtgaagccttaaagtggatttaaagggattgagagtccggcactggggattggcataccagtaccggcagcttcacgattttgaggaaagacgaaggatcgccttgaggttaaatgaacatctgaccattgaagttggcgtactacaacggtcgaaggaagggtcggtcaaacgttggcggcagatcgatggattgacggtgacagtcatcagcaaacttggcgtagttaggggatggctatcgtcgactgcctgcacgaacggtttcacgataaaacaagttatgaaagaaaagcaggattgaaaacactttccttacgacccataaatataatagtataacggtttactaagtgcaagcctttttcggaaatttctgaataaaaaatcaaaaaaagcttaaaaagtctgttttaataacacttggaaatttatcgaaaagaacgctcagtaaggttgaatcggcgtaaaataaagacagctaaactagaaaggacgtgttgtcaatgaaatgtccacactgcaaaactccgcttaaggctcacgaaaaaatctgtgcaaaatgcggccacacagtcaagacggcgcgccaaaaacggcggcgtgatctgattttggctggtctattgttgatgcgcctgctgctgacgattgggctgacttttaagatgctcaagcagcaccagaaaaactgatcttaaatacaaaaacagtgctgtctcaagctttagtggggcttgaaacagcactgcctgtttttgggatgttaatgccggtgcagcttaaaatggccgggttcctcatggccatccagataatgattgacgtaccagataagcagatagtgcagcttaaccatgacctgataggcaaaagccgcgtcgattcgtttgggatggcggccggccgcgcgtaattgagtcagcagcatgatcaattcgtcattgagcagttgcgtggtctgcagcatgatcaagccatcctcgctgttgaaggggtgattcagattgggcaattcttgttttaccagcttgcgaatcaaacgaccgctgatctcgctgatcaacagggcttcggtagcaaactgcccattacgataggctttttcagccatatgagaaagatgatgcagtttatgcatgccatgataagattttaaaaaggcaaaattgctggccaagatgacatcctcatttcatttgaagtactacgactattttaccattaatcaatcggcatgatgacggcggtataatcagatcatgctgatattgaaacttgacaaaccaaattaaggttacgggaggcaattatgaaaaaatctttagagatgctcggtattattggcttgagcagtctgatgctagcggggtgcggtcatcagagccaggaaaaccattcgtcagcaaaactggaaacatcttcaaaaacgacgcatcataagaaaaagacggccaaaaaagcgacccggcaagcggccagttccaaaaattctgcttccagtgcgagcgtttcgagcagtcaaacggcgcagagctcatcatcagagacatcgagcagttccagtcaagcagctgaccaagcgacaggtacaaatcaaaacgccagtcagaccgcggggagttcggctggtcaatccgctgccatcaattcggttcaagaagcgattgccgcggttgacgccaaatatggcaatggcgatattcaatggtcctacatgtcggaaggaaacggcacgatggctaccgatacgaatggtcagccggtttattggattcggggccaggattcggcatatcgcaacgcgcataatacggctggcagctatgatggtcatgactattacgtctacccagatggccgcatcgtaccgcgtgagtaaaaaaactgttttaatcgcaagtacggtgtggggatgagccaaccaaattgatggctaaaaaatgaaatgctcgccaaaccgaagcaacagactggacgttaagcgggttcgttgtccggttgattttcaactaggaagcgcgattttaaaacagttaatccttttacctaaacggctattgacccttttgccatgatacgactaaaattaagttattcacttcaaaattaaatcagtacttttggcatatggcaaacttttgaaattcaagcatatgcttagctgcagtctgatttttatcaatgagccatccattggttcaaactatctattaataatgaaaggagagtcatgcctgttttgccagttcaacaatcttgaactacttgaatcggcatgatgctttgtcagttcatggcaacaattaaagatatcgcggcacgcgcgggagtctcggtttctacggcttcaagagctttaaatgataacccgcgaatcagcgaggcaacgcgcgaaaaaatcaagaagattgccgttgagatcggctatcatccaaactatgccgcccgcaatctaacccggggcgaggccaatatggttggactggtttttccagtaaccaccgatgaagcgccagccaacccatttcatatcgacttgatgcggggaattgcttcagcgttggaatcacgcgactactcaatggtcgttgcattggcgcccacgcaggaaaaactgctgcgcgcggttaaatccatggcgctgcagtcaaaaattcataacttcttattgttctatacgttggaacatgatccagtagcggcctatctgcgcgagcatggctataattttgtggtaatcggtcatcccgagcggcaccaaaacgatcgctatgttgataacgataacgtcgcggcaggctatgcggctaccaaacagctgctgatcaatcatgacgtcactaatctggcctatgtcagctcgccatatcattggcagtatgaggaggatcggcgcctgggctacgaaaactgtctggcggagcggcatctgccggagctggactggtattatgacacgcaatcggccagtgaattctttagtcagcatccaaaggtcgatggactggtttgtgccgatgacctgctgtttttgaaactgaatcatgagctgcaggaaatgcatctgctggatcggctttccgtgatctgctttaacaacagcaaattactggggatgctgctgccaaccgtcgaaaaagttgatttgcagccgcatgagctgggcaaaaaggcggttgagctgctgttcaatcctaatctgcagcatgcctttgttgcctttaaggttgactagctgccagtcagactgccgaaatactaaaaaacatgattgatttcaaagcgtaggaattaatcgtcaaaaaaataaaaaatttttaagtcggtccattccttgctgggccggcttttctttaagatttttgcgcaatcggttgcattaaattttgtgcaaacggttgcggaaaacgaattcatttgatatattattaattgttaaaaaagtcatgaagcgcttacacgacttggcaattatttattgagtggattttttaggataggagttttaagtcatgagtgaagtagaacaaaagaaacagacctctggcttgccatatttgtccaagaaaacgatttggatgattaacttcggttttcttggcgtacagacggcctttactttacaaagttctcaaatgagtcggatcttccaaacgattggtgccgaccctaacagtcttgggtggttcttcattttgccaccattgatgggtatgatcgtgcagccgatcgttggttactactctgaccggacctgggcaccaaaacttggcggtcgccggctgccatacctgatgcttggtacgatcgttgccgttatcgttatgctcctcttgccaaactcaggtagtcttggctttgggtatggatcatttgcggcattgatgttcggtgcaattaccgttgccttcttggacctgtcttctaacgtcgccatgcagccattcaagatgatggttggtgacatggtcaacgatgatcaaaagagttatgcttatggtattcagagtctgctgaacaacattggttccgttctggcagccatcttcccattcctgctgacttggtttggtctgcagaacacggctcctaagggtgtcgttcctccttcggttcgctgggccttctacattggtgctattctgctgatttgtaccagtgctttgacgatgactcacgttaaggaatatgaccctgaaacctacgctaagtaccacggcatcaaggaatccgacaacaaggaaggcggtaactgggttgaactgctcaagcacgctccaaaggccttctggacggtttctttggtacaattcttctgctggtttgctttccaatacctgtggacttactccgctggtgcaattgctcaaaacgtatggcacacgaccaacgcaagttctgccgcttaccaggctgctggtaactggtacggtgtgatggctgccgttcagtcaatcgccgctgttgtatggtcctacgtattggctaagctgcctaacaagtaccacaaggttggctacatgggctcgcttctgctgggtgcggttggtttcgcaacggtctgcttcttctccaaccaatacgctttgattctgtcttacgcactggttggcattggctgggccggtatcaacacttacccactgacgatcgttaccaacgcattgtctggtaagcacatgggtacctaccttggtctgttcaactgctcgatctgtctgccacagattgttgcctcactttgcagcttcttcctttacccaatgctgggcaactcccaaccacacatgctgttgctgggtgggatcgtaatggcaatcggtgcattctccgttaacgccatcaaggaaacgttcgctgcttagttttgactgattttgcaactttagaaattaattgagattgagaaaggataatattttatgaaacgaacttttgacgttgctccttggaatatcgtaactaccaagtgggctcctgaagacaagcgcctgcaagaatcaatgaccagtctggccaacgaaaacctcgggatgcgtggtttctttgaagaaggctactctggcgacaagatggaaggtgtctactacggtggcgtttggttcccagacaagacacgggtcggctggtggaagatcggctatccaaagtactttggcaagatgatcaacggtaccaactttctgcagctgacgatcaaggttaatggcgaacagctggatctggctaagcaggaaccaactgacttcaaactggaccttgacttgaagaaggggatctttacccgtgaatttacggccgaagttggcggtgctaagctgcactttacgtttgaacgttttgtcagcgtagcccaaaaggaactggttggtcagcgtctgcacgtcaagaacctgggcgatgctgaagctaagctggaagttgccagtgttatcaatggtgacgtctacaacgaagactccaactatgatgaacagttctgggatgtactggaacaaaaggcagctggcgaacatgcactgctggtttccaagacgaagccaaatccattcggcacgcctcaatttacggttggggtaaagacgactaccaagacgacgctggaacacgttggcgacggcacgactgccaagacggctgaaaacgactttgccggcacgctggctgctggtgcagaagttgaactggaaaagcgttccgtagtagcaacttcacgtgattttgacacgcaagaagcactggttgcacgtctggacgaattggctggtcaactggatggtcaaagctttgatgatctgctggctccccacgttgctggctggacagaacgctggaacaaggccgatgttgaaatcaatggcgatgacgaagctcaacaagggattcgcttcaacctgttccaactcttctcaacttactacggcaacgactcacgcctgaacatcagtcctaaagggttcactggtgaaaagtacggtggtgctacctactgggatactgaagcatactgtctgccagtctacctgggtgttgccgaccctgagatttcccgcaacctgctgatgtaccgttacgaccaattggatggcgcttacgtcaacgctcaagaacaaggcttgaagggtgctctgttcccaatggttacgttcaacgggattgaatgccacaacgaatgggaaatcacgtttgaagaaatccaccgtaatggtgacattgcctacgcaatctacaactacaccaactacacgggcgacaagagctacgtgctgcatgaaggtgccaaggttctgactgaaatttctcgtttctgggctgaccgggttcactactcacaacgtcaaaacaagtacatgctgcatgccgtaactggtcctgacgaatacgacaacaacgtcaacaacgactggtacacgaacctgctttgccaatggacgctgaagtacacgctgcaagttctgaaggaagttgacgctgacgtagctgccaagctcaacgttactgaagacgaaaagcgcaagtggcaggcaatcgttgacaacatgtacttgccatacgacaaggaacgcgacatcttccctgaaaacgatggcttcttggacaaggatctgaagccggttgccgacattccaagcgaccagctgccaatcaaccaacactggtcatgggacaagatcctgcgttcgccatacgttaagcaaggtgacgttatccaaggtatctgggacttcatcgacgactttacgccagaagaaaagaagcacaactttgacttctacgaacaatacacggttcacgaatcaagtctgtcgccatcgatctactccatcatcgctgctgacctgggttacgaagacaaggccgttgaactgtacgaccgttctgctcgtcttgacctggacaactacaacaatgacacttccgatggtctgcacattacttcgatgactggtagctggctggatatcgtgcaaggctttgctggcatgcggattcgtgaaggcaagctgcactacgcaccattcctgcctaagaagtgggattcataccaattcacgcaggtcttccgtggccgcgtcatcaaggtgctggttgacaaggaaggcacgcacgtatcactggtatccggtgaaccactgaccattgacttggccggtaaggatctggaactgaagtaggaggcattttacatgaagtttaaagatctgaagggttttgcctttgacctggacggcgttattgccgacacggcccgtttccacacgcaagcctggcatcaattagccgacaaggtaggaacgacttggacgccagaactgcaggaaagtctgaagggcgtcggccggatggattcgctggagctgatcttaaaggcgggtggtcacgaaaacgactacacgcaagctgaaaaggaagccctggctgctgaaaagaacgacaactacctgcgtctggttgaaaccttgacgccagctgatgttctgccaggcatgcaggctttcttggacgatattcgtaccaagggctatcaaatggtactggcatcagcttccaagaacgcgcctaaggtattgaagtacttgaagctaagcgactactttgatgggatcgtcaacccagcttcggtaaagcatggtaaaccagctcctgacatctacatcgcagctgctgaaatgatgaacctgcctgttgccaacgtggcaggtctggaagatgctcaagccggtgttcaagccattaacgatgctggcgagctctcaatcggtattggtgccggacttgatgatgccgacattcgctttgacgcaaccaaggacgttacgttagaagcaattaaggctcagctcgactaattaaaagttcgttttgaatcaaaattctctctctcaacatggtctgcgaattcatttcgcgggccatttttattggattattttcaaatcggctggttaagcaagcttgccataacgatacgggttgaaaaaggtcgattttaaatcggattggtgaagatcaattccccgctgaaaaaatgacgctgggaatttttatatttggttgtggccgactgctgaaataaagcgatgatcaaattgaaacggaagtactgacgtgatggaccaactgctcaattacgccaggcaaacagattctgccaatgtagcattaatgaatacaattgaccaaatgtttcggtcttgatatcaatcagccagtaaaatcggtgctaaactaaacgtagacaatcaagagcttagcaaggggatgaattaaatggaattgatggacttattacagtcgcgacgggcctttcgcaaatatgatgatcagccgctgaccagtgaagagctgcagccgattctattggccgcggaaaccggtccagtcggcttggggaaataccgcaatcatcggctgacggtgattcaagatcccaaggtactaaagcagattcaaaatatctatcaagcgccgactttgatcgttgtttcatcaccagatcccggccagctggaatttatcgatgctgggatcatcgtgcataacatggagctggctgctgaaaatgaaggcttggccgctaactataacatggcctgcctggcatcgctgccgaaaatggtaattccagcggggatgacgccttgttttgcaattacgctgggtcataccaaggaaaaactgacgccgcgcgatcttgatatcaagcggattcccattaattggatcaaagaagactagtattttattaaaaccgtctgattcgatttcccgggaaatgagattggcattcaaaataaaacagcgttgccgcaagctttgatagcttaaagcaacgctgtttttacgtgtacgcattggaatgattgtttattctgccagctgcagtttagcggcatcaagatggaaatagtcctgcagatatttagccaagccatcatgatcgttgtcaagcggcgttacgtcatcagcaatctgcttgatatcgtcaacggcatttttcatggcaaccccacgaccggcatagctgagcatttcggcatcattgtgctcatcgccgaatgcaatgatctgatcaggactgagctgatattccttgactaggtgacgcagcccagcttctttgtgcgtcccgcgccgaatcagctccataatcgaataggggccgccccaaacgcgtggttcaacgaaatcgccatatttttgatccacggcatttaaaatcgcatcttttttggcgggatcaaactgaatcgttaaggcgattggatcgttgtttaggttatgctcattaagaatctgttcgggagccagtttagcaggcagaaattcgggcagatcgctgctgggatggtcagcccagacgtgatatttatcctcggcaatcaccattttgattcccaattcctgtttatgcgctaacagatcgagcgtcatctcgcgagtaacgttgaccgcgtattcgccggcccacttgcgatgcggaatatgacccaaggcgccgttgaagttgatcattggcgttttgagtccaatctgatcgtagagatgaccagaaatcaaatatggtcggccagtaacgattgagaccagatgacccttccggctgagtgtctgcagagttttgatcgttgtcggcgtcagtttcgactggttgttgagcgtggttccatccagatcgatggcaataagatgctgcttcattaaaaaattcctttcgcaaaaagtatctgcttaaattatatcgatgatcggctatgaaaggcaaattattcaacagcagtaagacaattagcctttaatttaatatataacgcaaaaacgcttatataacagcatttgtggcaattaagtgcaataacagtgcaatgatagctataattgcgctaatttttgctcaatttcatcgtctagcttatgtttatattcatctattagataagcatatacattaatagtcgtcgtcatgttcgagtgccccaatcgtttactaatggcgtaaatatcgattccttggctcaaaagaaacgcaacatggctgtggcggagcgcatggaatgtgtaatcacgctttttgattccgattcgttccaaagttgatttaagatatgaattcacgtcttgcaacaaactattcttaaaagattgcggagttttggcgaatagaagcggcgttcgattaacttttagctgtgccaaaatcttaagcagttcgccattaactcgaatcgttctgtttgagctttcatttttggtcggcttgaatccaatattatatttataatcaacagatttattaatcgtaatcgttcggcgcaggtagtcaacgtctttccaagtcaaggcgagaatttctgaaaatcgtgcaccagtataaatagcagtcagaacgatataaggcttaacgttatctggtcttaaatcgtcattgagagctgatatcagctgtttaagctcactgatagataaatattcaggtttccgtgttaaagctttgttgtaggttatatttgcgttataggtaaagtcttttgaaataattccgtctgcaatggctgatttaacgcaagctttgatttttgaagtcaattctttcatcgtcccaaacgagtgatcttttccatagtcgtttagaaattgctgataggtgctgcgcttgatctgcttgattctgatatcaccaaaatatttcgtgataactcggttagcaacgatatagttgccagccgttgcttttgatatttttggcaaccggtaagtttcataccacgttttaaagtagtcggcaaaaaccgggtctgctgcgatgtcaacaccgttgatcaactcgttttccatttttgttgcgtaatctttcgcttgtgctttggtagcaaatccagactttgctttttgatgaagttttccattttcatcatgccagctgatacgagcttgccattttccattgcgtttcgtaaaagaagccatagtgtaaatcctttcgtacatatgttcgatttaagtctatttttaaaccctagccataacagctagggttatttttgtcagttagtccatttaaactcttttggcgaaaatacttttgaatgcccaatagctttgttcccactataaacagtcgtaaacacgccatcg

SEQ ID NO: 1897 - DNA, 6054 bp, Unknown
  gut microbiota DNA sequence
gataaatggacataatgatagaacgaggatgttagaattgaccaaaaagatgagaggaaggatcaagatggcctatattaaagacttgcgcgccaaagtcggccatcagccattgatcatgaccagtgcctcgggagctttagttaacgaaaagcaacaggtattgctgcaggagcgggctgataccggtgattggggatttcccggcggctatatggaatttggcgagtcgtttcaagatacagtcaagcgtgagtttaaagaagatgctggaattgagattgagccagtcaaactgctgaagatttcagatcaggaattctacacctatccaaatggcgatcaggttcagccgatcaatgccttctttttggttaagcaagtcggcagtcgacaaacggcttttaaaccagccgaaacattgcggattcgctatttttctctggatgaggcgcctaagttcttcaaccatcagcacgcaatgatgtggcagacgatcaaggatgaactgcaatcatcatccgtgcttgacaccggctgctgaagtttctaaaataatttaagtaatttaacaaataagtcacctgaaagcaaatttcagataaataaaaaataatggcttgccgactatgtttttccatagtcggcaggtcatttttgatttagaggggaaattattgatgaataaactaaagttacagacgagtatctttgtgttaacagcttttttattaggctgtaatgaatttatgattgttggaattatttctgatctggctcaaagttttaatggctcattatctttgctgggcctgctggttacactgtttgggatcgtttatgcggggacaacaccggttttgacggcttggaccaatcgttggccacggtaccatgtcttaatgtggctgatgggaattttttgtattggcaatacgttaacggcaatggcgcccaacttgttttggctgtttgtctcgcgtgtgattacggctgcggttgctgggacaattatttcattagttttggcgttcgtgagtctgcttacgccgatggagaagcggggaatgaccgtggcggccgtctttgctgggtttagcattgccacgattattggcgtgccggttggaaccatgatcagtgcggccttttcgtggcgagtaagttttggtgttatctcgattttgtcgatgttggtttggtttttgctggctaagatattgccgcgctattcggaacagatggctggaaatttaaatggccagctaagtatgtttaaggatgcgcgaattgtttggggaatcgtagtcatgattgcattaatggctgccgaatacgcgttttatacgtacatccgtcctttaatcgttaagcagctgggcttctctgttaatcagttgagtctgttgctgggattgatcggcatcatgtttattttaggaaatctgacggcaggccagctgattgggcgttatggcacgcaaaagattggttgggtcagcggcatggttttggttttgctgctgatgcttacattgactgtaaagaattcttggagcggtttacttaatcttggcctgctttgttttgtgttgggaatgccaggatcgatgctgcaggtaatgtttttgaatacggctgaacgggattttcccatggcactgaatctggcatcatcattgaatccaatctgtacgaatattggggtgacgattggctcattgacggcctcgattggtattcggtacatcaaattggcacagattggctggctagggtgcggttatgcttttgggttcactgagcttgctaaaggcattgaaacgatcgaaggccaaaagctagaatacgctttgatgaaacattcatccagcaagccgttgattgatagtttatggtaaaatgatgtcagcaaaattttcatgaggagtttttatattgcaaaaatttcatttgatagctactgcggcagccgggattgaagccttggtaggcaaagagctgcgggcactgggctatgaaacgcaggtcgaaaatggccgggtgcgttttgaaggcgatctgcgcgatatcatggtggccaatctctggctgcgcacggcagatcgggttaagattatcgtaggtgagtttgacgcgactgattttgacagcctgtttgagcagaccaaggcattgccatgggaagacctgctgccaattgatgcggcttttccagttgagggaaagagtcatcgctcacagctgcataacgttcccagcgtgcaggcgatcgtcaaaaaagcaatcgttaaccgtttgagtgaggtttatcaccgacggacacgactgagcgaaaccggggcgacctatccgctggaagttgccattaacaaagatcacgtactgctgacgcttgatacgactggccctagcctgtttaagcgtggctatcgcaagggcaaggggggcgcgccattaaaagaaaacatggccgcggctctggtaatgcttgcccactggttccctgacaatccgttcgtagatcccgtttgtggttcgggaacgattccaattgaggccgccttgattggtcataatattgctcctggcattaatcgcgactttcaatgcgagcgctggatcaatctgatgccagaaaacctgagtgatgacgtgcgtgatgaagctgatgccaaagctgactatgacatcgaattagatattcatggctacgacattgaccagaatatgatcgatattgctcagcggaactgtcaggcagccggcttgacgcatgacatcacgtttaagcagctggcagtcaaggattggcatactgacaagatcaatggtgtcatcgtagccaacccgccatatggtgagcgtttaagcgatcaagagtcggtgcgtgagctgtatcggcaaatgggcgagatctatcggccaatgacgacttggagcaagtacatcttgacggccgatttagagtttgaaacctactatggccaaaaagccactaaacgccgtaagctttacaatggcgccttaagaacggatctgtttcagtactggggcaagaagcaaaggtaacggatcaaaaagttgactgttgataaatagagacgggaaaattacctgcccaatcaaaaagccaagcaccgcatccggcagcttggcttttagtttgcaaactaggctttggcatcccattccaagaaaaactcgtttaaaaagtcttccatgatctgctgacgatgagcggctattttgcgtgctgtttccgtattcagcatgtctttgatcttcagcagcttttcgtaaaaatgattaatgacggtctcatcgcgttccgtgcggtattcctcacgattcatgtgctcacgcggcctgatcagcgggtcatagatgcgttcgccgtggctgccaccgtaatagacggcccgagtgatgccgatgctgcccaaaccgtccagccagtcggcatcctggacgatctggccctcgcgcgataaggttggtcgtgcatcgcccagcgtatcggcaaacgacatgttggaaatgatatccatgattgcttggatctgctcattggtcaggtcaatgcgccgcaagaaatcttccaattcttcctcggcttcttttacgctgattaccagcttctcgtcaatcgtatcgtgcagataggccgcggcaacggcaataaactcattggcagcttcggtttcaatcagttttttggtcatccgtacaacgcgcatgatgtggtcgagaccgtgtccagtactgtcactgccaagtttttggatggtgtagcgtttgatggcctccaattgtgctgcttgttccataaatctttccctcttaataattatagtcgcaaatgtcaccactcgatcgtaagccaatttaagcggtttgacaagtagaaaaccataaattagggcaatgatatcgcttggcagatgaattggtctaagaaacgttttgcaacatttgcttcgtgcaaaatcggtctggtcatctaaaatagaattaacagcagctatgagagatgaaaattttgaatctattgttttcaattgacgatcgtttttggcgccagatgctgacggtcctaaactcgatccgacttaattcccaaccgcgcccgcttgacgtatacgtgatccaatcacaagaactggtgcacacgccagagatccgcaaaacttgtgaactctgggggatgaactatcatccgattattatcagagacgaggaattcgatcaggcaccggttaccgatcgttatcccaagaccatctattatcgcttgctggctcatcaatacttgccaaaacagctgcatcgcattctatatctggatgctgacgtattgtgcattaatgatattggaccactttatgatacggatttggatggctatctgtatgcttcagcaattcataccggcttgactggtactacggaagtcatcaataagattcgcctgcagaactttgacgcggatggctattataattccggcgtgttgttgatgaatcttgatctgatccggcagtgggttcatgcggaagacatctacgaatatatccgagaacacgtcttgttgctgccagaccaggacgtgctgaatgccttatacggtaaagatattaagacggttcccgatcagctctataattttgatgcccgcaaaggccagacctatgagacgatcagctttggtgagtggacgctggattgggtcatcaaacatacggtaattctgcactattgtggtcgtcataagccatggctcgttgataagaacacgggacgctacacggcgctttataagaattactttcaaatgacgcagcgggcgcttaaacaggtggccgttagtcaagctgctccgacggctactgccctgcagccggattagcgacttcccgcatttcaacatcgatgaaaggccaatcgctggcatctttatggatggtaaaacggaaggtatgcgattttagctgccggaagactaaaaatttgtcttttaacttacaaaaagttagtataaagcaaatagtaaattactagtgcagttgaaaggggattgcaatgaaagtttttgtcgccggagctacgggacgagtgggacaagccgtagtcactgaactccgaaaagcaggtcatgaagtagtcgcgggtgctcgtcatccagaaaagatcagtcaaccagatatcttgaaagtcaagcttgatctgcatacctccattactgaactgcaaaaaacactgggtcaagttgacgcggtaatctttgcagcaggatcacgtggtaaagatctactgcaggttgatttaaacggcagcgttaaactggcagaagcaagccggcaaaatggcatcaaacgtttcattcagctgagctctgccttcgcgcttgagcaggataaatgggcagcgatcccggccttaaaagccattaccgattataatattgccaagttctatgcggatcgctggctgattgatcatccggggttggattggacgattatccaggcaggagtcttggatgagcggccagctacggggatggttgccttgaatgatggcagttcaggacataacgcgattcctgacgttgctgccgtattggtaaaaacccttgaatatccaaatacgattggcaaggtcatcatgatgcacgacggcagccagtcaatcgatgccgcattaagtagcctgaagtaatctgatcgccatagctgtttttacaagcgcggtattgcctaagcggtctgattatggatgggctttcgtttggctgttaatgggatttttgatcgaacagcgattcattccagattgtgcgtcgactttgtaacgaactgctgcttagatttaaggcctttaatgtgcggctcggttttggtcggttttgctggctcggttaagtggataattgacagattatgtgcctgtatcaatactgttgatgaattgaagggggattcacgactattttacctacgattttgaattttttagccgaaagtaggtaatctcgcataatttacggctgaa

SEQ ID NO: 1898 - DNA, 26837 bp, Unknown
  gut microbiota DNA sequence
tagccgttcgtaggtaaagttagagattcctaatatgatatacacgaaattttacctactatacatcaatttttggctgatcgtaggtaatgatatttttgtcagatgttttatgcaccccgatttgaataatttggtgggtgcattttttttgctagccaataatatctaatttgtctaaaactacttgctggcttgaggcgggctgacagctggtgatcgattgtaggctcgatgttacttgattttcaccttgggaggctgttgtaatcggttgcgagaagattcccgtttggctgctagtcatcaagagctgttgaatcccctgaccgcatcccaacaggcgtttagaggatgccgttatgactgtttaaggcaagttcaagttggggcgtaccatacattgatgtgaccagatcgttgctaaagacattcaaaacttaatttgcatgatcaaaggccgcattattatttcctgtaatgtcatgctgcttatttgccccataagaacttgatcaagatcgcgtcgacctgtggattccggtgcaaaagctcatgtttggcattggcccctgtgatgcgctgttcttgatatgatttggcgcgaccggcaaccaggtactttaaggctttggatgatttattgtccacctggctgtcggtaccatcgcccagatcgccataaatatttaagacgcgggcagtggttggataagtgtggcgcagttttttgagtttttgatatgatttggtagctggcgtggcttcaccggtccgttcgttatactgcaggttggcaggttgattccagccgattacgccatcaaaggtaccagccatcgcgacttctttttgcagcttgggaaacttagaattgttggtgttttgcagcaggcagtaaagaaaagccatgttgcccatcgaatgcgcctcaacctgatattttttgaaatgataggtttggcagactttttgaatggctgcggcaacgtaatgaccatccgtagtatagtttgagttttcattatcgatcaggttgacttcaatgattgggttgatcgcgccgcggggaatcttgccttccagctcgacggtaccgttttgcgcaacgttggctacgatgacggttttggtgacgccggcatcaatcgccgcctgagccatgtgtcgttcggcatgcgccccgctgccccagccatgaaagaaaaaggttggcgtagttgactgaacgtatttttgagaattcaatgcagctgctttagcggatgaagtcatggtcatcattaggcagatcgtcagcataattttaagccagaatttatatttcaagatgttcgcctcgtatcattgttgatgatgttattctaagtctgtttgttaaaattgaccattttattgtcaatttttggcagaatgtgttaaattgataaacgcttgatactttaaggaaagaaggttgtgctatgcatattgaaaaagccgaaatgaaggatctggatcgagttgtcgaaattctgcgtgatggccgcaatcagctggcggaaagcgggattgatcaatggcaaggcgattatccgaatgttgaacatatccaagaagatattgaacatggctttgcatacctggtacattccgacgatcatgaaacggtgggagcttttgcaatcgtagcagctccggaccactcttacgatgaattggatggcaaatggctcgttgatactgacaactatctggttattcaccgggttgccattcactctgaccatgccggcaatggctatgcttctggtttgtttacgagcgttatcgactacgttaaggaaaatcccaacggtgtcaagtcattacggatcgacacccatgaggacaacaagccaatgcagcatttaattgaaaagtatggctttacgcgtgtggggactctgcatggcgtctaccgtcctgaagaaacctcatacgtctacgaaatgccgattcaataaaagcaaataaataatgtgataaaatcgactcaatagatcatatcgatcattgaagtcgttttttattttggggtgaaaaaatggatgtaaatgctcaactaaccgatcagcagcgagtcgagctggcaggtttggaatatcagccgctgggggttggtgatcacgtcagattatccaatggtaagcgagtcggtcgcgtcaaacgagctttctataaacaagatggcctgcggggcaccatcattgtcaatcaccatcaggatcataaagagataacggtgctgtttcgcgactcatccggcttgagacatggcaatccaacgacatggtccaatgaatggctggcaaccaatctgcccattggccgttcgatcgttgaacatcgagttggtgagattccttctcagctcaagtcggcggccagtttgttgaatcggctgatgcagcaggacttaacggcacattactatatctacggccattcactgggagcaatcaacgcccagtatgcccttgccaactgcgattatccggcatgcctgagtgaggcttggctttatgagggcccaaacgtctactggctgttgaatgaccagcagaaagcccaagccgcgattttgcgcaataagatcaataattatattgactcactggacatcgtgaccctgggctatactgacctgcatcatgcaatcggccgggtgcgctacgttcagtcgattctgcttgatccaatcagtcagcatatgtggggcggctatcagttcgatcaaaacggtcggttgtataccaaaccagttgctgagtatcgggaaaaaatcgatcgtgaactgattgaacatgtcagtcaagccagcagcagttggcatcaatggcgtcaggaacagataaaaaaacgccaggaattgaatcgttggctgccctatcgctagttcgtttccatgatggtgtcaatctgaccatatcgcagcatcagaattataggtattgggtcttgtaaacgctggccgactgcggattggcggcttgtttagtcaagatcggttgatggctggatctcactggcatcattgcagtgaccgtcgcgatgatgcgcttgttgcagagcagcatgtatctgaatgataatgcataaaatatcttgttggcaaaaaggctctgttaatcaatagtggcttgcgttaaaattaatctctgtaatcatttattcacaggggagaggaaaatatgcaagcatcaccaccggcaacgcgccaggaaaccgtgcgctttgcttttaacagttcgttaccgatttttttcggttatgttatcttaggaaccggctatgggctatacatgcataacctgggctttggcttctggtttcccacgataatggcagcggtagtttatgggggctccgttgaatttatcctggcttccatgctggttcagagctttttgccgggcaacgttgtcttgataacgctggtcgtcggttttcggcagtttttttatggtctttcaatgctgaagaaatatcgcggtgcgggctggcgcaaattctttttgatctatggcttgaccgatgagacctttgtcgtcaactatagcctgtcgattcctaaagaatatgatcgttactcagtctatacgctgatttcgctttttgatcacagctactggatcttgggcgcatttttaggcggcgcactggggagtttgattggtaaacagattcccggtatggattttgtcatgacggcgctgtttattgccttggccgttgaccagtttcaaaaagaaaaggatcatcttagctcaaccagcggcgtgatcgttacgattgcctgtctgctgctgtttggcaagacgtactttttagtggcaacgctgttgattctagtggctgaatacgccattatctactggcgtcaagcaaagaggggggaccaaaatgacgctgactgatcagattatctgcattgccttagccgcgctggcaaactttgccacccgggtaacgccatttctgctttttagaacggaagcggtcacgcctgatttcgtaacggggctgggcaggtttttaccggccgcgatcatggggatgctggtcgtatactgctatcgcaacgttaattggcttggcggcacgcatggactgccagaagtcattgccggcgtggtgacggtaatcgtgcatttatggaagcacagcctgtttttaactttgattgtcgggaccctttgctacatgctgctgatcaattttattttttaagaaacaagaatggttgaaaacgccaagcttagaaaaatgctgtcgtggacttttgatgagtcggcgacagcatttttgctttatcatagtttgcgcagccaagcggccagattgtttgctttgaactgatgagaaccgtgagtcgtgacgtggaatccatcagtgacctgcagccggccagcccatttaatgaaatttgcttgataatcatcagaatcactccaggcagttgagaatggcgcaatcaagccttggtatccttgaatggttttcaaaaactcaatcactggtgctgccacgttgccattccagacggggccgccgaccaaaacaacatcatattgattcagctgaggcacggaattgataagtatcggcagctggcgttgttttagctgctgttgatagatgcgaccagtagcttccatgttatttggatagacgctgtcggccacgcgcagacgcaacgcgggagccttggtcgcatcttgaattaatttggcaagtttagtggtattattaaattgtgaataataaacaatgagtgcttgctgggccattatctacagctcctttaatcagtttttgactttgattatagcaatgaatgcccagcacgctcaaattaaaggatgtgatgatgatgaaaaacggctcaaacaccagtgaaaaagcccttaacgtttttttgtggtttattgtaatttcgatgctggtttcactgattttaacgaccaaaacggctttgacggccgcgacagccaaagcagcaggggccgcctggtttttggatctggaaatcgtggctggtctgctgattgttatgctgcctaagtttttggcgatcaagctaaaggtttatctgccgccgctgctttacggtctgtttttaatgtttatctatggagccatttatctgggcacgatctatcacttctacagcattccatactgggacaaaggtctgcatctgatcagcggtgctttgctggctggttttgcgttgtcggcatttggcggcctgattcctgatgaggggatcaagcacgtgccgccattttttatcagtatgtatgccacggcgtttgcggttttttgcggcgttttatgggaattttatgaatttacctgtgactcgtttggcatgaatctgcagcggtacatgaggaacggtcacttgctgttgggacgggcagctttaatggatactatgggtgatctgtttgctgacttctttggcgctctcatttttgcagtgattgcctactttaagctgcgcaaggacagtcgctggattgagaagttcttcttccaccgtaatctgtaatcgaattaagcagttgctgagcatgcggttgaggcttgattaagtcatcaaccgtatttttgtctgcttagcggacgatccaatccataaattattggcaattggatccgcttccgagtttgcggtggcatgataaaatgcactataatatctcttatgtatcttaattgactttaagaattttttagtgagaggtaattttatgctgcgcggcaaaaaaggcttgctgttgttgatcggcgccgttttagcggtggctggcggaagtggatactggtatcaccagcagcagtcagcatcgacaacggttcaacagacttcacaaaaagatcgggttttaaagaaaaaaataacgctggtcgcgattggtgattcgctgacgcatggtcaaggcgatgataaaaacgagcagggttatgtcgggcgaattaggaaaaaactgcaaaagcactaccataatcgcgtaactacgtataattatggggtaactggcgaccggtccgatcagatgctcaaacggcttaatgaacagccagaaatgcgggcaaatctaaaaaaagccgatgtgatcgtaatgacggttggcggcaatgacttgatgcagaaactggagagcaacctgttgagcaattcaagcaataagatcgagagcaatatcgaacaggcaggcacgacctatcagcaaaagctaaatgaattgctgaccgcggttcgcaaacagaatgccactgcgccgatttttatgtacagcatttatgatccggtttacacttattttcctgatgtgtcgattatcaacgagtccgtcgccaagtggaatcaaatcacaaaacggaccgtggctcagtatggcccgtcctatttcgttgatatcaatcatttaatgtcatatggccagtataaaacggccaagcagcggcaaaaactctcacagcaggctcaaaaagccaatagcgatcagattacccaaaagcaggtcattgcgattatgaacaatgatacgcacaacctaaacaactacatctcaactgaagataattttcaccctaacagcaagggctatgatcagatgaccaatgctttatacaaggtgatgctgcagcacgatgactgggaatatcagcaagagtaggatgatttgaatgaatatggaagataagctaaagaaacaatataatggctggaaggcagctttttgggttttggtaatcgtcttgatcggttcgctgttaacggtagttcatctagccagcgcaccagttaagacaccagctgaaaccacggctcccaaagccagcgatacgtcattggaactggttttgaatcaaaaacaggtcaatgccttagccaacagctacattaaaaaaattcagaaaaagtccaaaaagccgcaatatcgttttatcgtaggcaatcagtatgcaacggtgatcggccgcgccaagtttttgggggtcaacgtgcaatatgcgatgaactgcattccggttaaaaccagtgaaggcaatattctgctgaaagctaaaggattggcggttggccggcttaacctgccgattgggttcgttatgggctatatcaaaaagaactatcagctgccaaactgggtctacattaaccaaaagaaaaagacgattctgctggatctgaataaatacaccaaaaataaggcagtgcatgcccaagctgatgagatcaacctggcagatggtcagtttaagttcttgattaccgtgccgcaggataactaataggaggttggcagatgtttcgtgaaagcttctatcattttttgatgaccttaaggcagcccaatcagcccactgagattgagcagtttgccaacaatgcttttttggactcgtcgtttcctaagcaatcccaagattttgatgaaatatctcactacttggaagaaaatgccgaatatctgccaggaatgacgatttttgatgatgcctggcagctgtatctagaaaaaatgaattagaatttaggaggaactaaaatggcaacaattcaatggttccctggtcacatggccaaagcattgcgccagatcagagagcagatgcctttagtcgatatcgtatttgagctggttgatgcgcgggtgccatactcctcgcaaaacccagaagttgatctggcagctggcgacaagccgcgtcttttgatcttaaccaaaaccgatttagcggatccagaagtcaccaaagaatggctgcagtactttaaggatcacggacagccggtattggcactggactcgcgcgcccgcagcgttgccaagaccgttaccaacgcggccaagcaggtcttagccgaaaagctggccaatgagcaggctaaggggatgaaaaaacgggcgattcgcgcaatgtgtgtcggcgtgcctaacgtcggcaagtcaacgcttttgaatcacctggtcaaaaagaacgtcgcggctaccggtaatcggccgggggtaacgaccggtcagcagtggctgcgttcgtcggctgaattggagctgctggatacgccaggcgttctatggcataagttcgcgaccgaaaaagaaggcttaatgctggcactttctggcgcgatcaaggacagtctgtttgccaaggatgacgtggctctgtttgcactgcagtatctgcgtgccaatcggctgaccgaattgaagcagcgctaccatctgactgacgctgatgttgacgaaagcgtgactgatccggatctattgttgacgattaccaaaaagatgggctttcgtgatgactacgaccgcggcagtgaacggcttatctttgatttgcgcaagggcaagctgggaacgatctcattggaaaagccggctgatattaatgctgagggtctcaatgaataagctcagcattaaagaaatcaaggatcgcttaaaagacgtgtctacgcttgatgatctgtttgttcaatcactacgacaagatgagcgcaaaggcgtccaaaccgcgctggcccagctgaaacgtcgattggaacggcaggcagcaagctacgcggccttcaaagagcgtttcaaatatgaaaatcagctctggcaagatggtcagcagtacgttgccgggatcgatgaggttgggcgggggccgctggctggtccagtagttacgtgtgcggtaattctcaagcctgattttgacctggtgggggttacggactctaagcagctgaccaggcatgagcgtgagcagctgtatctgcagatcgttaatgaagccctggaagtcagcattgccgtcaatccgtgcacggttatcgatcagcttaatatctacgcggcgacccagcaggcaatgattcgcagtgtaaattcattggcgcatcggccgtcccacctgattgtcgatgccgtccctctggcaattgatattccgcagacgaccttgattaaaggcgatcaaaagagtatcagcgtcgcggctgccagtatcgttgccaaagaatatcgagatcatctgatgcgcgattatgatcggctctatcccggctatggctttgctgaaaatatgggctatggtaccaagcagcatttgcagggcttagcagaacttggaccatgcccgattcatcggcactcgttttcaccagtccagcaatatctgcattagcaagtcagccaccatcgactaaagtcacgggatttctagctggacataattgaatactagataaaagtactgtcttggttttgatgaaacatgaggccgtgcttttttaattggcttgtaggatcgtgtcatttctaaaattattgagccagtctattttgcagaaaacagccagtcaggcaattcctctaagatgtcttgactgcttaggatcggtcgcgctccagcagcaatcagttcattggctccaagcgacatgggtgaatcgattggcccagggaccgcaccgacatttcgattatcctgcagcgccaggttggctgtaatcagactgccgctgcgccgactgccttcaaccaccagacaggcatgacataaaccggcaatgatccgattgcgttcgggaaaattgcttgggtagggcgtagttgccagtggatactccgtcagcaaaagaccaaactgtgcgatttgccgctgtaaaaatgcattgcagcgtggatagctgccatctagaccagtcccgattacggcaatcgcggccccgccatccagcagcgtaatctggtgagccaagccgtcaactcctttggccagaccgctgacgatcgcgacttggctgctgacgactcctggcagtaattggttgatcactcgttcaccatatttagtgatatttcttgatccaaccacggccagacaagggtactgcagcagttttaggttgccatgataatacaaaaccaatggcggatcataaatttctcgcaggcgctgcggatagatcgcgtcaagcggcgttatgaacggcatcggcagattttgctcagtctgacgtcgcagttcctggctggaccattcgtcaaaccactgcattcgtttgttaaaagtaatgttcaagtgatcagtcaatttagcgagattggtaatctgtttttgctgaatggcagccattaaaagccgatatttcatacgccgactcaaacagctgcatagactcagccttaagataaattcacgcagatgcattgcttttcccccccttaccattgctatatgccaaaaattcagtttgacactaaaattccactttttcgctaaaatgattttatcgttgccttgatttttttaataaactcgattatattgatacgctagttagaccattttcttttttgaattaatctaggtctatctgatcggttcattgctgattgaaatcagccagacgggtttgaccgcacaagagaccatataatagtatagaagataaaaccgatcaaattcatcatgataggagccttatgatggcaactaaaactgtaaaatcaactgctaaaacaacttcggccacgacgaaaactacaaaaccggccgctaaaacaaccaaaaagacgactgccaagcgccctaagaccaagaaaaagctggtcatcgtcgaatcgccttccaaagccaagacgattggcaagtatctgggacggacctataaagtcgtcgccagtctgggtcatgtccgggatctgccaaagagccggatgggggttgatattgaaaacgactatcagccagactacatctccattcgtggtaagggtgacgtgatcaaagaactgcgcaaggatgccaagcaggctaaagccgtctatctggcatctgacccggaccgggaaggggaagcaattgcctggcacgttgccaaccttttaaaactggatactaaagacaagaaccgggttaccttcaatgaaattaccaaagacgccgttaaggaagcctttaaggaaccgcgtgagatcaacatggacctggttgatgcacagcaggcacggcgggttttggatcggctggttggttattccatcagcccgattctttggaaaaaggtcaaaaagggactgtctgccggacgggtgcagtcagtcgcgctaaacctgatcatccaaagagaacaggcgattcgcgactttaagcccgaagaatactggacggttgatggtcagttcaaaaagggcagtgataagtttgcggcatctttttatggcgaaaacggtaaaaaagccgcgctgcctaataacgaagccgttcaaaaagtactggccaagattgatcgcaaggcgccatttacgattgatgacgttacgcgtaaagaacgcaagcggatgccgcagccaccatacactacctccacgatgcagcaggatgccaaccgccgtctgaacttccggacgcgtaagacgatgatggctgcgcaacagctttatgaagggattacgcttgggcacggcagcgcggtcggtctgatcacctacatgcgtaccgactcaacgcggattgcctcaattgccaagcaggaagcctctcagtttattcatgaaaactatggggaacaatatgctgcaatcaagccggtcaagggtaagctgccagaaggggcccaagacgcgcacgaagcgattcggccaacttcagtcaatcgcacgcccgcggagatgaaacagtatctgacggctgatcaatacaagctctacagtctgatctggagccgattcgtggctagccagatgacgcctcagattgttgatacgatggccgtttcattgagccaaaacggggtcgactttcatgccaacggatccaaggtcaaatttgacggctttactaaggtttacaagcgtggtcaggaaaaagacaatgttttaccagacctgaatcaaggcgaccaggtccaaatgatcagtgatgacccggcccagcacttcacgcagccgcctgctcgttatacggaagctgccttgatcaagacgctggaagaaaacggggtcggccggccttccacctacgcgccaacgctggacacgattcagcgccgctactatgttcgtttggtatcgcgccactttgagccaaccgagctgggtgagatcgtcaaccagatcatcgtcaagcagttcccagaaatcgtcaatgtcaagtttacggccgaagttgaagacgacttggaccggatcgaagaaggcaaggaaaactgggttaaggtcgttgacaagttctaccagccattttctaaagaagtccaggctgctgaggaacaggttgctaaaatcgaaatgcatgatgaactggccggcagcaattgtgagatctgtggggcgccaatggtcgttaagatgggccgctatggcaagttccatgcctgctcgcgcttcccgaactgccgcaacaccaaggcaatcgtcaaagatatcggtgtaacctgtcctaagtgtgggcaaggaaacgtagtcgagcgcaagtccaagaagaatcgcgtcttttatggctgctcgcgctacccagaatgtgatttcgtttcatgggacaagccaattggccgtaactgtcctaaagacggtcatttcttgattgaaaagaaggtcaagaagggcaagcagatcgtttgtcctaatggcgactacgaagaatcaatccaaaattaaaagatagacttgcgaaagccctctcaatctgttattgtgcagattagagggcttttggcatataccattgtccattgagagttgaaaggatgacgagagatgattcagattgaaaatgagcagctgacggtacagattgatccattaggcgcgcagatgcacagcattaagcgaaatgcagcgggattggaatatttgtggctgggtgatccaaagtcttggaaacggcaagcaccggttctgtttccatttgtcggccggctcaaagatgatcaatacgaatatcaaggcaaggtctatcatcaaacgcagcatggctttacccgcgatcgggagtttcaggtcgtggaacagagcagtgagcgagtagtttttgagctgcgtgatgatgaaaaaacgcgggctgccttcccgtttgcttttgtgttgacgattgcctaccagctggatgaggatcgtctgctggtcagctatcgcgttgaaaacccaagcaatgaccagacgctgatctatgctttgggtgcgcaccctggttttaacgtaccagttgatgaacagggcagttttgaaacgactcagttcagtgtttcaccggcgattgactatcaacaggttaaattggtcgcacctggtccatttaatgatctggaacatccagcggttctgcacatgcagcagcccattcaactggatcatgagctgtttgatgaggatgccctgatctttgcaaccaagggcatgccatttacggcaacgctgacggaaccgcagaccaatcatggggttcacgttcaggttaacggtgcaccatttgtcggcgtctggtcgccatacccagcccaggccaacctggtatgcgttgagccatggtgggggattgccgacagcatccacagtgacggcagactcgaagacaagcaggtgatgagtcggctggcacctggcaagcatgaggactatgcatttgccattcagcctttctaacgacttaaaaaagacgtggtgagcttgatcaccacgtctttttgattatagctgaattggatcagcgcagcaggtagccgccatcaactggcagcattacaccggttacgtaatcagatgccggactggctaaaaataccattggccccatcaattgttcaggacggccccattcaccagaaggaatatgttctttgatctcaggccctcgcaccggatcttcggccagcgccttagtcatatccgttaaaatgtagcctggtgccagaccgttgacttgaatgttgtatttggaaagagcatcagcgtaggctttagtcaggcccaggacgccatgtttggctgccgtgtaagggaagatgaacttgccggcacggtaggactgcattgagccaatgttaatgatcttgccgtgcttttgcttagccatatacttggccgctgcctgcgacatgtggtagagcgcgttgagattcaaattgatcaccttgtcccagtcttcatccttgaacgccaagacgtcattgcggatctgaatgccggcattgttgactaaaatatccagaccacccatttccttaacgcattgcgcgatgatttcgtcggcacaacccggttcagtgatgtcgcgctgcagaaagccgatcttttgtccattgccttcaaccgcttgacgagtttcttcccagccgcgctgtgaatttgaaacgacaaaaatatccgcgccgtaaagcgacagcgcctttgaatagttttggcccagcccgctggcaccgccagtgatcaaagcaaccttgccattaagctgaaaactttgttggttaaatgaactcataaaaagcacctcgatgtttaaattttgattttaggaaatcgttacacctaattataagcgctttcaatgcttttacaagaggttttaggaaatcggttgcctaaatttatcaataaaataaaaatcgcattcagcttggcctttaataccaagtgatgcgatcatcagcttaattatttttgattgcgtttttgctgtcgccgatagcccaagccaaaatgaaccagcgattcggtaccattgaagatgcgcttgatgttggcacgatgcagccagatgattaccactgtcaagaacccggcaatggctgccaggatccagtcgtgaatgcataaggcgatgataaaaattgcggtaatgccaaccatgccagccgcgctagccatgctggtcaacaataataccgtcagatagatggcccaggcaaccaaaaagagcagcgggttatacgccagcaggatcccggcactggttgcaacggccttgccgccatgaaagtgatcaaaaatcgagcaggtatgacccaaaacggcaaataagccaattaaaagcgggctgacggtctgactgcagtgaaagaaatatggctgacaggctgccagcgtccccttgaacatatcaagaaacaatacggttacgcctgctttaggtcccaaaacgcgcagagtattggtcgtgccgatattaccgctgcccaacttgcgaatatccttgtggtagaatacctggccgatccaaagtccccagggaatcgagcccaaaaggtaggcaatgactgccattaaacaggttttaaaaatcataaatcattcaaaactccctcgataataattgcataattgttataatagcacattgagtggcatcggcaacttttgtttgatgtgttaaaataatggggcacaaatgtttgcaaaatttctttgctaaattttgccaaatcagttatattaaaaaacgttactaaaaaattatgaggagggcctttcgttggcagaacaagaatatcaatatgatgcatcctccattaaaatccttaaggggctggaggcggtgcgcaaacggcctgggatgtatatcggttcaacggatacctatggcctgcaccatttggtatatgaaatcgttgacaacgcggtcgatgaggctttgtctggttttggcgatgaaatcaacgtgacgatcgaacccgacaattcaatcacggtccaggatcatggtcgtgggatgccggtaggaatgcatgcttctggcaaaccaacgccagaagtcatcatgaccgtgctgcatgccgggggaaagtttggtcaagacgatggctataagacttccggtgggctgcatggggttggggcctcagtcgtgaatgctctttcaaccaaactgacactgacgatcgtgcgcgatcacgttcgctaccaagaaaaattcgtcaatggcggcaatccagtcgggacgctcaaaaaattaggtaatacgcgcgcgggttccggaacaacggttacctttaagccggatccaaaaatcttttctacgacagtctacaactacgatactttggcaagacggctgcgtgaatcggcattcctgctaaagggtctgaagatcacactgactgacaagcgcgctggtcaggaaaaagaagaggtattccagtttgaaaatggcatcaaggactttgtcggctacctcaacgaagacaaggataccttgggccagatcatgtactttgacggcaagcaggatggcgttgaagttgaggttgcggctcagtataacgatggctattcagaaaacgtcttgagctttgtcaacaacgtgcgcactccagatgggggaacgcatgaagccggttttcgcaatgcctggaccaaaacgttcaatgactacgccagaaaagtcggtctgctcaaggaacgcgacaagaatctggaagggtctgacgttcgtgaaggcttgacggcagtcgtctcagtacgaatcccagaacgcattctgcagtttgagggccagaccaaagacaagctggggacgccagaagcccggaaaatcgtggactcaatcgtcagtgaccagctaagctacatgctgctggaaaatggcgatgaagctcagcagctgatcagaaaagcactcaaggctcgccaggcaagggaagccgcgcgcaaggctcgtgacgaatcacgcggctccaagcgcaaaggccggaaagaacgcaatctgtccggtaagctgacgccggcccagtcaaaagatgccgctaaaaatgagcttttcttagtcgaaggtgattcagccggtgggagtgccaagcaggggcgcgatcgaaagtttcaagcgatcctgccattgcgtggtaaggttctcaatacggaaaaggccaagctggatgacgtcttgaaaaacgaagagcttaatacgatcatctatacggttggcgcgggggtcggcagtgagttcaacgtcgcagactccaattacgacaagatcatcatcatgactgatgccgatgacgatggggctcacatccagattcttttgctgacgtttttctacaagtacatgcggccaatgatcgaagccggtaaggtctatattgccttgccgccactgtatcgcatccagtctggcaaaggagccaaaaccaagattcagtatgcctggaccaacgatcagctgacgcaaatgaccaaaaagattcgcggcgctcagctgcagcgtttcaaggggcttggtgaaatgaatgccgatcagctttgggaaaccacgatgaatcctgacacacggacgctgattcgagtgcggatagaagatgccgagctggctgaaaagcgcgtcactaccttgatgggcgataaggttgcaccacgtcggaaatggattgaagaaaacgtgcaatttacgctgagcgatgacgaagagtctgatcagctgatggaaaatcgcggtcaaaaggccaaaacgccaacgatcagtacctggaatcaaaagtaagaggtgaaagtcaatgagtgaaccaaaaatcgaaaatatgactttggaagacttgatgggcgatcgcttcggccggtattccaagtccatcattcaagaacgggccctgccggatattcgcgatggcctcaaaccggttcagcgccggatcctgtttgccatgaacaaggatggcaatacctatgataaaggctttcggaagtcagccaagtcggttggtaacgtaatgggtaacttccacccgcacggtgacagttccatttatgaagcactggtacggatgagtcaggattggaagctgcgtgacccattgattgaaatgcacggcaacaacgggtcgatggatggtgatccaccggctgccatgcgttataccgaggctcgtttaagcaagattgccggtttgatgctcaaggatatcgacaaagatacggttgatatgacgctgaactttgacgatactgaaaaagagccgaccgtcttgccagcccgcattcccaatcttttggttaacggtgcgactgggatctcggcgggttatgctacggaaattccgacgcataatctgggcgagctgattgatgcactgatctacctgcttgggcatcccacggccagtctggataagctgatggaattcgtgcctggtcctgatttcccaactggcgggatcattcaaggcaaggaaggaatcaaaaaagcctatgaaactggtcggggacgcatcgtcgtacgggctaagaccagtatcgagacgctgcgtggcggtcggcagcagatcaatatcacggagattccatatgaagtcaacaaggcccagctggtcaagcgaatcaacgacctgcgtctggccaaaaaggttgagggaatcgctgaagctcgcgacgagactgaccgcagcggcctgcgcatcgcaattgagctgaagcgcggcgccaatgccgaggggatcttaaactatctgctaaaaaacaccgacctgcagatcaactataacttcaacatggtggcgatcgataatcagcggccaatgcgggtaggcttaaagcatattttgacgtcttatctgagcttccaaaaagagatcattatgcggcggacgcgctttgatttaaataaggcgcaaaaacggctccacatcgttgaagggctgatcaaggcgctcagcatgcttgatcaggtcattcaaacgattcgggcttctaaaaaccgggctgatgccaagcagaatctgattgaatcgctgggctttgatgatccgcaagccgaagccatcgttaccatgcagctgtatcggctaaccaatactgacgtgacggcgcttgaagatgagcaaaagcgtctgaatgatcagattgccgaatatcagctgattttaaacgatgaaaaagagctggctaaagtgctgcgccaagaaatgcggacgattaaaaaagaatttgcgacgccgcgccggactgagattcaaagcaaggttcaaaaactggagatcgacactaaggttacggtcgccaaagaagacgtggtcgtattggtttccaaagccggctacatcaagcgcagcagtctgcggtcatttaaggcttccaatgttgaagaagacggtttgcgcgaagacgactatccgctgctgattcaagaaaccagtacgctggcgcacctgttcatgttcaccaatcttggccatctgatctatcggccggtgcatgaattgactgatgtgcgctggaaggacgttggtgagcatatttcacaaacgatcggcctggccgcgggtgaagagattatcaaggcactgatttttgatcggctggatatgccaggaacgctgctgatgggaaccagcgatggtcaggtcaagcagactgagttcaaggaatatcagccaggatcccgttataagagcacggcgacggtctacatgaagcttaagggtgatgacgctcaagtcgttaacgtaatgtattatgagccaaaagataccgcgcagtcgctgctggcaatcagtcatgaaggctatgccgttcgctttgacgtagctgaagtaccgattgccggggtcagaacgacgggagtacgggccattaatctgcatgacgatgacagaatggttgacctgcagctggttgatgaggatcagcatctggccatggtaactcagcgcggggcctttaaagaaatggccgtagccgacatcaagcttggtgcacgggcaagacgcggcgaactggtgctgcaccgtttgaagaagctgccgcacaagctggtcgactttttaccttatgatgccgactatcaaggcgccgttgagatcattaccgatcggccgctgttccaggatgttttgattactgatcaccatctgggaacggctcattcaaacggtacttttgtaattgataccgaaagtcagggcattccggttaagctgcgcatcaagccccagctgaccgaaacagcgacaagcgagcagctcgatctgacggattcaatttcatagtctgcataaatatgcacctgaaatgaaattagattcccatttaagagctggtcgtgctaaaataaaagggtataattaatttgcgaaaacgttgtagttaacgttttacgtgatgattgaatcaaaggagttgtctttatgagcaaggaattagtttttggtcatcaaaagccagatactgacgccattacggccgcaatggcattttcatactttgaaaacgaactgggctacgaaacggaagccgttgccctgggcgaaccaaacgatgaaacgaagtacgctttgaactacttcaacatggaagcaccacgggtcgttaagacggttgccaacgaaactgacaaggtaatgctggttgaccacaacgaaccacaacaatcagctgctgacatcgaccaagttacggttacacacttggttgaccaccaccggatcgccaacttcaacacggcacagccactttggatcacggcgcgcccatacggctgtgtttccacgatcatcacggaactgttccaagaaaagcacattgaaattcctgccaacctggcgggaatgatgatgtctgctatcatttccgacacgctgctgctgaagtcaccaacgactactgaccatgacggcgaagctttgaagtacctggcaaaggttgccggtgttgaagactacgaagcttacggaattgagatgctgaaggctggtaccaacctggctgccaagtctgacgctgatatcgttgatggcgacgccaagacgtttgaactgggtgacgctaagctgcggatcggtcaagtaaacacggttgacctggatgacgtcttctctcgtcaagccgacctggaaaagacgatgcagcaactgaacgatgaaaacggctatgacacgttcatcttgattgctaccaacattttgaacagcgattctgatctgctggttgttggcggcaacacggaaaaggttgaacaggcattcggcaagaagctgggtgacaaccaccgtatgaacctgccaggcgtagtttcacgtaagaagcaagtggtacctccattgacggacgtctttgaaggctaatcagcgcttaatcaaaacagcactccgccattgtcgcggggtgcttttactttgcataattaagttaattgatggtttgacggaggaattaagatgaaaatctgtccaaactgtggcagtgaagttttagaaaatgcccaatactgtacgcgttgtggctggcattttgaagcggttgacgatcataaaacggctgaccaaaaaaatcagccggcttcgataaccagcgaaaacagtgagccaccggcaactgaatcaatcagcgagccacggacgatagcggctgaacggcctcaagcggcagcaggacagcatgagccgcaaacatcaacggatcctgtccatgcacaaaagaccgatgaaccgcaacaaagcgcgctggcaccaggccgtgacgaagcttcagacattcaaaaagtcgcagaacagcggcatcctttggtcaacgatcccaaagcaggcagccagccggccaaaccggattcaaaagcagcagtcagcgcggctggtgaagccaaagaaaatcatgagtccgcgtcatttaagagtcgtgcggaagccagaaagcaatccgaatcaaatacggctgaagactcatttgaactgacgctggatctcgagcataccaagcagggatttaaacgggcctgggactggctgattgaatcattgagacatcccggagcatatcagcagccaagctggcgttggaccggtttgacgatgcagattcttgaggccttgattgcggttgtgacgattggctggatggttgatcatctatcggcgaagcttgctcagcttgcgtcaggctcggcaatcgtttttcacatcaaggccatgacgacggggagctttttcttgctgtggctgctgatcgtggttgcgatgctgctgatgagtgccgtggcgtacgtctttaaacgctatgttagtggtattgaaggcggcgattacgttgatatgatcaatcgtttgacgtggtccagcaacttcaatgttattttgctgctcgtcagcttgttactggcatcattaaccagctcgcttggcatgatgactctgattggcgtgattctgctgactgctttgggaatgtttgccctggcattggctgatgtgatgcttgaggctggtccgcagaaacttgatcgcatgtatggcgcgctgattgttttggtcatcaatggtttgatcgtttttgccgcgatctcattaggtggtaagctgattaaagaaatgatcatggcgctgatgctgcagctgttttagtaccagacagaatactaaaaatacccccaaccggtccgctgatgtattgcgaattgattgggggttttattattaaacaagtttggtcagcgtttcgcgaatagctgccgcgctaatttttgggaaaatcgactgcattctgacgttatctggtttggccatatattcagccaatgagtccagctgctcagcctgggtaatgccaagtgcggccaaagacagcggcaggccaatgcgaggatagtaggcgcggatttctttgatcaacgcggtatcgtcttccaacgttacttgaaacagattgcctaaagcaacgatctcgccatgcgtaaagcgttgcgggccaatgaccttgacataggcgttatagaaggtatgagccgccacgctgcgtccatccaggtctgcaaagccatcaaccaatgacgctgctaaaaagatggtatcgataaagttctgcaggtcaagaccgttaagcgaccgcggattatcaactttcagcatttcctgacggcaccgctcaatcagatcccgcgctaaggacagtgatagcgaatgcattttatcatcagtcaggcgccgccgaatctcatagtatttggccaacgtgtcgccgatgcctgaacgcagatattcaagcggcgcgttttttaacagctcaggttccagaataacggcatcaacgggctttttttcgcgcacgctggcaatcatttcgtgagttggcgaatagacgatgcttttagtggtgaaggccgcgcagttggaaggaacggtctggacgttgatcaaaacattgttgaggcggtcactgacgacttttgccgtatccatcaactgaccaccaccaaatgcgatgattccatcataaggccttagctgctcggttagacgatcgatttcggcaaactcgcagctgccattaaagatttcgactggataccgagtcacaaaatcagccggcaaatattgggggataatttttaaaacggtttgatcggtcaagatgaccggacttttaagtgtaaattcattgatcagttcgggcagctttttcagcgcgatgggttcattgacataaataccgggactgagccggatcgtgcgattaaacattaaatcattccaatctataaaattaatgcttgattcaaaaccggttcagcatggttcaatgcctgcttgcaccggttgttttacagattttgttgccaaacggcggggtaggggtcgtcgatgaaacggtgcgtcgacagctgaccattttccacctcgcccagctgcagcagatatgaggcaataccggccgcgccatcgtaaaaacctagagccgctgtaacgttttgcgggttcttgcgttcaaaagcctgcttccaataggcaaactgctcatcttgagttgcccgttcaactaaaatcgtggcagtctgctgagcgcttttaagatagtcttgattattcgttacgagataggcgccggtaaacagctgtagaattccggccgtaccgcagcagtagttgtcggtttcccaatagccggctgaacgtttttggggtgcctgtatgcgctcaagtcccgcgatagctgcttcaaaatcatccacggcatgagcatcgtcggtctgtttggccagttcataaaaatagcgcgccgtgcccacgggtccaccacaatagccgacgtagcagatatgctcggtgtcgggatgatagtgcggtaagagcagtcccttaccatgattatagtattcgtaaaattcgcgaatccccttggtgccatcaataaaacgattttctcctgtcagctcggctaatttaagcagggtaaacgccacgccggatggtcccagcggaaaaccggtattgaacttgccgatgggaccgcccacgaatttaaggtctaagccgacataaaatgactgtccgtgctcatcaacctgcttgtgcgccaaaacatagtcgccaaatttgatcaaagcatcctgccaaccatcgatcagatattttgaacccagccgtcccaacaaaagcgccgtgccaccgtcagccacgatgccaatctgaccgctccatgagccatcctgcttttgatcagtgacgatgccgtttaagattctgataatggcgtggtcaaaaacggattcatgatgttcctgattgatccagtccaatgcctgcgccacaccacttagtccagtggtaaaggcatagcggctaaaagctttgtccagctgcggatcgttgaccaacgcgcgggcggccagttcatgaccagccgcgaccgccgtgtccagatagcgctgattgccgctgatctgggccagttccaggtaaaacttaacgattccgctagcgccggcatacattgatgcttcatcgtaatagcgccaaggtcctttaaacgacttgctaatgtcccaagtaatgccatgttcagttttaacgacatgctgatcgagccagttggcagttttaatggcaattggcagatactgattcttgctcaattaggcagcctcctctccaaagcgccgtgccagatgtttttccaataatttctgcagcagcgtgtagacatagatcatgattacgtaccagattcccacaaccaggtagacatcgaaatattcaaagttttcggttgccagaagcttaccggcaccaaaaatttccgttaccccaattgaaaaggccaaggacgtttctttcaacaggccgacaaaagtattgccagcgggcggaatgatgatacgaatggcctgcgggatgatgatcttgcggtagaccagtgatttggacattcctaacgccaggccggtttccaattgacttttggcaactgaggcaatgccagaacggaaaatctcaaccagataggcgccttcttttaatgccaggcagacggttgcagcaattgaggccgggaccaaagagcggctgtgcagtagctgtggcagaccataatagccgacaaaaaagatcaccaaggtcggaaagccccgaaaaatcaagacgtagaaatcaaccagccagcgactggatttatgatgctggccaacgctcaaaacagcggcgacaagaatagctaataccattgcggcaacagccattagaagcgttactgggacgtatttgccgatttcaggaaagactttaagcatatagggaaaatccatatctgttcctccgttgactgatgattagtcgttactgatggactttttggttacgtcctcaccgttgtagtacttcttggacagctttgaaagcgtgccatccttcttcaatttcagcagggccttgtcaaatttcttctgcttggcttgggcttcgctgtttttggcaaatgggaaagcagacttgttccagccagccacgcctttgagaatccgcagatccaggttttgcttcttgatggtttcttccaggaactgccgctggtttaagaccccggcaaccgtaccattgttggcatcagtgaagatagcattgcgatcatcgtattttttgatcttgatcttggaatcatacttttgcagcaagtcaatgttagaagagccaaccgttgcagaaaccgtcttgccttccagatccttgattgttttgtacttggaatcttttttaaccgcgatttgggcagggtagtaggagtagactggtgagaagctgtatttcttttcacgttcaggcaggaccgttaccgagttggcaatcgtatcaatgctgcccttgtccaactcaccaaacagactcggaacatcgccaacaaccttgaacttcaccttgtcgcccatctctttggcaatggctttggtaacggcaacgtcaaacccggtcaacttgtcgccttttttgtaggaagtcggataggtctgtgccatagtaccaaccgtcaaagtctcggcatgagcaacgggagcagccgcaacggttccccctaaggtaagtgcggcaatcagcagtttgatcttcgtaaatttcatttataaaacccctttaaaattgaataatagctgcaaaaccaacaaaaaaggccgtgactccatcaaaggaatcacggcctagttgccgacctggatatggcaggcatttttgttggggatcaacgcccgattagctaagtccagattgattcagtgatggtatgccaaatagtgcgcggtacattacagtacagcacatgcattgacaacacatcattgagtcaaacttaatcatggcgttgaaatcctcctttcgaaattcgttgcaaatagcataccggttattagtgacaactgtcaacaataaaattagaattttcaaagaattgtgcatggcgacagcttgacaaaccttatgatgattaggatatagctgttgtatgagcagattaaaaaattattttatcgtttttaataaaaatagattatttagcggatgccgtttctttaggtgagacaaaatcacgttgtaaagacacaccggtaatatatgt

SEQ ID NO: 1899 - DNA, 2570 bp, Unknown
  gut microbiota DNA sequence
aatacggaaaaattctgcgatcaagccgcataatcaaattttatctatttatcttcttgtatgcttgacaggattatagcgctatatccgcttttttctaaatctcgttctctttccgaatcaacactaaaactgccagcaaatagaaaaccacgccggtaatcaacaaagctactacggacatccatgctgacgcggtatgcccgttatacacaaatacaactcctagaatctccttagtttcttttaaaactgctgtcggttgatttgcaaaattctctttgatagaatctttcattaatagttgccgatagaggacggctgaatgagcacacggaaaatactttaccagccattgaacgttttctggcagattaccgattggaatatatgcccctaccaaaaagccgattaaagtcccgactatcatactggcagctgagtaggcactgttggtcttcaaaaaagaaattatgaaggaagcgattgctgatgaagcaaaggctgacaagacgattacaccaaataacttgagcaaaatatccatatccagcactgctccaccaatcatacccatgtagatttccccaaaaatcaaggtgaaaatcgacatgatgatacttatgataaagccagtaatgatatagcctcctgcaatctgtcgtcgaccaactggggatgaataaaaatccttgatagttttattctctcggtcgctgatcattaccccgtaagctcccaaactagtagtgatcgatgccgaagccaacatccccgccaacatccaagccctcatcagccggttaggatgtggcaaaaactttaaaccactgcttatcgagtcaccaataaaaaagatgtacaaggcaaaaataatgattacactcagcattgagaagaaaacagcagctttgtcttgaaagtaaatcttgaggtttctcttgaccattattttcattctcgtaggctcctccctgtaatgttcaaaaacacgtcatccatcgttccgtgcaacacttcaaaactctgtagctggttccttgctttttggacaatatcaatggcatccagtgtgtctgttaactcaacctcatagtagtcttccatcttgctccaggtaaatgaaaagcttcccagtaaactatccagatgctgctctttctttgggtacagtctcaatcgatcatagctgtagcgctcttttagactgattggacttccctttgcgacaatttccccgtgatctagaattattacatagtctgccatagcggcttctgccatatagtgggtcgtcagaaaaattgtcatcccatactctttctgcaagcattggattgtcttccatatatgctgccttgtttgcggatcaagccctgttgttggttcgtctaagaagagaatctttggcgtgtttaaaagggctcttgcgatatccactcgtcgcctttgtccgcctgacagtttcccatactgacgcttaagtaggtccttaatctctgtgtattcgactgcacgatccacggcttctttaacttctgccttgttggggtaataaaaaccggctctaagcgttaagttgtcagcaaccgtgagtttcttatccaaaagtccctcttgaaacacaatcccaatcttctgtttgatagtttgagattgcgtctttatatcaaagcctgccaacttaatctctcctgaatcaaatttggtcaaagtcgataagcagtccaccgtcgttgatttgccagctccattagggccaagaaaagctaaaagttcaccttcacggacatcaaaagaaatatcattgacaactttcaagtcaccataagatttggaaagatgcctgacttcaattgcattttcgattgttctacagctcctttctttttattctcacaagaatctatagtacccctaaaggtaaccgaaaataataaatagtttcacaacaatcgcatgttcatttattctaatcgtccttcttagatccgtcatcattttgtgagtttttcttcgccccgtcatcaaagaactctttgatgatcctggctgctgaaccactaagaatgactggtctgctctcgcgcgtaatccttttccaaacgaagaacgaacgcacaaaaacaatcacactgatgctgccgccaatcataaagaaatactcattcgcgtaggcgcgcatcgttaggaagccaatcaaaaaagctagtaccatctgactcaaagcgcgtcttccctgcttaagctttcttctcgaccctaggatcttcattttccatctcaatcgactgcttttatcgaatctggacttgttttctaaattacgagacaactgttctctttcatttaaaagtcgaattgccaatgccgccatcatcaatataaccgcaatccccaaagctcttaccgcaatactcatcataccgcccctaacgtcttacttcgcgttcccaatcagattgggaatgttcttttgtatattattaaggataactcaatttagagatatcttctgcgcaatcataagaactatttgtgcaaattatatacgcgatataaaattctac

SEQ ID NO: 1900 - DNA, 344 bp, Unknown
  gut microbiota DNA sequence
cctactctcgcgcgtaatccttttccaaacaaagaacgaacgcacaaaaataatcatgctgatgccgccgccaatcataaagaaatactcattcgcgtaggcgcgcatcgttaggaagccaaccaaaaaagctagtaccatccgactcaaagcacgtcttccctgcttaagctttcttctcgaccctaggatcttcattttccattttaatcgactgcgtttatcgaatctgggcgtgttttctaaattatgggataactgttctctttcattcaaaagtcgaattgccagcactgccatcatcaatataaccgcaatccccaaagctcttaccacaatactca

SEQ ID NO: 1901 - DNA, 977 bp, Unknown
  gut microbiota DNA sequence
attagtctatacggcctcattgcggaagtcctccgcggtgaggttgtttcgtttgctggaaatctcgactgtgttgaagtattcaacaccttgcttaaccaaatctttcagttctgccaaagtttgcggatgtgaatgatgcgccatccatatgtacttaaaatcgccccaatagtgctcaattactgcgttatcagccggagtgccaggcgcagagagactgtgcttactattgttgctggttaaatagttattgaagtcatttgaggtataggcagcgccacgatcggtatgaatcattggtgcgaaggtcccaacttgcttagcggcgcgtttaaaggcttcaattgcggcttctgccgtctcagttggtgaaatatgataactgagcgcataacgaccgtacaaatccaaaactacgtgcaagcgaactttgttgttgcgaccataggttagttctgtcgtatcggacacccaaaccagattaggcgctatctgaataaatttccgttccaataaactatcctcttggtactgttgttgttctttcttgcggctgcgctttttctgacggacatcagctttaatgccgtgtttccgcatgattcgacgcacacgcttaatattgatacgaaagtcaaacgaaaaggtgtattctggaatttcttgatttttcccattctcattgtttaaaatcgcggttacttttttatgaccggcacagttctgatggcgtttttcaatctgatagattgcttccaaaattgcctggttctcaatttctctttgtgttggctgtcttttgagccactgatagtatgatttgcgtgaagctttggcaattttagtcagttcgctaacggaacctgcggtttcgttgattaattcttgaaccgcttgatatcgtccggtcgcttcaccccccgattgcgtatttcgactaatttttttgcgaatgcgatctcaagctccatttc

SEQ ID NO: 1902 - DNA, 520 bp, Unknown
  gut microbiota DNA sequence
caaaatcgcggttacttttttatgaccagcacagttctgatggcgtttttcaatctgatagattgcttccaaaattgccttgttctcaatttctctttgtgttggctgtcttttgagctactgatagtatgatttgcgtgaaactttggcagttttagtcagttcgctaacggaacctgcggtttcgttgattagttcttgaaccgcttgatatcgtccggtcgcttcaccccccgattgcgtatttcgactaatttttttgcgaatgcgatctcaagctccatttctcgattgattttctttagtcttttaatttcagcttcaaatcgctctttttcggtcatctcttctaaagctttttgtggcttgcgatgcccacgattatctttcaaggcttcccaactgtcagctgcctcatggtatttgctaacccatgagtagacacgctgatagcttacattaaactgaatttttgctccttggtagtcattgtcatggtccaagacccactgtacgattt

SEQ ID NO: 1903 - DNA, 409 bp, Unknown
  gut microbiota DNA sequence
gataaggaaggaggcaaatatgtgcatgttgattgggacgaagtagcaagtgtttgtggtgtaatttctggagtgattgctttactggtttgggttactaaaacaacttttaaatcatttctgacaccagtaactcaagaaatccgccgattaacagatagtatggggattttaaataatactatcaataagcagacggatcgtcaggaagagtttaatcgtcgcctagaaaaacattcagaagaattaatttctcacgatgaaagaattaagcatctggaggatggtacaagatgaaagaaattaacaatattgtagaatggttgatccagtcgggagcgctcgttgcgctcttttcttttgcctggaaatatgttaagccgtggctagatgctaagcagacccacgc

SEQ ID NO: 1904 - DNA, 131183 bp, Unknown
  gut microbiota DNA sequence
ctttcacgctcttgttaatcgcgttcaagcaaagtaacgctctcaacatgcggggtctgaggaaactgatcaactggctggattggcttgacgacatgatagccgacagaggcaaagcgctgcaggtcgcggaccaaagtggcaggattacagctaacatagataatcttagctggcgccatcttgccggcagcatcgatcaaggattcatcaagacctttacgtggtgggtcaacgatcaagacatcgggcttcaagccttctttttgccatttcgccatctgttcttcggccttacccactacaaattcggcattatcgatctgattgaccttggcattttgcttggcatcttcaatcgcggctggaacgatttcaaccccgtagacctttttggcatgcttggccaccgccaaagaaatcgtaccaatgccacaataggcgtcaatcacagtctgcgtaccatccagtccagctgcttcaattgccgtttgataaagcttttcggtctgttgcggattaacttggtaaaacgacagcggcgaaatcgtaaagtcaatgcccaggagctggtcatgaatcgtatcgctgccccaaagcgtatgattctccaatcctaagagcttgttcgtccgcttggtgttaacattttgcacgatgctcttgacctctggcaccccgctgacgatcccggctgcgatttcttcggcatgcggcagctgtttggtattggtaaccagcaccaccatgatctcatgactgtagtagccgcgccggaccatgaccgttcgaatgcagccgcggccagttctttcatcataggcacgaatgttgtatttccgcagcagatcacggacgaccagaatcgcctgatcgattttcggatcttgaatatagaaatcctcaatcggtaccagatcatggctgccccgcttataaaacccggtctgcagctggcctcgcatatacttgaccggtacctgcgccttgttgcggtagtgatacggctggtccatccccattgttggcgccaccttcaattcatccaagtgagcctttttgagcagttcttcaatctgatgctgcttaaatttcagctgcgccggatagctgagaattcccaagggggcgatgccggttttcaaataacgggcatcattgatctcaacgcggtccggacttttggtcaacagctgctgcagctctccccaggcaaatttagctgtcactttggtaatcttgatttcggcctgttcaccgggcaagacgtacggcacgaaaaccggataattatcaaccttgacgacgccattgccttcataggtcagatcagctaccgttgccgtcaagacctcgcctttatgaaccggtacagtgatttttgccatgtttttctcctttagcaaacacagggactgctgacaagattgcccgcagcccctgtttggtttcaattatttttgagatgcttcatcatcgtgaatattgtcgacttcacgtacaaagtcatcttccacgcgcttcatatccggtgacatggtaattgcatcatccggaatctcatcaaggttggcaactacttccaagtgctgcttgaggttgcggaaatgcatcggcgcgtcgccaccatactcgccatccagattgatcatcacacgatcttctgaattgacgggcgttatgtcgatctcgctggccttggcgtaaataatgccaggatcgccaatatgcttaccttgcagtgccttggccatcaagcgcatcatgccgatcagactgctctccttgacaatgatcatcgtaaacttgccatcatcaagcgcggcgtccggtacgatctgttcaaagccgccgacggaattggtcagcgcgatcagaatcgtggaggcctgaccacggtattcatgaccatcgtacttgatgtccatttcaaccggcttgattcttggcagcagttcggcccctttagccagatatgccaaatagccaaacagcgacttcatctgtgaaggcacctcataggtcagttccgtcaaggtccccccggccgcaatgttcataaagtagttgtcgccagcctgaccaatatcgatcttgaactttttgtttttgcgcaagatcagcttggccgcagcgatcggatcatcacgcggaatccgcagggcacgcgcatagtcgttggtcgtccccgccggaataatcgccagggcaggacgatgctcaagtccggcaattccgttgacgacctcgcttaacgtcccatcgccgcctgcagctacgatcaggtcaaagccttccttagccgcgcgcgttgcttcgttcttagccgaattaggcgccggcgtcgtggcaaacgcactggtttcatagcccgcctgttcatagaccgctaaaatgtcaaccaggtcgttgcgcatggcttcacgccccgacgtcgggttataaataatccgtgctcgttttcgcatagtttcctccgccatcaaatcagtttacttttcgttcaaggccttcatcaaaagcttgttgaccacgcctgggttagccttaccgcgcgtctgcttcataatctgaccaactaagaagccgacagcccgatccttaccattcttgtagtcttcaatcgactgttggttgttggccaaaacttcatcaacgattggctgcagcttggctgggtcggaaagctgtaccagaccattcttttctgcgtaggcagctggttcttgaccatccagaattcctttaaagactttcttggccatcttagaagaaatcgtgccgtcatcgatcagcttgatcatccctgccaggttggccggcgtcagcttggtatcctgcagatcaacctgcttgtcgtttaagtagctgttgacgtcgttcatcagatagttggcagctttctttggatcagctcccaaggcaatcgtagcctcaaagaagtcagacatttccttggtctgcgttaataccatggcgtcgtattcgctcaagcccagatcgttggtgtagcgagcgcgccgttcaccaggcatttctggcatggcatcttcaacttcttggatccattcatcgctgacttccagaggtggaatatcaggttctgggaagtaacgatagtcgtcgcttccttccttggtccgcattgagatcgtttcgccggttgcctcatcaaagcgccgcgtttcttgagcaatcgtgccaccagccatgatgaccttttcatgccgctgctgttcaaagttcagtgccttcttgacgaaattgaaactgttgatgttcttcatttccgtcttggtaccatacttgtcggagccgattggacgaatcgagatgttggtgtcgacccgcatcgaaccttcttccatcttaacgtcagagatcccagtaaactgaatccgctgccgcaaagcttccaagtaggccaccgcttcttctggcgaggcaatgtctggcttggagacgatttcgatcaaaggcgtgccctgccggttcaagtccacgtaagagtagttgctcgtgtgggtgttcttgccggcatcttcttcaatgtgcatttccttgatcccgatttttttcttcttgccattaacctcaatttcaatccagccatcatgtgcgattggcgtttcggattgggttacctggtaggccttagggttgtcaggatagaagtagttcttccggtcaaagtgcatgtgctttgagatttgggcgtgcagtgccagaccagccataatcccatcccgcacgacgcctttgttcagcgttggcagcgtacctgggtaggcccagtcgataacattggtgttggcgttgggctcgtcaccaaattctactggcgttggactgtagattttagagtgggtcttcaattccacgtggacttcaagcccaatggtcgtttcaaagttcatcttagtcttgaccccctaactttggcatttgtttgtggaagtcggtcgtctgttcaaagacataaccggcattgtagatcgtttgttcatcaaaggccttgccgatgatgtgcagaccaactggcagaccattgtcaaagccggctggcagagacattgccggcaagccagccatgttaacgggaacggtcaggatatcgttcatgtacatcgtctttggatcggcaatctcagaaccgatttcaaaagctgggttagcgccggttggtcccatgatcagatcatggtccttcaaaacgttggcaaagtcttgcgcaatcagcgtccgaatcttagcagccttgttaaagtaggcatcgtagaaaccagcggaaagcgagaacgtccccagcatgatccgacgcttgacttcatcaccaaagccctgcgtccgtgacttgacgtagacttcttccagcgttttggcatctggagctcggaaaccatagcgaattccgtcataacgctgcaggttggatgaagcttctgatgaggccaggatgtagtaggctggcacgccgtatttggtatgcggcatcgaaacatccgtatcaatgatggcacccagttcttcaaagtgctttaaggcgttattgattaccgcccgcacgcctggctgaattccttcgtccagatattcttttggcacggcaattctaagccccttgacattcgtgttttcgttcaggctggcagcccagtttggcacttgacgatctgaagaagtcatatcgtgatcgtcttgtccactgatgatttccgtcagcagcgcgttgttcttaacgctgttggtgatccagccaatctggtcaaagctggagccaaatgcaattgccccccagcgtgagacccgaccataagttggcttcaagccgaccacgttgttgtatgatgatggcattcgaattgagccacccgtatcagtccccaaagcaccaatgacatcacccgccgcaacggcagccgccgaaccacctgaagaaccaccaggaacccgcgtcagatcccaagggttgtgggtcgtaaagaaggccgagttttccgttgagccacccatggcaaactcatccaggttggtcttaccaacattaatgaagtcttgggcattcagcttttcaattaccgtggcatcatagattggcgtaaagttttccagcatcttggaggccgccgtcgtctttaagcccttggttacgatgttgtccttgactgccagtggcgccccagccagcagcttgtccgccgcgattccttcattgtcgattgcttcggcacgctttaaagcttcatcttcattcagcgtgataaaggccttgacgtcatcatcagtttccttgatccggtcaaaggctgccttggtcagttccttggcgctgatttttttggtctgcaggtcttcatgcagctgagtcaagtcggtttcattgaacttcattattcgccgtcctcactttcatcatccatgattgctggcaccttaatcaagccgccttccgtgtcgggagcatttttaagcagggcttctcgctcgttgctcttgactgcaacgtcttcacgcataacgttgacgcgatccgttggcgaatacattggttccacgccatcagtattctgcgcctgcagttcttcaaacatatcgatgatgctgcccagttgtggggtgaacttagcaagctcggcatcattgaattctagtttggccaattcggcaacgtgcttaacctgctgctgatcgatctgactagccattctttctcctcttttccttaagttaggtattgcatacgttcatctattttatcacacaaagcccgctgtttttagcaaaaacgccaccgcaagcgcgatgacgtttaaattttattaatatgagctgaagacatgggttcggaaggtatttgaaccagaatcacggtagacgaccgcctgcatttcggaagacgattgaatcttgatatcgattggaattccgtttggcagatacttcttggccgcgcgtgcaatatattgcgtaaagctctgcacttcagactggctgtagaactgcgtcgtaaccgtaatgtgcatccccgaaagcgtgccattctgatattgggcctgagccgtcacgccgctaaggttcgggaagaagctttgaatctgactcttgaagttggagaagctcgtgttgtcagtctcattgtcgctgttggttgaagtagcgtcactggcttttggcagcaccttggttgagtagttcaatttcttccagctcttgatggtattgccgttgttcttgctataggcaaagaagctgccccctaccaggctgtcatttggcgcctgcttgtacaatgcaataacgatcggcacgtttttaagcgcggactttttgcgcagccgcgttaagatcttttgagcagcaatcttaccctgcttttgaatttcagcatccgaaagtttcttttggtaggtaggaccgtccgtcgtcttttggtagtagtagaccgagttgatcccaatcccaatggtaatcccctttaaggtcagcgaattgccgttttgctgcatgaagtcttgttcttcaatctgctgaacgtattctgggttcggatcgctctttttaccctgggcggcgtttaaaccggttggattgctcttggttttgcgtcccagccagttttcaatcgtatccgtactcagatactggccttcttggaaaatatagctcttagtcgaaaagacctttttggaaacttccgtcaagccggtttcaaaactctttaggttgtagctgttgtcattttggttgatattgacaccacgcgccttgctgaccttgtaatggccattttgaatgacgccttgatactgaccactggcagtccccgtcgtcgtaagcttgctggatgacgaagaggttttctttccaatgctgcatgaggccaaaagtaccgtgctcatcaacacgactaccgtcagcgtcagcttttttagcttctgtagtttcacgttaatcctccttcatcgcttgagcaaatcggctctcattccagacctcgactcccagatcctgggccttggtaagcttggagccagccttttctccagcgatgaccaaatctgtttttttcgacacgctgccggttacgctggcaccgcgttcttccaaccattgctttgcttgatcgcgcgtcatttcattgagcttgcccgtcaagaccacgcgcttgccctgccattctttggccgccgcgctgtcttgagcgatcggcgctggtccatggtattccagattgaccccggccgcctgcagctcttgaatcaattcctgcacctgctcgttggcaaaatagtttttcagactgtcggcaatcgttggcccaatcgtgttgatctcggcaatcgattcctcatcggctgctattattgctgccagagagccaaaatgctgggctaagatgcgagccgccttggcaccgacatgacgaatgcccaagccaaacaatagacgctcaacagaattattgcgactgttggcaatcgatgtcaataggttattagccgatttgggtccaaatttatctaatgttaataattggtcataggttaaacgatacagatcggcaacatcatgaaccaaatgacgatcccagagctgctcaattactcttggtcccagatggtcgatgttcatggcattgcgtgaggcaaaatgaaccagaccttcttttacctgtgccggacacattggattgatgcagcgcagcgctacctcatcatccaggtgaaccagtttggattgacagaccggacaaagcgttggaatctcatatggctgactgtcaaccggacgcttatttaagataacgcgtgagatctcaggaatgatatcaccggccttatgcaatagaaccgtatcacccaggcgaatgtccttgtcttttagatagtcgggattatgcagagaagcccggctaaccgtcgtcccagccagctgaaccggatccatcactgcagtcggcgtgacgttgcccgttcgaccaaccgtccactcaatatctctgactacggtagcctgctcttcaggtgggaacttataggcaatctcccagcgcggtactttaaccgtcgcgcccagtgcctcttcaacggcgagatcgttgactttttcgacaatcccgtcaattccatatggcagatcatcgcgcttggccgtgtactcatcgatataggccttgatttctgcttcattatgcacgacacgattgaattcattgacgtgaaatcctaattgccgcatcttatccaaagcctgggcctgagtcttgacgcccagtttttcatattcgggaatgtagtacatgaaagtatctagttctcgtttggcggtaactttggcatccagctgccgcagactgccagccgctgcgtttcttgggttggcaaacgttggcagtccattggcttcgcgttcctcgtttaatttagcaaacgcggctttgggcatgaagcactcaccacgaaattccagtgacaagggctcggcaagcttttgcggaatcgatttgatggttttgacgttttcggtgacgtcctcgccaatcatcccgttaccccgtgttgaaccctgcacgagacgaccattttcataaaccagtgacagagaaaggccgtcaatcttcagttccagattatattctgtcgtcccggtaaaattaggattatcctgctggcgagcattaaagtccattaattcggcgacggaaaagacatcccccatcgaaagcattggaatggcatgttcgactttggtcaagacggtttccgccgcacccccgactttttgcgttggcgaatcaggcgtgatcagttcggggaaacgattctcaatgtcaaccagccgctgataattacggtcataaacatagtcctcaacggtaggcgcatcctgttcataatattccttgccccactgcagcagctgggctttcaacggaccgatttctgccgtggcttctttgagcgtcaagtcattgactgatttttgttctgtcattgcagacctcgcttttaattaaccttggtaattggcgcaaactgagctagcaagcgtttaacgccctcgtttggaaaggcaatatccaattccatgtcgttgcctgagccattaacggaaacgaccatgccttgtccccatttcttatgctgaaccttgtcgccgactttccaggccttcttatcagccccagttcccgtactttcctgcttagctgagtgcttcaggccatgtacgcgccgctgagccgtaaaggttgttgcctgagcagctgccttggcaaacggcgtgttcatactctttgccttgcccgagccgtccgcgttttcaaatttgatcagatcatcattgatttcttcgacgaactgcgaaggctgattgcgctgcacgcgaccatagagcatccgtgagtaggcattggtcagatacagcttgcgtttggcccgcgtaatgccgacatatgccagccgacgttcttcttccaattccttttcattgctcaaggaacgatagagcgggaaaatgccttcttccattccaaccaaaaagatcaccggaaattccagacccttagcagcatgcaaggtcatcaaggttaccttaggtgcttcttcatcaacgtcatcctgatcagaaaccagtgccagatcagacaggaagttcataagcttttgccgattatcgccttcatcttcgccatgtttttgatcatattcttgagttaccgatttgaattcttccaggttttcctgccgggttcgcgcctgcagatcattttcggctttcagcatctgcagatagccgctcttggtcaaaatctcatcggtcagttcagtgatggtcagataatcggcctctttggtcagatcagccatcaaacggccaaagtcttctattttagctcgaatccgcgtgctgatcgcattggccagcgtgacgttttgagcggcttctaatagcgaccagccattctcattggcaaactgccgcaatttgtcgatactgcctgggccaatcccacgtttaggcgtattgacgacccgctcaaagctcatggcatcgcgagggttgacaatcaaggtcagataagccagaatgtcacgaatttctttacgatcatagaacttatggccaccaaccatggtatatggtacggttgacttcataaacgtttcttcgatcatccgtgactgggcgttggtccggtataaaacggcaaaatcgttatagtggtagccatgttcgctaatctcagcttgaatcttgctgacgacaaactgggactcatcatgttcattttgggcccgataataagaaatcttgtcgccagtaccgttttctgtccacagattcttttccttacgaaccaggttgttggcaatcacttcgttggctgcttttagaatcgtctgggttgagcggtagttttgctccaacatgactgtatgtgcttctggataatcgcgttcaaaattcagaatgttgttcatgttggcaccccgccagccgtagattgactggtccgcatccccgactacgcacagattcttgtatttagccgccagcagcgtaaccagttgatactgtgcgtcattggtgtcttgatactcgtcaacgtgaatatagtggaacttattttgataatattccagcgtttctggatccttttcaaacagctcaatagttttcatgatcaaatcatcaaaatccagcgcctgactgttttccagttccttttgataaagcacgtaagccttggccacgatttgattgagcggattattggcatgactgttgagcgctgcatagtctgttgccgtctgcattgcatttttggcgttggagattgcactcagaattgcccgtggatcatattttttagtatcaacgttcagctcactgcagatccgcttcatcaaggttcgctgctcgctggtatcggcaatcgtaaaggcacggttatagcccagcttatcaatgtcgcgccgcagaattcgcacgcacagcgcatgaaaagtcgaaacccagatatcacgagcgctttcgcctaacagcttgcccacccgctcctgcatttcacgggcggccttgttggtaaaagtaattgccaggatattccaagggttgaccccctgctcttcaattaagtaggctactcgatgcgtcagaactcgggttttacctgaaccggctccagccatgaccaaaagcggcccttccgtagttaaaacggcttctgcctgcttatcattcattccttgcagtaattgacttgtcacgccgtatttccatcctctcttaaaattatcgtagactttattatagcaaattcccgcggctcattaaaaaacgagcaacgattgctcagcgctgctcgcataaaagttattgctgatcaggagccgggtttgaatcagttgatgctttttcattccaaacctcggtatcctcgatttgatgctgtagttcttccaggctggacttaccgactgcccagacgaatccggctactgcttgcggatcctcccgcacttcggtaaagaagcgatagtgccagttgtcttttaacagccattgccgctgcagggctgcgcgttgtgctacccgtgccagcatcatcacggtcggctgcagcgtctgaacctcaaaaagcggcattccggcaattgcccgcaaaagctgctcagtttgcgaaacattagtggtatagtcaaaaacactgccataagtcgacagccccggctcaattccatggacatacagattaccagttgccgttacgtagaagtcgacacgaaagacgccacggtactgcaggttttcagctacactggttacgatccgttccatttcccgggaaatatccgcgctcagattagctggcgtcttgactcccagcagctgctcatcggcattcagcatcagttcaatcgcaggaaacacctgaacgttttcgccatcggtagctgccagcatcgtatattcagcagtgtgatcaatccaggattccaaaagataggttcccgcattgataaaatcagctgcacgggtaatatcagactgtttaacgattctcatcgactgttcgccaatccctctttgaattggttttaagattgctggatagccgattgagtcaatggactgatagacgtcatccaagctgattaccgtaacgtatggtgctacattaacgttgatctgatccaaaaatgcccgctccatcaaacggtcctgaacgatttccaacgcgttgactccttgtggcagataggcatcacggcttagatagcgcaagacgctggagtcgatcaagtcgttggcatagataatagcatcacacgtctgggcaaacatcgtcagtttttcctggttattgtaggccccactgatcgtaaaatctgcctgtttagttaaactgggctgtgcatgatcgacataaacgccaacgttaaagccagcccgcttagcagcagtaatcagggtgctgccgttgcggtccaagccgataatgcccagcgtcgctcctggatataatgcatttgtactgctcattagcccacccccattagcagttagtcttcaaattcagctttgccattggctaatgagctgaccttagccaatgattcgatgcgcagtccctgtttccgcagttcctgaccgcctttttggaacgtcttttcaattacgatgccagcaccggcaacttcaacgcctgctgcttgagcaatctggagcattccttccagtgcctgaccatttgccaaaaagtcgtcaatcagcaaaaccttgtcagttgggctgacgtattttttggagattgagatctgattggtcgtttccttagtgtatgaataaacgctggccgtatacagatcatcttttaaagtcagacttttatgcttacgggcaaaaatcaccggaacattcattgccagcccagtcattacggccggtgcaattccagaagactcaaccgtccaaatcttggtaacgcccgcatccttataaagcttggcaaattcttcacccatgtgtttcattaggactggatcaacctgatgattcaaaaaggcatcaacttttaaaacattgccaggcaaaaccgtaccatactctttaattttttcctgcagttctttcatggagtcctccttaacggcttatttatcataattgtacaacttataggtctgaattactgaaattaatttttgggcgtaatccggatcggttgcataatgggcctcttgcagcgccttagcagcttctttgtagtcggaagcttgggtaacggcttgatagttttgactgttgtagtccgtcccattaatcatcagcttggtgtgatccttgattgactcgctccagctggaataaaccttaaaacggcccttagtcgtgatccatttaccatttacgtattctttggtcgtcagaacctgggatttttcgccggttcctttgatgccaaacaggttgtggtatttagccgccaacttgctgctgccccagtcggattccaggattgcctgggcaatggtaattgaagctggaacgttgtattttttctgcattgcctgagcttcaggagcaacctgcttgataaacagacgcttggcattttgttgacgttcgataatctgctgttgctggtagcgttggtagaaatgatgaccaacgtaggcacccaaaaagagcacgatgaccgttaaaataccaatcagccagcgatgttgaaacagcttttttgagtgccgcgtttttgagcggcgtttctttgccacaaataattccccctgtttgtttaacgtaatttaaagttctattttgcattttaccagactaaaatcatttaaaaaactgtgaaatgctaaatttgcaaaaatataaaaaaaagcaccagctggatgctgatgcttgatttttttgatcgcaaatgatttgtgaaccatatgtgaccattccaaatctctgaagtgttgatattaagccgtttccggtaaaaatattaacgcttggagaattgtgaagccttacgagccttcttcagacctggcttcttccgttccttcatccgagggtcacgagtcaacagaccggccttcttcagagcatcccggaaatctgggtcgacgctcagcagggcacgagcaatcccgtgacgaactgcgccggcttgaccagagaagccaccaccgcgaacgttgaccagaacgtcgtattgaccttccgtcttcgttgcagcaaatggttggttgacgatagcacgcaggttggcaaacggaatgtattcttcgattgccttgccgttcatcgtaatgttaccagaacctggtaccagacgaacccgtgcggtagcatccttgcggcgaccagtaccactgtattgaacttgttgagccaattccgttccctccttagattaagttcgtgatgtcaagcacttctggttgttgagcagcgtgcttgtgatcttcaccagcataaacatgcagcttcatacccatcttgcgaccaagaggagtgtgtggcagcatgcccttgatggaatcttccaccagcttttctggttcgttggcgcgacgttcgcccgccgtcttttgcttcagaccaccagggtagtcagagtgacggtagtagatcttgtcagcagccttcttaccagtcaacttaacttcggcagcgttgataacgatgacattgtcaccagtgtcaacgtgtggggtgtaggttggcttgttcttgcccttcagaatggaagcaacaacggatgccagacgacccagggagatacccttggcgtcgacaatgtaccatttgcggtcaacttcaccaggttttgccatgtatgtcgttctcacgattaagtcctccaatttttgtctttcttttacaaataattgtgtaccgagtaattagatggaaaagaaataccattcgttattttacttgatagattccgattcgtcaatggttttgttattctgatcaccataatcaacgctgaccagataaaggccgctggctggcgctgtcatgcgggcctgattgcgatccttagcagccaaaaccctgataacgtcatcgaccggtcgttgattgctgccgatctctaataaaaaggccaccataatgcgaacctgattatataagaagccattcccgacaaagtcaaagacgatctcattattggcctcatcacgatgcacatctgcctgatagatcgttctgacattgcttaaagcctgacttcctgatgccacgaaactggtaaaatcatgctcgccaaccaggtcttgtgcagctttttgcattttagccacgtcgaccggatatttgaaatgagccgtatagttgcgtttaaacggattaacgaaatcactctgatcaactcgatagcgataatgctttgaatgggcattaaagcgagcgtgaaagtccgggctgaccaattcggcttttttaacaatgatgtccagcggcaaaagactgtttaaggctttacgcattgaatcattccccagcttatatgggcagtcaaaatgcgccacttgattgagcgcatgtacccccgcatccgtacgacctgaaccaattacggacaatggcggttctggattcttggcaatcttgttgacggcatttttcaaggtctgctcaaccgtacgtttattaggctgaatctgaaaaccggaaaaattggttccatcgtaagcaaaagttattttgtagcgatacacttgataattcctttcaaattaaaatagcattcctgctgacatcagccgcgtcgccaggagaataatggtggctaatgtcaggccaatcatcgccagcgtgtcatttcgatgccaatgcagcacccgatatttggtccgtggcgcatctggatcatagccccgggcctccattgcagttgccagctcctcagctcgtttaaatgagccgacaaacaatggaatcaaaagcggctccagtcgtttggcacgctcaatcaaactgccttcgtcaaagttgacgcctcttgatttctgggcattcatcactttggttgtttcatccatgatggttgggataaagcgcaaaacgatcatcagcatgacggcaatctgattaactggcacgtgcagataacgcaacggcttcataaatgcttccatggccgccgctaattgaagcgttggcgtagtggcagtcaaaacagttgagatggtgatgatcagaataaaccgcgccaaaataattgccgactgataaaagccgccactggtaattgccaaccagccccactgccaataaacgtgcccaccgctgctgaacagcagttgaatcgccactgtaaacaaaatgatccaaaataacggcttaatgccgcgccaataaagcttcaacggcagtctgctcaatgcaatcaaggcccccagcacgataaacagccacaaatatcccagccagttgcttgccaaaaagacaatcaccacgtaccaaaaacagctgaaaagcttaacgcgcggatcaagatgatgcagccacgagcttccgggtacgtacgcgcccagtattaccttggcattacccatttgctcgtcccccttgcttaagtctaatcgttaattgatccgccagtttttcaatcgtcagcggtatgctatccgctaagcgcaggccatgactttgcagctgttgagcaaacgcaacgctggctggtggcatgatgccagcttcattaagcagagctgcattgctgaacagttcatgcggcgtcataaaagcagctttttgcccatggttcattaccaaaacatgatcggcaaaacgagctgcctgttccatctggtgtgtaatcatcaaaatggtcgtacctttttgatgaagctcatcaaccagatctagcaagtcggtactggcttgagggtctaaccctgcagtcggctcatccaagatcaagacgcttggatgcatggccaaaacaccagcaattgccactcgccgcatttgcccgcccgaaagttcaaacggtgatcgttcattgatgtcactaggcagttttaaagcttctaaagccgtcagtgcctgttctttagcttgagcaggtgaaacacccagatttagcggaccaaacataacgtcttttaaaaccgtttcagcaaacagctggctctcgggaaactggaacacatagccgaccccttgccgcagtcttgccaacgccttcttgtcagcccgattgtcaattacgacctcgcctacgcgcagctgaccatgcgttggcaccaataatccatccagcatggccatcagcgttgacttgccgctgccagtatgcccgacaattgccgtaaaactgccagtttcaagctttaaggaaaaatccttgattgcccaggcagccattggcgtatcggcttggtagatataatcaacgtttaagaattcaattgctgacatagccactccaccatccgttctgaatctaaatattgtgctggcgcattgatcccccgttttttcaacagcagctgcagttgttgagcaaacggcaatgccagatgcagatcagccagtttaaccggatcttgcagtaaagtcgctgtttcgccctgcattgcgatcttgccatgatccaagaccactgcgtaatcgctaagagaaagctccactgggtcatgcgtaattgaaattacagtcatatcacgctcagcaatcaattttttcaacagtttcaacaagtcatgccgcccttttggatctagcatgctggtagcttcatctaaaatgatgactcgtggatcgattgctaaaatcccagccaaagcaacccgctgcttttgcccaccagaaagcattgctggctcactgtcagcaaagtcctgcattccaacggcttttaaggattcgtcaatacgagcctgcatctggtcatgtggtatctgatggttctcaagaccaaatgcaacatcatcggcaactgtagtcccaacaaactgattgtcaggattttgaaacaccaaaccaatttgctgtcgcagctgctgcagatttttttcatctaccaacagctcatcaatcttaatcgtaccgctgcttggtattaaaagcccatcaatcagtcgcgccagagtacttttgccgctgccgttatgtccgatcactgccgtccattttttcatgggcagctgtaaggttacatcatttaacgccgcctgtgtgcgatccggatatttaaacgaaaggtgttgaatatcaatcaatcacgtcacccatttctttttgaactcattattttattttaacagtgaagcagccgatttaaaaatatacaaaaaaatcacttacaaccggggtgcacgaagacataaacgtcccgcattcgagctagactaggaattatgattccaccatcgtagcgctctataccaccagctgtagtgattctttattacgtattgaattgacgaaaatgattagtcgacaaattccagaacaaccatttgtgcaccgtcaccacggcgaggcatggtcttcagaatccgcgtgtaaccacctttacggtcggcaaactttggtgccagctcttcaaacaggtattgcagagctgattgtacgcgaacgttgtcgccatcttccttaacgtcagcaacgacattgcgcaggaaagcagctgcttgacgacgagaagccaagtcgccacgctttgccagcgtaatcatcttgtcagcagtcttgcgaacttccttagcgcgagcttcggtagtcttgatgctgccgttgacgatcaggtcagtggtcaaatcacgtaataaagccttacgttgtgaactagtacgtcctaatttacggtaactcatgaagtggttccctccttttaattgttttaattagtcttcttggcggaagcctacgcccaagtcggccagcttcagcttgatttcttctaaggacttttgacccaggttgcggaccttcatcatatcagcttcagtccgttcagtcaggtccttaacagtttgaatatcagcacgcttcaagcagttgtaagaacgaaccgacagatccagttcttcaatcgtcttgtcgagtaccttttcttggtgagtttcttcgcgttcaaccatcactttggcatcttttgcttcttcagtcaggttgacaaacatctccaagtgttcagtcaagatcttggcagcaagactaatagcagccgttggggtcaatgaaccatccgtccagacatccaacgtcaacttgtcaaagtcgttgctttggccgacccgcgtgttttctacggtgtagttgacccgttcgataggggtgtagatggagtcaattggcaaagttccaatttcaagaccgctcaaacgcagcttgttttgatcggctggtacatagccacgacccttatcagccgtcatcatgatgtgcagttcagccccatcggcgaccgttgcaatatgcaagtcagggttcaagatcgtaacgtcgccatcgccttggatgtcaccggcagttacttctgcaggacccttgacatccaattccaaatctttggcatcttcagattcaatcttcaaagaaaccttcttgagattcaagatgatctgcgtaacgtcttccgtaacgccttgaacggtactgaactcatgaagcacaccgtcgatttggatactggtaattgcggcacctggcagagaagccatcattacacgacgaagagaattccccagagtggtcccatagccacgctccagtggttcgacaacaaacttaccgtagttgtcagtttcttcgactttgtgaatgtttggtttttcaaattcgatcattctactctgtttcccctttcaaaacgtggtccgtagattgtttaaaagcacctggccaatgataatttcgccgttgatgcgattagacacgacgacgctttggaggacgagaaccattgtgtggcactggagttacgtcccggatggcagtaacttcaagaccagttgcttgcagagcacggatagctgattcacgacccgaaccagggcccttaacttcaacttcaaccgtcttcataccgtgttccattgcttgcttggcagcagcttcagaagccatttgagcagcaaatggagtagacttacgagagcccttgaagcccagcacaccggctgaggaccaagcaacggcattgccttgcacatcagtgatcatgatcaacgtgttgttgaaagttgagtgaatgtgtgcaacaccagtttcaacattcttttttgcacgacgcttgcgtgaaccttttttggttgccataaaactaactaacctcctttatagtattgattacttcttcttgttggcgatagcgacagccttgcccttgcgagtccgtgcgttgttcttagtgtgttgaccacgaactggcagaccacgacggtgacgcatgccacggtaagagccgatttcttgcagacgcttgatgttcagggaaacttcacgacgaaggtcaccttcaaccttgagttggtctacttgaccacggatcttttcttcttgttctggcgtcaggtccttgacacgaatgtcttcagaaacaccagcagcagccagaaccttcttagcagtcgtgttaccaataccataaatgtaagttaagccgattacgattcgcttgtcacgaggtaagtcgacacctgcgatacgagccattgagttacacctccaattctaaaatataattacttgccttgacgttgtttgtgctttgggttagggcaaattaccattacccgaccattgcgcttgacgatcttgcacttttcgcacatccgctttactgatggtcgtactttcattgtaaataatcctcctaaaaatgattttagactaaagacttatttgaagcggaaagtaatccggcctttggtcagatcatatggggacatttcaacctttacacgatcaccaggcaggatcttgatgtagtgcatccggatcttgcctgagacatgtgccaggatttcaaccccattttccaattcaactttaaacattgcgttaggcagggtttcagtaaccttaccttcgacttcgataacatcggcctttgccactgaacggttcctccttgccggtaaaattacgtaaaaacggtggaaagcggcaggcgccttccactgcaagctagataaaccttgcgtagtataccatagagtacacaattacgcaaggattcaactaacaatgagtcttaaaggctagtcagaacttccttaacggcttgataaaccttatcgatgtcttgttcaccatcgatctcatggagaatccccatttgcttgtaaaagtcgatcagtggcgtgttcagtttaatgttgacgtctaaccggttcttaacggttgcgggcttatcatcatcacgttggtagaagtcgtgggaaccacagacatcacaagtaccttcaacctttggcgggttggaaagcgtgttgtaggtcgtaccacacttccggcaaatgattcggctgctcagacgcttaaccagcacttcagggttaacatcaatgtcgattactgcatccaacttacggccatcatcagccaacatcttgttgagggcttcggcttgcgccaagttgcgagggaagccatccaacatgaaaccttgtttggtgtcatcttgagccaaacgttccttcacaatgccattcgtaacttcgtcagggaccaattcgcctttatcgatatattttttggcttccagacccattggcgtttcgttcttgattgctgcccggaagatatcaccagttgaaatatgtgggatatcaaagtccttgacgatttcttgggcttgcgtacctttaccggcaccaggcagacccatcaaaacgaggttcatcgtactcatttgccaattcctcctattttattcgcggataaatccaatatactcacgcttcatcgttaaactacgcatctgccgaacaacgtccaaggcaatttgaacgacaatcaacaaactggtaccacctaaaccaattgattggctaaggttccagatgttgctggccagcagtggaatcaatgaaatcaatcccaagaataacgatccaaccgtcgacaaacgcatcaacagtcctgaaacaaagtcctgcgtgcctttgcccggccaaacgccagagatgtagctgccttgcttttgcaagttttccgcgagtttttctggattaacttgaacaaaggcgtagaaaaaggtaaatacaacaatcaaaaatacatacagcgcaatgcctggaccagactgcatattaaaaatcgttgtcataacctgataccaggtatcttgactatgattttgctgaaaggccattaagatcgtttgcggcgtcgagataaacgagccggcaaagatcactggaatcaccccagaaacgttgatctttaatggaagataactgtttgacggcgaagtagttgttcgccgcgtgtattgaattggcaaacgccgttcagcctgttgaaaccaggtaacgaacgtcacgattgccaatatcgcaaccacaactagggcaataaagccaattcccatccagaggtttgcgccagattcaccagtgatctgatcattccataactgcttgatcccacttggcatttcagcgatgatcccagcaaagatcagcattgaaacaccattaccgagaccgcgctcggtaatcatgtcccctaaccaagtagcaaacatggttccggcagttaagatcagaccaatcgtgatataggtttccacccccggattgttaaccagtttaatcgtgcttaatgcgttaaagcccgcggtgatcccaatcgattggataaaaccaagaacgatcgttaaccatcgcgtagcctgattaagcttccgtcgaccaacttccccttgtttgctccattcgacaaacttaggaacgatatccatttgaagaagttggactacgatttgagccgtgatgtacggggaaacccccatcgcaaataatgagtagttatccaaaccgccaccactgaaagtgttcaagatcgatgccaagccggtactggagatctgctctaaggcagcagcatttacaccgggtaccgtaatagaggcacctaaccggtaaacaatcagtacaaacaaggtgaatagaatcttcttacgaatatccttaaccttgaatgcatttttgacggttgtgaacaattacatcacctcagttttaccaccagcagcttcaattgccttaacagctgaagcagaaaacttgttggctttaacggtcagcttcttggtcaacttaccattgcccagaatcttaacaccgctcttaacgttcttgatcacgccgttttccagcagaacagctggcgtaacttcggcaccatcatcaaaacggttcagcgtcgtcaggtttacaatagcgtattccttacggttgatgttgctgaaaccacgctttggcatttgacggtacagaggcatttggcccccttcaaagcccagacgagtcttaccatgagccttttgacccttagtaccacgaccagaagtgaaaccgtgaccagatgacagaccacgacccttacgcagacgcttgaaacgggaaccagcagctggcttcaattcgtttaatttcattaggtaggcacctccttattgtagatttttaattacttgacttcttcaatggaaaccaagtgagcaaccttaaagattgcaccacgcgttgccgcgttgtctggcaggacattggagctgccgatcttgcccagacccaatgccttaaccgtacgacgttgagttggcttacggtgggcaacactgtggatcaaagtaactttaactttagccatgatctatgtcctccttattctgccaggtgatcaacggagacgccacgaagttgagaaacttcttcggcactcttcagagccttcagaccttcaaacgttgcgcgaacaacgttgattggcgtgttggagcccaaacgcttggaagtaacgtcggcaacgccggccagttccataacgttacgaactgcaccaccggcagcaaccccagaaccttcaacggctggcttgagcatgatcttgccaccaccgaaagtaccaataacttcgtgaggaatggtcgtaccaacgattggaacttcaatcaggttcttttgagcagctgcagaagccttacggatagcttctggaacttcttgagccttaccagtaccaaaaccaacgtgacccttcttgtcgccgacaattaccaaagcggcaaagcgcagacgacgaccacccttaacaaccttggtaacccggttgatcgaaacgacttgatcttccagatccagcttggatgggtcaatgtaagattgtgatgccatacaggttattcctccttttccttagaattgcagaccgttttcacgagctgcttcagccagggcttgtacacgaccatggtacaggtaaccaccacggtcaaaaacaacactgctgatgttcttttctacaccgcgcttagcgatcagagcaccaacaccggcagcttgttccgtcttagtgttgccactgacttcactgtcgagagttgaggcacttgcgagcgtcacaccctttacgtcatcaatcaattgagcgtaaatgtttttgttagaacggtaaacacttaaacgtgggcgctctgcagtaccagagatcttaccgcgaacgcgcatgtgacggcgttgacggatcttgttcttatctggtttagaaatcacaactgtcacctcttgattcttttaattttgattttaaattatttatgcagctaagctgctagacgattacttaccagtcttaccttccttacgcaggatgtattcatcttcgtaacgaatacccttacccttgtaaggctctggtgaacgaacggcacgaacttcggcagcaaattggccaacgtgttctttgttgataccgctgatttcaatcgtcgtgttgtctggaacgttaacttccagatcttctggcttttccatttcaactgggttggagtaaccaacagtcaggatcagcttgctacccttggcttgagcacggtaaccaacaccgaccagcttcagagtcttcttaaacccgttaacgacaccttcgatcatgttgttaacattggcacgcgtagtaccgtggaccatcttagccttcttgtcgtcattttcccgttcaaacgttacttcgctgtcagtaacgttcatcttgatcaatggggagatttcgcgactcagagtacccttaggccccttaacagttacgacgttgcctgattgagaaacctctacgccttgtggcagttcgattgccttgtaaccaatacgactcatgtgtacacctccgatcttattttattaattaccaaatgtaggcgataacttcgccaccgattttcttagcacgggcaaccttgtcagtcacaaccccttcagaagttgagatgatggcaatacccaaaccattgagaacctttggcacagcgtcagccttaacgtaagaacgcaggccaggctttgaaatccgcttcagaccagaaatgacacgttcgccatccttgccgtacttcaggaatacgcggatgatgccttgcttgttgtcttcaacgtattcaacatcgcgaatgaaaccttcttgcttcaagatttcagcgatgtccttcttcatctttgatgcaggtacttctacagaatcgtggtgtgccatgttggcattgcgaatccgagtcagaaaatctgcaattggatcactcatagacatcgatattttcctcctttgtcggtgatttgtttaccagctagccttcttcataccaggaatttgtccttcatgggcaagttgacgcaagcaaatccggcataggtggaacttacggtaaacggagtgcggacggccacaacgaacacaacgcgtgtaagcacgcgtggagtacttggctgggcggttgcacttagcgatcattgattttttagccaatttgtggacctccttaattacttagcgaatggcatgcccatttgagcaagcaattcatgaccttcttcatcagagttggcagtcgtaacgataacaatgtccagaccgcgaacgtggttaaccttgtcgtagtcgatttctgggaagatcagttgttcgcgaacacccaacgtgtagttaccgtggccatcaaatgacttgtttgatacaccatggaagtcacgaacacgtggcagtgaaacgttgatcagcttgtccaggaagtcgtacatacgagtaccgcgcagcgtaaccttggcaccgatggacataccttcacgcagacggaagccggcgatggacttcttagccttagtgatcagtggcttttgaccagcaatcagacccagttcttcaacagcttcatccaacagcttggagttttgagtagcgtcaccgacacccatgttcaaaacgatcttgtcgatcttaggaacagccattacagaagtgtagttgaacttgtcagtcaaagctggacgtacttcactttcgtactttgcttttaaacggttttccatgagcaataattcctccttcccctaatttttagtcgatcgtcttgccagacttcttggcaacacgaacttttttaccgtcaacgaccttaaaaccaacacgagtaggttcgttggtagatgggtcaatcagcataacgttagatgcttggattggtgcttctgcatcaataatcccaccgtttgggttagcgttgtttggcttttgatgtttcttgatttggttaacgccttcaacgatcacacggttttccttgaccaggaccttcttgatggtaccttccttgcccttgtccttaccggcgatgacgcgaaccttgtcacctgtctttaaaaacatgtggtgtgcacctccttattttcggttaatcttacagaacttctggagccagggagatgatcttcataaagtcatcatcacgcagctcacgagcgattgggccaaaaatacgggtacccttagggctcttgtcgttgttgatcaggacagcagcgttttcgtcaaacttgatgtatgaaccgtccttacggtgcagaccatgcttcgtccgtacaacgacggcctttacaacgtcaccctttttgacaacgccacctggtgttgcttgttttacagtagcgacaataatgtcaccaatattaccggtcttaacacgggaaccacccaagatcttgattaccaagatttcgcgggcacctgagttgtcagcgaccttcaaccgactttcctgttgaatcactgttagtgtcctccttccatcagtaagtaagaataattaagaatacgaaatcatcacaaagcgggattaatcagctttcttaacgatcttaaccagacggaaacgcttcttagcagacagaggccgagtttccatgatttcaaccgtatcgccggactttgcttcgttgttttcatcgtgagcgtagtacttctttgagtaccgtacacgcttgccgtaaactggggcactcttgtaagtgtcgattacgacagtgatggtcttgtccatcttgtcggaaacaacgcggccttggtagaccttacgtgcattacgttcatcactcatgcgctaatcctccttttcgtattcttatttgtttaattcttgttgacgaagaactgtcttaacccgtgcaatgttcttgcgaacgctcttaaggcttgcagtgttttccaactggccggttgctaattggaaacgtaagttaaacaattgttccttcaattccttttcacggtcaagcaattgctcagtggttaatccattcagttcttgaacataatctttagtcttcattagattgtccaccttcctcacgctttacgatcttagtgcgaactggcatcttgctgccggccaagcgcagggcttcgcgggcaacgtcttcaggcacgccggcaacttcgtacagaatcttgccgcgcttaactggggctacccagccttcaggagcacccttaccattacccatccggacaccaacacctttgctagtgtaggaaaggtgagggaaaatcttgatccagaccttaccaccacgcttcatgtgacgcgtaatagcaatacggccggcttcgatttgacggttggagatccagtgggaatccaaagccttcagaccaaattcaccaaacgttacgttcttgccacccttggcttcaccacgcatgtggccacgttgaaccttgcggtgttttactcgcttaggtactagcatgttttatttcccctccttacttagtgtttttgtttgcttgcttctctggcaaaacttcgccacggtagatccaggtcttgatacccagtgcaccgtacgtagtccgtgcttcatcccatgagtagtcgatgtcggcacgcagagtgtgcagtggaacagtgccttcggaatatgattcgatccgagacatgtcggcaccgttcagacgaccagcaacttgaatcttgatacccttagcaccggcacgcatagcacgttggatggcaccacgcatagcacgacggaaagcaacacgtgcttcaagttgttcagcaacgcttacacctaccaggtgtgcgtctaagtctggcttcttaatttcaaccacgttaatgtggacgcgcttgccagtcaaggcgttaagttccttgcggagtgcttcaacttcagagccacccttaccgataaccatacctggcttggcagtgtgaattgaaacgtttacgcggttagcagcccgttcaatttcgatagttgaaacagaggcgtcagcaagtcgcttttcaatgtacttacggatccgaaggtcttcgctcaggtaagcagcgtagtctttttcggcgtaccacttagcagtccagtcgcgaatgaccccaacacggaaaccattaggattaatcttttgacccactattatccctcctacttttcagttacaacaaccgtaatgtggctggtccgcttgttgattggagaagctgaacctttggcacgtggacggaaccgcttcagggttggtccttcgttggcaaaggcttcgctaactaccaatgaagcccgatccaagtcaaagttgttttcggcgttagcaactgcagattttaatactttttcgacgtctgaagcagcaccattgggagtgaacttcagaatagcaaatgcttcggcaacgctcttgttgcgaatggtgtcaagaaccagacgaaccttgcgagcggaaacccggaccatcttggccgttgccttagctgacgtaatgttttcagccattgatcaaatttcctccttacttcttgcccgtcttcttgtcatcaccggcgtgaccacggaaagtccgcgttggtacgaattcacccagcttgtggcctaccatgtcttcttgtacgtaaactggcacgtgcttgcgaccatcgtaaacggcgaaagtgtaaccaatgaagcttgggtaaatcgtggaacggcgtgaccaggtcttaataaccgtcttcttttcgttatccttttgtgcgtcaaccttcttcaacagagaagcgtcggcgaaaggtcccttctttaaactacgacccattgttgtacctcctctcgggtaattagctatttgttactcattaacgagtgtgtggaccacgcttgcgaccacgaacgatgaacttgttcgaacgtgccttgtgtgagcgagtcttcttaccaacagtcttcttaccccatggagacagaggagatggcaaaccaactggagccttaccttcaccaccaccatgtgggtgatcgttagggttcattacagaaccacgaacgtgtggacgttgacctgcgtaacgagtacgaccagccttacctttgatgatcagggcatgttcgtcgttgccgacaacaccgatcgtagcacggcaagcagccagaatcatccgaacttccccagaagccagacgaaccagaacgtacttgtcactttccttaccaagcagttgtgcagaagcaccggcagaacgagcaatttgaccacccttgcctggcttcagttcgatgttgtgaataacagtaccaactggaatgttcttcaatggcagtgcgttaccaaccttgatgtcggcatctggaccggattgaacttgcataccaaccttcaggcccttaggagccaggatgtatgacttaacaccatctgcgtaaaccagcagagcgatgttagcagtacggtttggatcgtattcgatagccttaacggttgcaggaacgttgtccttgatccgcttgaagtcgatgatccggtattgacgcttcgtaccgccaccacggtgacgaacagtcatatgaccgtagttgttacgaccagcggtgtgctttaatggtgccagcaaagacttttccggggtcgtcttcgtgatttcagcgaagtcgaatccggtcatattacggcgaccattagtggtacccttgtatttgcgaattcccactgtgttttcctcctatctagaatttattcgttgtcgtcaccgaacagcttgatttctttagaatcagctgacagagtaacgatggccttgcgacggcgcttagtgtagccaacgtaacggccttgacgcttcttcttgcccttcaggttcatgatgttaaccttaacgaccttaacgtcaaagatttcttctacggcgttcttaacttgcgtcttagtagcgcgcaagtcaacgtcaaacgtgtagcgcttttcgtccatcactgcagttgatgcttcagtgataactgggcgcaaaatgatatcgcgtgcttccattatgcgagcacctcctctacttgagaaagggctgacttcgtgatgacaatcttttgactgtcaacgacgttcagaatgttaacgccagctggagttacgaccgtggtgttaaccaggttgcgaccagacagagcggcgttcttgtcttcgtcagaaacaacgaccaggaccttttcagaaaccttcaggttgttcataacgccggcaaattccttcgtctttggtgcgtcgaagttgatggattcaactacaacaaacttttcatcagcaaccttttgggacagagctgacttgatagccagttgacgaaccttgcgtggcaggttgaagttgtatgaacgtggagtaggtccgaagacgataccaccaccacggaattgtggtgcacggatggagccttgacgagcacgacccgtacccttttgacgccatggcttcttaccaccaccgcgaactgcggagcggttcttaacggcgtgcgtaccttgacgcatggatgcgcgttgacgcaggatggcttcgtattcagcgttttcgtttggttcaataccaaagatgtctgcgttcaattcgatggtgccgttttggctaccgtcttgcttaaataatgcaacgcttgtcatttactttcttcctcccttctgattagttgtgttgcttgctcaggctcttcttagtgttagccttcacagagttcttaatcgtaacgtaggacttgttagcgcctggaacgttacccttgatcagcagtacgttgttttccagatcaacctttacaaccttcaagtgttgcatggtaacagtgttgccacccatgcgacctggcaatgccttacccttgaatacgtggttgatgatggcacccaacgaacctggacgacggtggtaacgagaaccgtgagccataggaccacgacgttggccgtccttgtggatgttaccttggtaaccatgacccttagtgatacccgttacatcaacagtttcgccttccgcgaaaatgtctgccttaacttcgtcaccgactttaatgtcgtcccccagttcagcgtcgcggatttcaccgatgaagcgcttaggggtcgtgtttgcttttgctgcatgaccttgttcgggcttgttgcttaagatttcgcgcttgtcgtcaaaaccaagttgaacagcactgtagccgtcgttttcaaccgtcttaacttgcataacaacgtttggcgttacgtcgattaccgtaactggaaccaattcaccgttgtcagcgaaaacttgcgtcatcccgaccttcttgcctaagattcctttggtcatgagtacacctccaatttatttgttattagttttttaattacagtttaatttcaatgtcaacgccacttggcagatcaagcttcatcaaggagtcaaccgtcttaggggttggatcgatgatgtcgatcaggcgcttgtgggtacgcatttcaaattgttcccgagacttcttgaacttgtgtggtgaacgaatcaccgtgtacagagtccgttcagttggcaacggaattgggcctgaaacttgagcaccggtccgcttagcggtgttaacgatcttgtctgcagattcgtcaagtacgcggtgttcgtaagcctttaaacgaatgcgaatcttttgttttgccattttattccctccttcgtcagatttaaaatttgactagctccgtggaaattaccgccacgccctatggcaaagcggccgggtgtgtcgcaaccttccacatcacagctttcactgtttggctgaaccccggggcctttaaaatccccgtttctaagctcaagcacttatccataatactaaagaattgccgtcgtatcaaggttttttttgaattaattcttgatgatttaatttgtaacattcctgaaaattttttgacgcagatgcggcgcaaaaaaacagtcgaaatgtttttaaattaacggcagccagtgaacgactgaatggcaacagtctgccgagtattatcccacgtctttttaagcttgtcgagtcttttctcaaaaaaagctaaatattttttataaatcaatcttcaattttattgatgcaaatctggcacgatctattttatatagtagaaaataaaaaaactcgcctgcataacagcagacgagctttgaagcaaagaacaagattaactattctttgccgtttttcttgatgatgtcttcttgtacgctctttggaacagcagagtagtgatcaaacgtcatcgtgaaggtaccacgaccttgcgtagcagaacgcagagccgttgcgtaaccaaacatttcagacagtggaacgaaggagtggatttcttgagcattgccgcgttcttccataccatcgatcgtaccacgacgagcagttacttgacccataacgtcacccatgttgtcttgaggaacaacaatgtcaaccttcatgattggttcaagaataactgggttagccttcttagcagcgttcttcaatgccagagaagcagcaaccttaaatgcagcttcagaagagtcgacttcgtggtagctaccatcgtagagcttagccttcaagtcaaccagtgggtaaccggccaggacaccattttgcatagcttccttcagaccttgttcaacggctggaatgtattcacgaggaacgacaccaccgacaatggcatcttcgaattcgaagccggcaccttcttcaagcggcgtaaactcgatccaaacgtcaccgtattgacccttaccaccggattgacgaacgaacttaccttgtgcagaagcagccgtcgtaaatgcttcacggtaggaaacttgtggcttaccaacagtaacttcggcgtggaattcacgacgcagacgttcaacgatgatgtccaggtgcagctcacccatcccggcgatcagagtttcaccagtttcagggttagtttcagccttgaaggtaggatcttcttcagccagcttttgcagacctttgtccatcttgtcttggtcagccttagacttaggttcaacagaaacttggataactggttctgggaagtccatcgattccagttgcagtgggtgatctggatcagtcagggagtcaccggtagtggtgttcttcagaccgatagcagcagcaatgtccccagagaacacttctggaatttcgtgttgttggttggagtgcatttgcagcagacgaccaacacgttcacgcttgcccttggttgcgttcagaacgtaggaacctgattgcagagaaccagtgtagacacgcaggaacgtcagacgaccaacgaatgggtcagtagcgatcttaaatgccaaagcggcaaatggcttgtcgtcaccggcagtcagttcaaccttttcaccattttcatcagttgcttcgaatggcttaacatccagtggagatggcaggtagtcgataacagcgtccagcatcatttggatacccttatccttgtaggccgaacctgccagaactgggaacagctcttcagacagagtagccttacggatagcagctttgatttcttcaacagaaagttcttcaccgccaaggtacttttccatgatgttgtcatcaacgtcagccaacgtttccagcagtgcatcgtgacgagattcagcttcgtccttcaggtcagcagggatttcaacggtatcccagttcttaccttcagcatcttcatcataaacgtaggcaaccatcttaaccaggtcgataacaccgatgaagtcatcttcagcaccaattggcatttgaattggcagtggcgtaacgttcagacggtccttgatcgtttgaacagagtagtcaaagtcggcacccatcttgtccatcttgttggcaaagacgattcgaggaacatcgaagtcgtcagcttgacgccaaacagtttcggtttgtggttcaacaccggcttgagcgtccaaaaccgttacggcgccatcaaggacacgcagcgaacgttcaacttcgacagtgaagtcaacgtgacctggggtgtcgatgatgttaatacggtagtctttccatacggccgtagtggcagcggacgtgatcgtgataccacgttccttttcttcatccatccagtccatttgggaagcaccatcatgggtttcaccaatcttgtgaatcttaccagtgtagtaaagaatccgttcagtggccgtggtcttaccagcatcgatgtgggccatgatcccaatgttacgggtcttttcaagagggtattcacgtttgttagccatcttaaaagttttctccttccagttaaaaaaatcaatttaaattagttttagaaaaaggggtgacgttcgattaaatatctgcgtcacccctcacatcatagtcgacagctaagcagctatcaacaattgatgaagcttaccaccggtagtgagcaaaagcacggttggcttcagccatgcggtgagtatcttccttcttcttgattgaagcaccagtgttgttggatgcatcaatgatttcgcctgccagacgttcaaccatggtgtgttcaccacgaagacgagcgtattgaacaatccaacgcaggcccagcgttaatcgacgttctggacgaacttcgattggaacttggtagttggaaccaccgatacggcgtgccttaacttccagaactggttcaacgttgtccatagcttgttggaaaacttctactggatcgttgccagtttgttccttgatgcggtcaaaagcagcgtacagaatcttagtagcagtaccccgcttaccgtcgatcatcaggtggttgatcagactagtaaccagctttgagttgtaaattggatctggcaatacttctggctttacaacatgtcctttacgtggcattgatttacccctcctttaattatttcttaggcttcttggcaccgtacttggaacgaccttgcatacggccttccacaccggcagtatcaagagtaccacggatgatgtggtaacgaaccccaggaaggtcctttacacgaccaccacggatcaaaacaactgagtgttcttgaaggttgtgaccaacacctggaatgtaggcagtaacttcgatcaggttggacagacgaacacgagcgtacttccgcaaagcagagttaggcttcttaggcgtcatcgtaccgacacgagttgcaaccccacgcttttgtggagatggtgcagcgatttcttccttcttgaaactgttgtaaacgtaacccagggcaggtgactttgacttgcccttgtggctcttacggcccttacgtaccaattggttaatggttggcatgtagttatacccctttcttgtttttaagtccacacatccaggtgattcttttttgagtataaaaaaattcccgaatgctattcttttatgtgccttcgccgacgcatgtcatctgccccaacgacagacacaatccgttgctaaaaaaagcaccttaaataccctatcatgcatcctctaaaatgtcaacggactgtcgatttttcttttagtgctaaattcaactttttgcatatagcaatattagaaaggagaaacttaaaatgattgtcttaaaattattggctgctgtttggggcgcttgtctggcttctttcatcaatacagttatctggcgtctgcttaatcagatctcactgtttgatccccaaagatcctactgtgatagttgccaccagcagctaatctggtggcagctgattccggtcatcggctggctgattcaaaaaggtcggtgtcatttttgtcatgcatctatcggctgttactcaacatttagtgagctcataaatggctggctttggtatgaactgtttattcttgatcctaaaattataacagcattattgatactatcaaccagcctgctggtatgctcagcaactgattattttgcccagtggatctggccaatctggctaattggtctgtttagtctattttggcttttaaatcaaaaatggcaatggctgcgtttgtcagcggccattgccatcttaggcggtttattgattatgagttttttgaccagtaacggtatcggcattggcgatattgagttgatctttatcctgcagctctgtacttcaataaaatttgttgccactaccgttttaattgcggctggtctgggaatattaagccttcgatctcggtatcaggctttgccttttgttccctacttaagcctcggtatcgttatcactttgatattaacaccgagctagatcaactttgaatctagtcattgcaactagtgatgatcgtcatttttttcgattcgaaccggaaaaatctgatcaccaatccgagcaagatactccaggttttgaaaaagtaaaagcagccacgaaaacgatagaccgaattccaacagttcaaaggcggttaaagaaagatagctggtagctttaaacaccaaccagtcaagtgccatgatgccgccaataatataggaaatctttaaaaactgtctggacagccctggcatcagccatcttaacaggccgatgattaaaatcataatataaaccagccacattgagatccgatcatgcaagacgtgatattgcggatcatttggaaaacagccgatcccacctaagcatgctgcctcagcatacaggagaatttgcaggaccttaacaccacgatcaggatattttttctgcagattaaagaacaggtaatcaactaaagtcgccatcaatagagctgaaaaaatcaaggtaatgttaaatcgccaataggtagcattctgctgcgtccccaagtagctgaaattatagtgccaccagtcacgatttgaattggtcagcattgagaacaacattccaccaataatcataatcatcattgaattggtaataactgcttcggaaatcgtcatcgccagattaagcattccataggtgattgccgcaacaaataaaaagacgaataaagttgacgtgtagatatcaaagctggcccctgcaaacattttctccgcgagccaaaaaccaatcatgattgagatcgccaaaatcgttccaaaagcaatcagcagcgtcggcagattacgccaatgcagctccatcgctggcccgctgcgatgtcttttttgtctgataaatgcagtcgcaaaagccacgacgccgctaaacgtcccaagataaagtgacgcaaagccaattgaccagttaccagttaatgaaataacccaatgatgattggcccagctaaggcagaaaaagataactgctgccagcaccgcggggatcagataccaacgcatcataatctggggcagcatttcaacagtgcgactcggccgaattgtcaatgtcttattgtcaaccatcaatactaaaggggtatttttctccagctctagattttctactgccttggctggtaaatcaattcgatattttttcatagcaaattccaaaaaataacaatggggcccagcatttggaatcaaaccaaatactaggccccacgaatagcactatttaatcacaaaagctttagcctacttttgctttttcatttcggcttcgatatcgctggttgatttcattggtgcatcggcagctacagcaacttcttttggcttgatgttgcggtagttgctcataccagtaccggcaggaatcaacttcccgataataacgttttccttcaaaccaaccagtggatcgttcttgccacgaatagcagcatccgtcaagacacgagttgtttcttggaaggaggcagccgacaggaaactgttggtctccaaggcagccttggtaatccctaagataaccggacgtgacgttgctggaatgttgccggccaccagcgtgtcacggttggcatcacggaattgactgatatccatcagttcacctggcaaaagatcagtatcaccaggatccatgacgcgaaccttgcgcatcatttggcgaatcataatttcaacgtgcttgtcgagcagatcaataccctgcatccggtaaaccttttgaacttcagccaacaggtaggtttccgtagacagaacgtcgcgaacgcggatcagttccttaggatcaatcgaaccttcattcaattgcatcccacggtgaatgtagtcgccttcttcaaccttaagacgagccgtgattggcagcgtgtaagtccgcgtgtcgttctcaccagcaatcgtaacgtctttggttcgttcagctgggttttcttcgattgattgaacttcaccggtaacttcagaaatcgttgccttacctttaggattccgtgcttccacgatttcttgcacacgaggaagaccttgcgtgatatcgtcgttgccagcaaccccaccagtgtggaagttccgcagcgtcaattgagtacctggttcaccgattgattgagcagcaaccgtaccaacggcttcaccggcttcaaccttgtcgccagtagcagcgttgcggccgtagcagcgttcgcagacaccgtgttcagtgttgcaagtgaaggctgagcggatcgttaccttcttaactccagcatcaacgatcttttgagccatctcttcgtcaaccaagacgttcttgtcacagatcttctcgccagtttctggatcaaagacggacttcatcgtgtagcgacccagaatccgatcgtaaagcggctcgatcatttcattgccttcagtaattgcggcaacatccagaccgcgatcagtaccacagtctttttcacgaacgaccacgtcttgggcaacatcaaccagacgacgagttaagtaacctgagttggcagtcttaagggccgtatcagtcatacctttacgagcaccgtgagatgacaagaacatttccagaactgaaagaccttcacggaagtttgaaaggactggcagttccatgatcttaccgttaggagcggccatcagaccacgcatcccggccagctgagtaaagttggagatgttaccacgagcacccgagtcagacatcatgttgattgggttgtgaatgtccatgtgttcaatcagcttgttttgaacttcatctttagcatcattccaaatgccgataactcgttcataacgttcatcatcagtaatcagaccacgacggaactgcttggtaaccaaagcaacctgcttatgagcattttcgatgattgccggcttttccttcaagtcggtaatatcggcaatccccacggtaacaccagaaatcgtggattcgtagtaacccagatccttgatgcggtcaaggaattgcgaggtcttggtaaccttgtacttcttgtagacttcggcaatgatatcggacaagaagcccttcttaaatggcggaaccagtggcgcattttccaagtaggcgtgaatatcttcacccttatccaagaagtacttgtcaggaacaccattcagcagattgtcattggttggctcattgatgtagtagtagtcttctggcatgatgccgttgaagatcagcttaccaacactggtaaccatgatctgactgcgctgttcatcagtaaatggcttctttggcattgaagaaacctgaaccccaacccgcgtctgcagggcaacaaagccatccttgtaggccatgtaggcttcatttgcatccttaaagatcatgccttcgccttcacgagccttatcttcggtcgtcatatagtagttaccgataaccatatcttgagaaggtgccacgattggttcaccgtcacgaggcgacaggatatggtgagcagccagcatcagcagacgggcttcagcttgtgcctcatcagacagcggaacgtgaatagccatttggtcaccgtcaaagtcggcgttgtaggcggcacaaaccagtgggtgcagccgcattgccttaccagataccaataccggttcaaaggcttgaatacccaaacggtgcagagtaggtgcccggttaagcagaactgggtgttcactgataacgtcttccaagacatcgaagaccttgttgtcgcgcttatcgatcaagcgcttagcagccttaacgttggtagccaggccccgtttggtcaattcatgcatgataaatggcttgaacagttccattgccattggtactggcagccccatctggttcatcttcaggttagggccaacatcgataaccgaacgaccagagtagtcaacacgcttacccagcaggttttgacggaaacgcccttgcttacctttcaacaggtgcgacagcgacttcaatggacggttaccaggaccagcaaccggacgaccacgacgaccgttatcgatcagggcatcaacggcttcctgcagcatccgtttttcgttttgaacaatgatgccaggcgcgttcaattccaacagccgcttcagacgattgttacggttgataacccgccggtacagatcgttcaaatcagaagttgcgaaacggccaccttccagttgtaccattggccgcaaatcaggcggcataactggaataacgtccataaccatccattctggcttgttgccagattttaagaaggcttccagaatgtccagacgacgaacggcgcgcgtccgcttttggccagtagcttctttcaagacggcttttaattcggtagcttccttttccaggtcaacgtcagccaacagtttttgaatggcttcagcacccatttcagcagtaaagcgatcgccgtactcttccttcttttcacgatattctgcttcagagagcaattgtttcttttccagtggcgtgtcaccggcatccaaaacaacgtaagaagcaaagtagataacttcttccagggcacgtgggctcatgtccaagaccaggcccattcgactagggatacccttgaagtaccaaatgtgagaaacaggggcggccagctcaatgtgccccatccgttcacgacgtaccttggagctggtaacctcaactccacagcggtcacaaacgcggcccttgaaacgaatccgcttgtatttgccacaagcacattcgtaatccttggttggaccaaagattcgttcgtcaaacagaccgtctttttccggcttcagcgtccggtagttgatcgtttccggctttttaacttccccgtacgaccagctgcggatcttttgtggtgaggccagaccgatctgcatgctttcaaatttattgacgtcaatcaaaggatgatcctccttatttcaattcaggcaaactagtcttgttttgcttcgtctttgacttcttcgtgcttgtcgctgccatcgcgagccagcttgcggatgtcggccacgccttcatccatgttcttgagttgaacttcttcgttttgactgtcaagcaccttcatatccagaccaagggattgcagttccttaaccagcacgcggaaggattcaggaacacctggctttggaattgggtcaccattgatgatggcttcataggtgttgacacgaccaacaacgtcatcagacttgtaagtcaagatttcttgcagcgtgtaggcagcaccataggcttcgagggcccagacttccatttcaccgaaacgctgaccaccaaattgtgccttaccacccaatggctgttgcgtaaccagtgagtaaggtccaattgaacgagcgtgaatcttgtcgtcaaccatgtgtgccagcttcagatagtgcatgacaccaacggaaactcgttgttcaaatggttcacccgtgcggccatcataaagaatcgtcttgccatcagatggcagtccggcttccttaactgcttcccaaacgtcttcatcggttgccccatcaaagaccggcgtagcaatgtggatacccagcttgcgagcagccatccccaggtgcagttcgataacttgaccaatgttcatacgggaaggcacacccattggactcagcatgatatcgattggcgtaccatctggcatgtatggcatgtcttcttccggtaccacgatcgaaaccgtacccttgttaccgtgacggccggccatcttgtcaccgacttgaatcttacgcttttgagcaatgtagacccgaaccatcttgttgacaccaggagccagctcatcaccgttttcacgcgtaaataccttaacgtcttgaacgataccgccaccgccgtgtggtacccgtagcgacgtatcacgaacctcacgcgacttttcaccaaagatggcgtgcagcagccgttcttcagctgacagctcagtcattccctttggcgtaaccttaccaaccagaatgtcaccgtcgttaacctcagcaccaacacgaataacaccggtttcgtccaggttcttcaaggcatcggcaccaacgttagggatctcgctggtcatttcttcaggtccgagcttggtttcacgagcttcagattcatatgattcgatatgaattgaagtgtagacgtcttctttaatcaagcgttcattgatggcaatggcatcttcaaagttgtagccttgccaagtcataaaggcaatcaatgggttttgacccagcgccagttcaccttgttccattgatggaccatcagccaaaacgtcatcagcatcgatatgttcaccgaccttgacgattggacgctggttgtagttcttaccaccgttggaacgacggaatttcatcagcttgtaggtgtcaagcgtaccgtcttcttcacgaacgcgaatttcacgagcatcgacgtattcaaccgtaccagccttcttagcaaccaaggcaaccccagagtcatgagcggctttgtattcaatcccagtaccaatcagcggtgcatgagggtcgatcaaaggaaccgcctgacgctgcatgttggcacccatcaaggcacggttggagtcatcgttttccaagaaaggaatacatgctgaggcaacggaaacaacctgcttaggcgagatatccatgtagtcgacgttttcaggagtcgtttcaacatagtcatccttatgacgacacatgatttcttcatcagcaaatgagccgtcatcattaagtttggtgttagcctgagcaatgatgtagttatcttcttcatcggcagtcagatagtcgatcttgtcggtaaccttgtgcgtatcccatgaaacacggtggtatggcgtttcgatgaagccatattcattgatccgagcataggatgacagtgagttgatcagaccgatgttaggaccttcaggtgtttcaattgggcacatccggccgtagtgagtatagtgaacgtcacgaacttcatagccggcccggtcacgagtcaaaccaccaggaccaagggcagacagacgccgcttgtgggaaagttcgcccagtgggttggtttggtccatgaactgagaaagctgtgaagaaccaaagaattccttaattgaggcaactactggtcgaatgttgatcagctgctgtggcgtaaccgtgttaatgtcttgaatcgacatccgttcacgaaccacacgttccatccgagccaagccgatccggaactggttctgcagcagctcacctacggaacgaatccgccggttacccaagtggtcgatgtcatcagttgtgccaatgccttcttgcaggttgaagaagtagttgatggacgcaatgatgtcggctggctgaatgtgcttaagctccaaaggaatgtgaccgttggctacgattggcacaacgcggtcaggatcattcttggagtaaaccaggatcttttgcagcttaaccggtgccgtaacaacagcttcatcagatggcgtgtaggtaaccatcttgaagtcatcattgtccagggccggttccaaagtcttcaatacttctttggtaactacatcacccttgttggccaggatttcaccagtttccggatcagccagcgtttcggccagcgtttgacccagcagccgatacttcatcatcagtttcttgttggtcttgtaacggccaactggtgccatatcgtagcgctttggatcaaagaagcgagccgtcagcagattccgtgctgagtcagccgtcttaggctcacctggacgcaagcgttcgtagatgtcctttaaggcttcttcaactcgtgagtcttcagggttcttgtgcacgtctttatcaatcgtagcagacaggccttcactgttgccacccagcatgtcgatgatctcgtcgtcagagccaaagcccagcgcacgcaccatttcagtcaaaggcagcttccgtgtccggtcaacccgtacgtaagagatgccctttgcatcggtttcgtattccagccaggcaccacggtttggaataaaagtagcaccatagcttggccggccgtttttgtcatcttcttcattgtagtaaacgccaggtgaacgaaccagttgagaaacgattactcgttccgcaccattgataataaaggtaccttggtccgtcatcagtgggaagtcgccgaagaacacgtcttgggacttgatttcgccagtttcgtggttcgtcaagcgcagggtaacgtgcagcggtgcagagtagtttgcatcgtgttcccgggcttcatcaaccgtatacttaggttcaagcagttggtagtcgacgaattccagcgacagtttgccttggaagtcatcgattggcatgatgtcgttaaacatttcccgcagacctttttccataaaccagttataggaatcggtctggatttcaatcaagttaggcaggtccagtacttccttgatacgggagtaactgcgacgcgtacggtgcttaccgtattttactaaatgtccggccaaactattcacctctcaaatttgttgggcaagttcattcaaatttgtaatattacattttgattacaaatcatcaaaattcctgcttttgggcaaaaaaaatccaaaaacagctgggtgctgtctttggtttttataaagaatcccatggacaagagatcacggaactcaaatgaactcgcaattacatacaccagttatcatacgcgtttacgaattcattgtcaatatttagtttttatttttcactggccgttgccggaaccgtcaggccgcgcaaaatgcagctcaaaatcagtttggtacgctgctcctcagtgatggcatggccgccaattggttgaaatgatttaaagatcggcgacagatcagcaataaacaactccgccgcttctttaggcaacagatccggccgcagatgcacttcaggaagtttaaagaaatcagcaatcggttcaaggtaatccatcgtaaacagcatgtccagtttgcgctgagcactttcggaaagctctcttttggcttcttgatactgatcgtagacgttgagtggatgatgttttctcaatacttcagtaattccatacagtcgttcttctggatcaatctgctgcttgcgcataaccttgttgatatcctggcgaaccttaccgcatagattggtcaaaacagccaggtataaaacttccttatcattaaaatggtggtacaaagctggctgagtgatgccgatctgcttggcaatatctctggtggaggcaccagaaaagcctttttgcaaaaacagtgtcgtagcggttttcaaaattgcttggcgagtttttgccaattgttctgctcgtttcatgttctatcgattctcccttatcggtttcccatattagtcaaaaataattctcacacgaaaacccagttcttgcaagcttgggttaccaattcgccaaaaataaaagtcattaaatctcatttcattaaatgatgattcaatgactaataaaatttatctatcaggttatttatcgaaaccaacagaattttaaggtagcgcaatcaattcaggcttggcatccccgcgcttgtcctttagcgtaatcttgccctgatgcgaaccaatcacgacttcatcaccagtttggactgccccggccagcaatgcctcgctcaatggatcctcaaccagattctgcagtgagcgccgcaatggtcgtgctccatattcaggatcatagccggctttggcaatcacatcaattgcacctggcgtaaagcgtaccttgatatcacgttcagccatccgttgttttaccttgtcagccaggagcttaacgatctgatgcagctctttttgattcaaagagtggaagatgatcgtttcatcaatccgatttagaaattctggccggaagtgcagtttcagctgctgcttgatggcggctgacatggcctgataatccgccgtcatgtcggcagccccaaagccaaccgttttttcatcctgcagctgggtggccccaagattagaagtcataatcaagatcgtattgcggaaatcaacgcgccgaccttttgaatccgtcagatagccatcgtccagtacctgcagcaacaagttgaatacgtcggggtgcgctttctcggcttcatcaagcagcacgacgctatatggatgctgacgaaccttttccgtcagctgaccgccctcatcatagccgacatagccaggagccgccccaatcaaacgactgacgctgtatttttccatatactcagacatatcaacacggatcatattgttttcagagccaaacattgcttcagccagggccttagccagttcagtcttcccgacgccggttggccccagaaacataaatgagccaattggccgattaggatccttaagaccactgcgcgctcgacgaattgaacgggcaattgccgaaaccgcctcatcctgaccaatcacgcgttgatgcaggactcgttccagattgatcagccggtcgctttccgtcttctgcagctgggtcagcggcacccccgtccactcagccaccactttagcaatgtcttcgccggtaacgtgcagctgatactgatcagcctgcttttgtcgctgctcttcttcttgcgccagccgtgccttgatggtcagttcagcctgcctgagctgggccgcgcgatcaaagtcttgctgttcaatggcctgttctttttcctcgcctaatttgcgcagctgagcctgttcgtttgccagtggtgaggactgttcttcagcttcgatgcgcaccatggccgctgcctcgtccatcaaatcaatggccttatctggcagaaaacggctcgtcaaatagcgcgttgacagcttaacggcagcttccaaggcttcatcatcgattttgacgtgatgatgctcttcgtatttgggccgcagtccttttagaatcgccagcgcatcctcagcagtcggctcttcaacttgaaccgttgcaaagcgccgttccaaagctgcgtctgattcaatgtatttttgatactcatccagcgtcgttgcgccaatcgtctgcagctcaccacgggccagcgccggctttaagatatttgaggcatcaattgccccttctgcaccgccagctccaaccagagtgtgcagctcatcgataaaaagaatcacatggccgtcatgatagatttcattgatgatttttttcaagcggtcctcaaactcaccgcgatacttggtgcccgcaaccagcgaccccatatccagcatcatcagtcgcttatcagccagttcttcaggcacccgaccagctacgatccgttcggccagtccttctgcgatcgcggttttgccgacccctggctcaccaatcagcaccggattgtttttagtccgacgactgagaatctgaactacccgcttgatttcacgatcgcggccaactacaggatccatgccatcactgcgagcaatctgtgtcagatcacgagccagcttgtccagcgttggcgttccctgaacctcaccgtcactgccatcgttttcaccaggacgtcgccgtggtgcccgtcgctgctgattttcagcgattcctaggcgccgcagcaaaatccgacgcgcctgtttgggattaacgtccagattgcttaagattcgtgatgatagaattgcatcatcactcagcagggctaacagcagatgctcggtgccaatttgaggggcctgcagacgttgggccatctgcttagccaacaataaaatactgcgcagtttgggcgaatcaggcaaataggtatcgcgatcagcctcttgcatcgtaccataaccggttaggctttcgatttcttcgcgaatatcatcgctggtgacgttaaactgattcaagacacggcccgcaatactattagaaaccatgctcaacgccagcagcagatgctcggtgcccacggcctgatgcttaaagtagtgtgcctgttcttgggcaatctgcaaaacgttttgcgcgcttcgggtgtatgaattattgtccattaaatcaccgtctctttctctcttagctttcaaaacgcagccggttcaacagtgaagtcaaaacccgggcccgcagctgattttctttaactcgactatccagtttcaaggtttgtttggcgaccatcaccatcattaaatcgccttctcgccgcgtaatgactttttcttcatataaagttcgaatcacatcgaaggcatctcgttcactgattgagtcgccaattgcattgatcagcatgtccaagacatcgacatcatccaatagattgatgcgttcaatacgaatatagccgccaccgccacgtttactttgaaccaggtagccattttgcagggtgaagcgagttttaattacataattgatctgtgatggtaccacatcgaaatggttggccacttctgaacgacgtatctcgatctgctctgagttgccaagaatctctttaagataagcttcaataatatccgaaatactgcggtcttccaaaatttcgccccctctttctttatctgactaatgttgaccttcattttatcatatatatccataaaattccgattttaaattaaaaaaactcatcgctgcaaaaacaacgatgagccttaaattttagattgctaagatcagcttgccttagccgttattcaattatttgttgtgtacaaagtcaacaacgttccggccaaccactttgttgtccttaagttcttgaatcatgtcgttgatttcttccagcttgcgggtcttgacgattgggtgaaccttaccttcagcaccgaattggaaacattcagccaggtcttgacgagtaccaaccagtgaaccagcaacaacgatcccatccagaaccgtcttggcgatgttcagctgcatgtcaccctttggcagagcaacggcaaccagcttgccatctggacgcagggaaccaacagcttggtcaaaggcagctggcgtaacggccgtaacaacagctgcatgaacgccgccaaccttttcttggatctgttcgtcaacattgccgtcatgacggttgatcagaacttcagcgccttccttcttggcagcttccagtttgtcagggttaccatcaacggcaacaacgtgagcaccaaatacgttgtgggcaaattgaatccccaggttacccagaccaccagcaccaacgattgatacccattgacctggcttgatgccggaaaccttcagtgccttgtacatcgtaacgccggcacaggtcagagaagttgcctcaactgggtccaggccttctggtaccttaactgcatagtcagcaggaacgatgcattgttgagccatagcgccatcagcagtgtagccggcgttcaaaacgttgcggcaaagcgtttcacgacccgtcagacagtactcacaatggccacagcccttaaagaaccaagcaattgatactcggtcgccaactttcaggctggtaacgccaggagcaaccttagatacgcggccaacaccttcgtgaccaataatcgtaccaggcttcttgccaaaatcgccggcagcaacgtgcaggtcggtgtggcaaagaccacagtattccatgtcgaccagcgcttcacctggcttcagatcacgcagcgtaacgtccttaacgtcaacgaagccatcacaattttcacgaataacagcagctttcatagagcaaaatctcctttgcaatcattagatttcctttacagcccctatcttagcagattcatatcgatttggaaagtgaacgtttgcacatttatcctagaccactgaatttaaaaaacggtttcctaccgatgtaaagggcttcacagccatctaaagcactttcaaaattatttttagcttgtgcagatttaaacttatcaaaaataagtgaaggctttcattgtttggatagctcacgcctgattaaaatgctaattttgattttttagatagtaatgaatataatgttcagttttatttttccaaggttgtctcagtacggttggcggattatcataatgttaccgctaccaaaatatcacggaggaattaactatggaacaaacttttgtcaacggcaaagtattcgtcggtaccagcgaaactgattttgtctctgcctttaaagttaaagatggccgcatcagctggattggtcagactgaacaggttgacgatccccaagcgattgatctgcatcagcaaacggttttgcccggactgatcgattgtcatacccatcccaaatatatcgcggatgctctccacggaacggcctgtacgccccctaacgtcaacagcattcaagaaatgatcgccgccctcaaggcatccccgcagtatggtcaaggcccggatgtctggatcgagggctggggctttgacgaaaccaagctggcagaacatcgcgcgccaaccgttgacgatctggatcaggttactactgagcagccaatctttatctaccgttccgactgtcattcatcggttggcaactcaaaagccttggcactggccggtatcgatcaaaacaccccagatccaaaaggcggccatatcgaacgttttccagatggtcgtcccactggctttatgcgtgaggtagccgccagtcagctgctgattcgagccaagtcggcgcaaagctatgaaaatgacgtgcaaaacatggtcaacagctccgatcattaccttgaaaacggcatcgttgcaattggcgaaatgatgggtcggcttaatccctaccctacgctgcgcctttatcaggatgccgtcaagcagggctttaagccacgagcctccatctattatgtctatgatgagctgaagcctggtcaagaccttgatccagtgggcgatgatcagctgcgggtagccggcatcaagattttcatggacggcagtatttctggcgagaccgctgacaactcattgccttatccctctggcaaacgtggtgttttgcttactgaccagaccaagctgaagacggccatcgaatttgcccaaaaacatcagctgcaggccgccattcacgcaatgggtgatgcggcaattcagctggttttagatacgacctgtgatttagatccttggctggatgatatgccttcaatccgtatcgaacatgcttcgctgcttagcgaccagatgcttgatcagatcaatcacgccaaaatgtggtacggtctctccacccagccaatctctttctttgcagaagatgaatcctatcgcagctatttgacgccggaacagttcaaactggcctaccgtgttaaatcaatgcttaaatcaaaggcactgacgactttaagctctgatgcgccatgtactccctgggccgagcctgacagtcctttctacagtatctatgcagccgtaacgcgccaggctgccaataatgacgttgtaaacattgaagaagccattaccgttccgcaggccatcttaggctataccaaatgggcagcagaaattggcgggtttacacataacggaacgctggaggttggcaaatcagctgactttgtaattttaaacaaagatatcttcagcgtcgcaaaagatgaactggcaaccataaatgcaaacgaaacctggtttaagggccagcgcgtctaccaaaaggcatcgaaataagcattcaaagtgatcataatcagtctgaccgtcaccaatccatttgattgatgacggtcagtttttatttattcagcatgatatggcgtcgtgcataatcgaccagcagctcaaccggcgtagtaaaatcatcattaacccaccaaaccagcagcatatagattccgccagactggtagctgattgcatagtctgaaagatcaagttctggatgatactcaatcagcaaacgatgcaggtaagctgtttgctgattgagcagttcaccttcaaaacctgctttcaacaaaacacgcatcaaatccggatgattcttgaagtggctaagataggccgtaagctgctgttccaatgaattcaggtcatgttctttgatatcttgaataaaagcagcaaattcctgttgcaaaaaatgcgtcaagattgcatccttgccaccgaaattacggtaaaaagccattcgcgacaccatggctcgttgtgcgatttcagctaccgttagttcagcataaggcttttccttaagcagctcaaacatcgcttgctcgattttcagttgtgttttttgactctttttattcattaatgttaattcctcgctttcctaaaaacgattgacaaatgaaagcgctgacaatattataaaggcatagttacaggtgtaacgatttttggtattgaaaggagcgagcatgatgcattatacaaatggaaactacgaggcgttcgttaatgctgacaagccagccgatatcgaaaaaaaatcggcatatatcattggagcaggtctggctggattagccacagccgtctttttgattcgtgacggacagatgccaggtaaaaagatccatattcttgaagaattatcggttccaggcggcagcatggatggaatttacagcgttcagcgcaattcctatattattcgcggcggccgtgaaatggaaccgcattttgagacgctctgggatctgtttcgttcgattccgtcactggaagtccccggtgcttcagtattggatgagttctatcgtctaaaccgtaaagacccttgctatgctaaaactcgtgtcattcagaatcgcggcgaagctttgccaaccgatggacagctgctgctgacgccaaaagcagtcaaagagatcgttgacttggttttaacgccagaagaaaaacttcaggacgtcaaaatcaatgaggtctttgacaaagagttcttccaatccaatttctggctctactggtgtacaatgtttgcctttgagccatgggccagtgccatggaaatgcgtcgttatctgatgcggttcattcaacacgttggtacgctcaaaaatctttcttcactacgctttaccaaattcaatcaatatgagtcattgattctcccaatggttaaatttttgaaggatcatgaggttcaattccatcaagaaactactgtcgacaatatcatcgtcaaccgctccggtaatgacaagcttgccaccaagatcgagatgacggttgctggtgaaccgcaaagtatcgaactgacaccaaatgatctggtctttgtaacaaatggttcgattaccgaaagcaccacgtacggcgacaatgatcaccctgcaccaatcgatcatccgcttggcgctagctggcagctatggaagaacctggcagcccaagacagtgactttggtcatccagaaaagttctgcgagcagattccaaatgccaactggaccatgtcggctacgattacttttaaaaataatgatatcgtaccatttatcgaaaaagtaaataaaaaagatccgcacagtggctcaatcgtaaccagcggccctacaacaatcaaggactccaactggcttttaggctattcgatcagtcggcagcctcattttcaccaacagaagcctaatgaactgatcgtctggctgtacggtctcttctctgataaagccggcaactatgttaaaaaaacgatgcccgaatgtaccggtatcgagctatgtgaggagtggctatatcatatgggtgtaccagaaaatgatattccagccatggcaaaagcagcaacaacgattcctgctcacatgccgtatatcacatcctacttcatgccgcgcgctttgggtgatcgtccattagtcgtaccaaagcattccaagaatctagcctttatcggcaactttgctgaaacgccacgtgatacggtctttacaactgaatactccgttcgcactgccatggaagccgtctatacgctgcttgacattgaccggggcgttcctgaagtatttgcctcagcctttgacgttcgtttgatgatgaatgccatgtattatcttaatgatcaaaagaaattaactgaactggacttgccattgtctcagaaactattagttaaagagggactcaaaaaagtcaagggaacctatatcgaagaactcttaaaagaatatcggctgatttaagcctagtaacaatcagatccggtcagtaccaaaatggtgatgaccggatctttttcaacaaaaaaaccgatgaaaaatcatcggcatacaaaaagcggaagacgggattcgaacccgcgacccccaccatggcaaggtgatgttctaccactgaactacttccgcaagaaatgcacccagaaggagtcgaaccttcaaccttctgattcgtagtcagacactctatccaattgcgctatgggtgcataataaatattcaattcaagcggaagacgggattcgaacccgcgacccccaccatggcaaggtgatgttctaccactgaactacttccgcataatgtttattaatgaatcgggaatacaagatttgaacttgcgacctcttcgtcccgaacgaagcgctctaccaagctgagctaattcccgattaatgcacccagaaggagtcgaaccttcaaccttctgattcgtagtcagacactctatccaattgcgctatgggtgcatgaaataatggaatcaagcggaagacgggattcgaacccgcgacccccaccatggcaaggtgatgttctaccactgaactacttccgcaaatgtttattcaaattcgttgataacgtatcaacagttatatatattaccgataaaaacgtttaatgtcaatactaattttatattttcgtcaattattccgatatttattaattttgacctgaatgaaaccaacttggcagattgcctcaagccgacatctggaagcggttgctgaatagcgttataattaagacaaaatttggggaaaggagctgaaaattatgaaaaaattctcgcatcggcaaaaattgttcatgattttagctgtcgccttagtagccgtgctcctacaatacgcttttaagcaggcactggctgcccagattctggtaaccatcgtgggagccggtatcgcgctttcaatgctgattgagatgatccatactcttaaaagcggtcgctatggcgttgacctgctggcaatcatcgccgttgtctccactctaagcgtcggtgagtattgggccgctatggtgattttagtaatgctggtcggtggcgacgctttggaagactatgcctctcgtaaggccaactctgagcttaaggcattgcttgacaactcgccgcagtctgcacaccggctgatgaacgatcggattgaagacgttcatgtcgaccaggttaaggttggcgatacgatcgtcgttaagcctggcgagctggtgccaattgatggcgaaatcattaaaggcaatacgcaggtcaacgaatcatcgctgaccggtgaatcaaagccaatcgataagcaggttggcgatcaggtaatgtcaggctcgctgaacggcgatcaggcaatcgtcattaaagcagtcaaattagcgtgtgacagtcagtatcaaaaactggtggccctggttaaagaggcggagaacaccccggctcactttgtccgtttggcagaccgctatgccgttccctttactgcggctgcccttgtaattggcggcatcgcttggatcgtcagcaaagatcccagtcgtttcgctcaagtaatggttgtcgcttcaccatgtccactgattttagcggcgccagttgccatcgtttcggggatgagtcgggcctcacgcagcgggatcatcgttaagactggcagcgtcctggaaaaaatggcgcatccgaaaaccatggcctttgataaaaccggtacgattcccttggccggttgaccgttgatcatcttgaaccggccaagggaatcgacattaaggaactgctgcactttgctgccagtgccgaggaacagtcgccacatatccttgcccgttcaaccgtcgcctatgcgcaagcacaccagattccgcttagttctgccagtgaattaaaagaggttgtcggcaacgggatcttagcaatcgttgatggtcgacaagtcaaggtcggcaagctgatctttgctgatccagatacgacccaaaagccgctgtctcagactgcaatctatgtcagcgtggatgatcagtattggggctgcgtgatttttcaagatcagattcgtcctgaagcgccacgtactatggagcagctgcgccagctgggcgtcgagcacctggttatgctgaccggcgatcaaaaagccattgcgcagcacgttgctaaactggtcggcatccatgaggtaaaagctgacctattgcccgaacaaaagattgcggccttaaaaaacgttccggaaaatcgccgtcctgtcgtaatggttggtgatggcgtcaatgatgcacccgcattggcaactgccgatgtcggaatcgccatgggtgctcatggatcaacggcagccagcgaatccgccgatctggtaatcgttaaagatgacctgcaccgggttgccattgccgttacaatctcacaagaaaccatgcgtattgctcaacaggccgtcttgatcggtatcggcatctgtacggctttaatgctgattgccgcatttggcatcatccctgcttttattggggcaatgctgcaggaagtaatcgataccgtctcaattctttgggcattaagagctcgtcacgggacgtctgatattgatgactgacccaacttaaaacagcgttgtgttggacactaaagtctgcacagcgctgtttttatgattagattatttatacattagcgattaccgaactgagcttttgaatcgatccgacatccccaacaaccgagatatgatcaccatgatgaagtatatcgtcggcttgtggcagcttgttaacctgctctccgctgacaatggcaatcacattgacttgatacgtatcgcgcagattaagctcttttagcgtatgctcacaaaaatctggactcttaacctcgatttcggccaacgtcagctcatgattcaagatcaaatagttggcaatatttaaatgcagctgatgaaataccattcgtctggccatgtcacgttctggacgcacgacatagtcagccccgattttttccagcacccgggcatgattttcattttctgccttacagataatgtttttagcgcccaactctttaacgattaaagttgccatgatactggcctgaatatttcccaccgaaatatagacattgtcaaagctccctagatccagctcgcgcatcgcttcttcatcttgagcatcggcaatgactgctcgcgttactatattggcatattcattgacgacatcttcattcttatcaatagccaaaatatcttgatgcgcctcggccaaagtttcacagaccgagctgccaaactgaccgataccaattactgcatagttgtttttattagccaatcaaaacaccttcttccggatagcgatagttcttttgctttggatgagcatttaaaaccgtaaacattacggtatagatgccaacccgaccgataaacatcaacgccataatgatcagtttgccaaacagattcaaatgcggcgtaacccccatgctgatacccgtcgtcccaaaagcagccataacttcaaaaataatatcttccaaagtaaaattggctggcaaatgctgtgtcagacacaacagcaggattgccgcggcaagaattgcaaaggcaacaaaaaccagcgtcagcgcccgaaaaatattttcttctttaaagcggcgtctgccaaaaaccgtatcgcgctgaccttttaaagtggcaatactctgcagcgtcaacagcccaactgtagtcgttttgattccaccagccgttgatcctggcgtcccaccaataaacatcaaaattaccgttaccgcgatgccggccggtgaaagattttgataggaaaaagtcgtcagaccggctgtccgtggcgtaatagccataaaaacagtattgatgaaacgatgctcgactgacatatgtggaaactgggccgctagattattttcagtcaaaaaatagctcatcagagataacagcaggataatggcgccagtcgacagtgccagtgaggtatgcagcgacaaccgatgcttttttcgataaagcaatagatctcgccaaaccaaaaaaccaaatgagccagcaataatcaaaactgccatgataaataagacataggtatcatcagcaaataatgccagactgttgccaaacagatcaaaaccggcattacaaaaagctgagatcgagtgaaagatactgtaccatagccccttgatcaaaccaaaccggtggccaaaatcaggccacagcagcaaggcgcctaaagcttgaatgatcagtgacagaccaacgattagattgacaatagtaatctgtgctggcgactgcaggttcaatgattcttgggctaacagacgtgctgaaagcctgatcttttgacgcgcaaacaaaaacatcatgattgcaaacgtcataaaacccagtccgccaatctcaatcaaagccgtaattaccagctgaccaaacaaagaccagtgagtcgccgtatcaaccagcgtcagtccagtcacgcaggttgcactggtcgcggtaaaaaatgccgtcataaatgatgggtcctcgccaggcttgattgcaatcggcagcattaaaagcagcgtaccgattgcaatcacgatcaagaacccaaacgtcaaggcttttgagaatgaaaggcgataacgaccaaacgtgatcatttttatggcttcctttcccgattaaaacttctaagaacaactatatcagcgatcaaacgcaaaataaatcaaaaaacgactgtaccttacttcaggacagccgtttaataataatgcggatgaagggactcgaacccttacatcataagatacaagaacctaaatcttgcgcgtctgccaattccgccacatccgcaagtaaaacattaaaaaaatggaggatacagggctcgaacctgtgaccctctgcttgtaaggcagatgctctcccaactgagctaatcctccgtatcagatatgaaaatcaacagtttaattatacatatctgaataaactctgtcaagaactcaactactttaggttcagttccgtcagcttatcatcaaccaattgcaaaacctgatcagctgcacggggatcttcgacaaaatcatatttgtctccatcaatcagcattttaggactttcatcatagctggcataccagtcaacatagcgctgattcaattcgcgatagtattcataaagacttgggtcattttcaatctgttcaaacgaacggccgcgtttcttgattcgcttcagcatcgtttcaaatgagacctgaatactgatcaaaagacttggtgctttagtatgtgcctgctgaggcaattcttccatcatattgcccaaaagcgaggaatagatgtcagcttcagtctgtgtagctcgccccaaatcggcattcagccgaaaaagcagggcatcttcaaaaattgagcggtctaaaacgttcagatcattatcaaatgaattcttgatctcggccaagcgtttgtttaaaaagtagatctgcagcaaaaagccgtatttcttaggatcttgataaaacagcggcaggatttcattgtcatcaaccgattcatagaaagcctgactgtccaaatgatcagccagcatccgcgttaaactggtttttcccgcaccaatagttcctgctagtacaatcattgcttttcccctttttccattttctaaaaagacacgagctatattgtatcatctttgatccgccaccgtgagtaaaatgtttttcatttatcagtcaacatcataaagtctcaactaatcaacgagccgtccttttttttaatattttactgcttagcactaaatggcttttggctgatcgcatttttacagtctgcatcatcatcaacagcccccacaataaaatccccgccaaaaccggcgaggattcgatgattattcagcttctttttccgattcagaaacgaatgactcactattgttgctccgtgacagatcaacgtccttgagcggaatcaagtgcgtcttgtaacgaaccttatagtagatgaataaaatcaagaacaatggtacggccatgtaggtgatggcgatatttgaccaatccatcttgataaaggcatcaatgttttgaccacacattacgatgacacacaagatcaaggcaaagattgggccaaacggaaacagcgtagcatgatactttaattcgccaacctgatgtccctgcgcaataaaggcccgccggaagcgcaggtgtgaaacggcaatccctagccaggcgataaagccgcacagaccagatgccccaatcaggtaattatatgcttcgggaccgataaactgtgtcaaataagccagacacgagacaaccatggtgcccaacaatgcatagattggaatcccacgtttgttgacatagccaaagatcttccaggcatagccttcccgcgcctgtgagaacagcatccgcgtcgaggcgtacaggccagagttggctgccgaaatcacggccgttaagataaccgcgttcatgacactggccgctgctgccatccctgcccgcttaaagacaatcgtaaatggactcatcgtaatgttctgcacgtttgaattcaataagtttttgttggtatatggcagaacgcaggcaatgacaaagattgcaaaaatgtagaacagcaaaatccgccaaaaagttgaatgaatagccttggaaaccgattcttccggcgtagcagcttcaccagccgtaattccaatcaattcagtaccttggaatgagaacccagcaactaagaacacactcaaaatccctgaccagccatgaacgaacggtgcgtccttgtagtggaaattcttcatgccaaccggtccttgaccacccatgattccaaagatgatgcagaccccaacgaccaaaaagatgacgaccgttacgaccttgatcaaagatagccagtattccgtttcaccatatgaacgaactgaaagataattgatcagaaaaatcgcaagcaagacaaacgtactaaacagccagcttggaaaatgcggcagccaatattggaaaaccagccccgccgtcgttacgtcaactggaatcgtaatggcccagttaaaccaataattccaacccatggcaaaacctaatgccggatcaacaaactttgttgaataggtggcaaaagaacccgagactggaatataggtggccatctcacccagactggtcatcaagaaataaaccatgatccccatgatggcataagctgctaaagcaccacccgggccggccgttgagattgccgaaccgctggcaataaatagtcccgtcccaatcgtaccgccaagagcaatcattgacagatggcgcgttttcaatgtccgttgaatatgaccctcactgccttcatgactgttttcgctcatgaaaaaatcctcctcaaatttattggcgagaaaggcaaacaaaaagagccggcaagccaggacttccctgcttgtcgactcaacttaacttcgtaattgttgaatcaatcatggaagcgccccgcagaagcttctgcgacagtccgtaatttatttaactacggcccaacgcgtaaagccttcagtcgatacgcgtttcggcaagcatccctttcagccaggcattgattctgaagcatccagcctggtctactgatgagactcgcacctcttctcttttacacattatttgattataactcacttttgattttaagcaagttttaattttctacttgatttctttaccatcagcagtaatgtacttctcaccacgcgagctgcgcgataaatcggcttcctgcagcgaaagcaggtgcgtcttatagcggaacttgtagtagcagaacaggatcaagaagatcggcactgccatgtaggtaatcaagatgttgtcccaatctaagtgaatgaatgctggaatgttttgaccaacaatcacaatcatacaaaagacaaaagcaaaaattggaccaaatgggaacatggtcgcatgatacttcagctcgctcagctgatgtccctgcgcaacaaaggcccgccggaaccggtagtgagccattgcaatccctagccaggcgataaagccagacaacccggatgcatcaatcaggtagttgtaggcgttggcactgacaaaatgcagcaggtagatcgccagcgagacggccatcgtccccagcagcgcgtagattggaatcccccgcttattaacgtagccaaaccctcgccatgcatagccttctcgtgcttgcgagaacagcatccgcgttgaggcataaagtcctgagttggctgaagaaatcacggccgtcaagattaccgcgttcatcacactggctgccgctgccaggccggctcgcttaaagacaatcgtaaatggcgacatcgccacgtcttgaacgttgctgctcaaaaggtttttgtcggtatatggcaaaatgcaggccatgacaaagattgaaagaatgtagaacagcaagatccgccagaaggttgaatgaatggcctttggaacggatttttccggcgtggcggattcaccagccgtaatgccgaccagttcagtaccctgaaatgacatcccggctaccaagaaaacggtcaggatgctgggaaagccgccaacaaacggtgcttttttgtaatggaagttttttaagccgattggtccttgaccacccataatcccaaaaataatcataaaaccaacgatcaagaagacaatgatcgtcacgactttaataattgacagccagtattcagtctcaccatatgagcgtactgacagataattgatcaaaaagattaccagcaaaacaaagccgctaaaaatccattcaggaaactggggccaccagaattgaatgataactccagaggtaaccgcgtcaacggcaatcgtaatcacccagttcagccagtagttccaacccatggcaaaacccaatgctgggtcaacaaacttagtacagtaggtagcaaacgatcccgtcaatggaatataggttgccatctcacccaggctggtcatcaaaaagtaaaccatgattcccatcatgctgtaggcgaccaaagccccaccaggcccagccgttgaaattgccgaaccactggcaatcatcatcccggtaccaattgaaccgcccaaagcaatcatcgacaggtgccgcgtctgcagcgtccgtttcatatggccggaattgccagttattgtctgaccttccgtaccaccattctttgcctctccactcatcgtaaatggattcctcctctatgacaatttcgagcgccagttatacatttctcatggataaagtataaggtgtgcatacttaatatgattaaacattttagcgcaatttcagcaaaaaagccatatcaattggactatctgcccaaattggcttatctgcgacaacgaaaaatattatacaataaaataaatatttaaacaagtttatgcatgtaattataaagctttaaccattttcaaataaccgttttcattaccgatctgatcaaatttaaactttttcaataaagatctcgaacgcaggttatcgatggccacatacgcctgcagccgcttaatatcactattttttgccaacgcttgcaaaaaagctgcgagcgcctcactcataattcctcttccccaacgatcgcgtctcagtaaatatcccagctccatagcatgggcccgatagtttccatcacttgcatatattgggaataagctgaccaacccgaccagttgcccagccggatcagtgattaacaaaagctgctgctgcccaagccagttattgaccgcccagccgcgcatcatttgatcatctggcagctgcagtccgcttaatctaaccagttcaccatcgcctaatagattcaagacagcttgaagatcatcctgacagcccattttaattacgagacgggcagtcttaattggccaaagcaattgtttgtgcattataatttcacctaccaggatcttttttcaggagtgtttttaatggaaatcattcaaaaaaatttaagtaccgcaagctatcaaaccaaagctgtgctgaccggctatctgcagacacctgttcccaagtcgccggtgcagcagttccgtccactgatttttgtccctggtggctcaatgacgcatattccagtcgaacaaaccgaaaagaccgcgctcagtttttcagctcgtggctttcaggttttcgtgctgcgctataccttcaccagcgagcatcagccggtttatccaaatccactgatcgatctggcattagccgtcgcgctgcttagaaaacaaaccgcagcctggcatttaaaaaccgatcagctgacgatcatgggcttttcagctggcggtcaggttaccgcgctgtacaatgactactggcatgcaaaatggctcagcagactcagtggcgctgccagcgatcagctccgccccaatgcggttatcctaggctatcccgtcatcgaccttaaccttggctttcctaaagacgccacaacgcgtgccaagtgggccgatgatccagctcgttataatgccgcgacacatgtcaacgacttaaacgcgccaacctttatgtggacgacttttaccgatcaggtcgtaccagtgcaaaatacgcttagctacagccaagctttgctggcccatcagattccccaagaattgcacgtttttgcgcatggcccgcatggaatggacattgccaatgccttggttgcccatcataatgatgttgatcagccccacgttgcccactgggttgaactggcatgtgagtggcttgacgatctatttaaataaaattacccaggaaatataaaatacccggtgtcgattttaaaagagacactgggtattttgattcaaagtttcgaattagcggtcttgcgccaacgtctttttatatcattggcaaacgttaggtaaagcgtctcggaaatctgcagccaggcataggccagcagcatcgctccgaccgtatcaaacggatagtgagcataaagatagatgcgcgaaacggctaccaagaaaacggccatgatcaacagcagctggcaaatcacccgcactgcagcatttttaatcaatggcaccacgatcaaaaacagcacggcagccaccagaaacgtccccatcacatgtccactgggaaaactgtagccatggtcaccagtcggatgctgcaggggccgatcccgcttagccaggtacttgacgatctcatctaaaaggtcaccgacaatcagcgttagccaagcccagagtgccggtaccttatatttgaagccccagagaaaaaaggtgatgatcagcatccagacaagggccatcttagggctgcccaaaaacgaaacgactaccattatatgataggttgcattgggcgtatggttaggatttggtgccagcagcgcctggaaaaccgaatccaaaacctgcaggatcattgagttgctcattaccataccagcgacaatcaaaaacaatacaaagcttaccatgaaccgcttccaacgattcggatcttgtcctatcagcatgttaaaattgctcctttgttggatcttgtcatgacatcagccacaataaatttaattatatcacaccctaccggttcctaaagtggtgttcagagaataacagtcgattaatcagatcacccagaccaaagcccagcgtaatcgcaccagcaattaccaaaatctgataaagatataccaatgccgcaccgttgctgcccaaaacaaaactgcgcaccatcttataggcttgtccaccaggaaccagtggcaccagcgcgggaacgttaaagatgatcatcggcattttttgccagcgggcggccgccatactcaagacgccaatcgtaatggcagccagcagattgcttaaagccagccccagatgcagctgataatagactgcccagtaaaacgcccagctggtaccaccgattgcacctgcacaatgataggcccggcgcggtatgttcagtaaaattccaaaacaaattgtcgaaaggtcagccagcacaaattcaaagattaatctaacccaaaagttttccatgctctacctcgctcaaacgtatcgcaacacaaaaacgattgcgcagccaatggcaattgccgtcagcgtggcttcaaccgcgcgtgacgtgccactgatcagatcaccagacatcagatcacgagccgcattggtcaaaggaacccctggaaccaacggcatcacgcagccaatgataatgtcattaacgtcgttggcccaatgtagcctaacaaatcccacggtcaaaagcgcaatcactaaagaagcacaaaattcattaacaaaacgcgctttggaatgctttccaaaagtcagatagacctgatagctcaccagggcaatcacggctgcaaacaatgaatcatggacattgccagtataaacgatcgtcaatgcccagctaagcacgccggctgccacgcactgaacaaaatctgaggtctgctgcggctgctggtcaactttttgcagttttgcatacagtgtctcaacatcgatttcatgagcagcaaactgccgcgaaagactgttgacggctgcaaccttgttaagattcaattttcgctgatgaatatcaattacctgagcgtttggcaggtgttcggcgctggcaacgatcgccgtcatcgttgtaaatgcctcaaagttttgcagctgcgcgctcagtgccattcgtcgcatcgtgtcattgacgcgttccatgtttgagccgttttcgatcagtaagcgccccgctagtagacacgcggtaatggcaagattctttttatccttgctttccactttcaatcatccatccttattattggtgaatttatccaggcagcagctaaaacaacaaaagggttcaatgcatcatgcattaaacccgagccttaagatttaattgtctagtcctgcaaaggctcttgattaacgaaaatattatgcgaagccttataggaaatgctgagctgctgatcattatccagacattcaaccaagatcggtccctcaaatggttcgtgtttgattaccttaaccttggcatgcagctgaagaccaacctcatttaaataggtcagcagctcatgattgtccaagaagcgttcaatgacgaccgtttcaccatcttctgcatcggccagcagacgatgactgacgctgtcaaacttgccattagcagccggaataacgccaccatgaggacagtacttgggatgattcaaaaaggcatccagagcagttgccaaacgatcgctggtattatgttccaagatctcagcttctggatgaacatcagtcatgctgtagtgcagatcatcaactaaaaaagtctcccacagacgatgctttctgactaattcagcagcatgcttgattccctctggtgtcagagcgatcccatcatatggctcatgagataccaagccttcctccgtcagcttggtgatcatttctgttactgaaccggctgcgatgcccaatcccagtgaaatttctttattagaaacctttttatagccaccgcccagctcaaaaattatctttaaatagtcttctttcattggggtcatgttttgtacaacttcctcctaaaatatcagcggcagtaagtgtcgtcgagcttttaaccatgtatttttccatattgaaactaatcagattataacatatcataaaaatgtaatttggaatacctaaatctatttttagcttatttattttaaggcggggagtgatttcatggaacggtccaacgtttccaaacagcgtttcttaatcgtgacgctgcttaatgttttgattaccgttgtcgagattattgggggattggtatccggcagtctggcactgctttccgatgcctttcacaacttaggggactcgatctcgattgttttaggctactttgcccaagtcatttcggggcggccggaaaatcggcgacgtacttatggctaccggcgagctgagattctttcagcaatggccaacagtatctttttgattgttgtttcaatcacgctgatcgttgaagccattaagcgattcagccatcccgaacacatcaacggtcagatcatgctgatcgtagcgattatcgggctgattgccaacctggtttctgcgcagcttttacacagcggcagccatgacagtctgaacgtcaaggctacctacctgcacgtcttaagcgatgcactgtcttcaattgccgtaatttttggcggtgtgatcttaatgtttttcaacatcacctggcttgacccaaccctgacgattctggttgcactctacatcgccaaggaatccttgccaatcatcaagcagaccttaagcattctgatgcagtcgtcgcctgatttggactatgaagccatcaagcatgatctgatgcaggtaccaggagtcgtaggcgtccaccatgttcatgcctggacgattgacgaacaccgcatcgtcttttcagcacacctcaactgccatgatatgatgttgagcgaagtcgaaaaaatctatctgcaggttgaaaaaatcctaaacgacaaatatgacatcaaacacgtaactttgcaggccgaatgccagcgtggacgtgacgaagagctctttaatccaccagttgatcatgacaagctgtgctgatgagtttgaacggtccgatcaataatttacacgatttttaccaaattgctattgctttatcataccaagcgtctataattcggttcgagaaataagcaaagacaatctttaagaggtaaaaaaatgaatactcaatcaaatcaagccatccaaaccaagatttttgggcaccgcggctaccctgccaagtttccggagaattcattagctggttttcgttatgtggttgcccaccagatcgatggcgttgaatttgacgttcatctgacttcggatcgcattccggttatcatgcacgatgaaaccatcgaccgcacgacagatggtactggccacatcgttgactacacgctggctgagctacggcagttcaagctgagcaatggtgaatccattccaaccctggatgagctgctggacgtatttgaaaacaaagacgtctggatcaacctggaattcaagaccgacaacattgcctaccaagacattgaaaaaatcgttatgccaatggtcaaccaacaccaattgctgcatccggttatctactcatcatttaatctgcagacattaaaaaactgcatgcagcttgacgcaacgcaggactataactggctgactgaaaatgacgtgcccaaagcccaggaattcgtaaaaaaagagcacctgcatggcattcacccgcatcattaccaagcaaccaccgctacacagcgcgtctggaccgttaatgacgatcaagaagcccagcagctgtttgaaaaaaacgttgccggcatttttaccaatcgatttgaagacatggttcaattaagaaaaaacgttcaaatcgctcaatagtctcaaatccccgtttcaaaacctgagacgaggatttttttgacacaaaaaaaatccgaaatgataaacatctcggattagtataaattgatctatcagaacatcttaccaacacagtagtgaataataacggtaataataccaacgataatattacggacgatcgctaccttaaccaagccattgcccaatttggaactgatatatccggtcagcgcgctggtaaagatgactgccagaattacggcttcccagcgccaggccaacggtgccaagaccattgccaaaagcggcagcaatcctcctgccgccgccgctgccaaggatgagaaggccgcattccatgggttgagataatgtcccagctcaatatcgtatttaacgcgtaccaccgtctgcagcggctttttgttcagtagatccttggcaattgccgttgcggttgcctcgctgacccctttttccatgtagtgatcgcgaactgcgacaacctcgctttcaaagtcatgcttgagcagatattcctcatgagcaacggctgatttttccgtatccttttgcgtagagactgatgcatattcgccagatgccatcgaaaaagcgcaggccagcaaatccgacagaccagcgataaaaatcgtaaattgatccgttgttgccgctgctaccgaaaccagcacgccaacgaccgtcaagattccatcattggctcctaagacacccgcacgcagcgtattgagcttttcttgcatcgtctgcttgggatttttattttgatccattttcgcttacccctttcaacgtgcaaaaagctgaccaatcaagtacgttaccagcatcgtcaaaaacccggatgctacattgcgaatcactgacttcaaccggtttgacttgcccaaaacggccgccagatagccagtaatgatcaaggcaatcaaaacggcaataatcgtagcggcaatcgcgatctcatgcggaaagctcatcacagcaaccatcggcaaaatcgagcccagaggaaacgcgatcaatgaagcaattgctgccgcataaggactggtaaattccttgggattgaagccatagcgctcttgaacggtcgtaaccagcagatcttcatccatcagctctttagtggcttggtgagctaattttggatcaatatcttgcgctaagaacttatttttgacatagttgaattcacgatcatagtcttctgacaatcgttccttttcttcaatcaatgccatcttctgcgagtctttttcagtagaaacggaaacgtactcacccatacacattgaaatcgtgccagccaaactgccggaaagcccagaaatcaagattgcatgtggattgctggtcgcggctgccaccccaataacaattccggcaaccgaaatgatcccatcattggcccccattacactggctcgcagcacattgattttttgtgccagcgacattttctttttcataagccagtcctcttttcttctcctagtttagaatcattataacatagaactgagaaccgacaagctttttattttatcaactaaaactaaaaggcaagcccgatgccgccaccagcattcggcttgcctttttgattgccaaaatatttttgatcagctgactattcgtagtgagtaacctcatccgtacgaatcacgaaaaccgaagttcccgaatgcttaaccatgtatgaagcctgtgaaccaaccgtattacgattgccgtttttaccaatcgagccaataatcagcagatctggcttaaattcaggaatcacatgattgcagattcgttcagcgggacgatcgccttggtcaacgatcgccgtgatttttttaggatccacgccataatcaatcgcagcctgcacgtagtcgttcaagcgtttgcgtaaatcatcttccgtactgtgaacgtagtctttgtccagtgcttgataaatgttgactcggttagtctccaagatcgaaacgattccaatctcagacccatcgcgcttggccttatcaacggcgtaggaaaaggcagcccgagcgtcaggcgcatcatcaacgccgacgagaatctttttgaatttctttggcttaatgtcgaacaaactaacgactcctctcttagatagcaaaccgacgccactcgccggtactgactgatgttcatttaactcatctatgtctatgttactacatttaccgactttgtaaactcaattttttagacaagcctaaatattatttaatgaatcataaaatgtttgcaggctatttagttcaattaatgattattagcgttataatagttttgtaaacgtattcatttaagggaggttattgacatgaacgaccaagaaacgattcaagactattgttatgatgaagccgcctttgactaccatgatcgtgcatacattccgctgcaggtggcagacgcaccagaacagcctctgcggattccagaaattttaaaacccgatcaagaaactgctactgatgtttactatacgatcaccgcgcaaaccggcgccgttcagctcctgccaggcaaaaagaccgcaacctggggatataacggaccgctgcttggcaaaaccgtcatctttaaagatggacaaaccgtgcacattcactatatcaacgacctgcccgaagtaacgacttttcactggcatggcctggcaattccgggaccgatcgaggatggcggctgtcatgctcctgtctatcctggacagacgcgcgacgttgaatttacgattcatcaaccagctgcctttgtctggctgcacgctcatccatgtccggccactgccgaacaagtctggcatggactagctggtggcgccatcgttcaagaccagcacgaagctcagctgcctttgccgcgtaactatggcgtcgatgacattccggttattctgcaggatcgccgttttcacgaggacaaccaatgggactatcgccaagactacgatccagatggtattttaggccccacgccaatgatcaatgggacgatcaacccctacttcgacgttaccacgcaaaaagtaaggctgcgtttcttaaacggtgccaaccgacgcgaatggcggctacattttagcgatgatctgccatttacccaaattgccggcgacctttcactgctccctaagccgttgaaaatgaccaaactgatgctgacgtgcgccgaacgtgccgaaatcatcgtcgactttggcagttatcgccctggtgatgaggttgtgctctattctgatgatacgccattgctgcgctttaagattcacgaattcaaaccagatcacgctatactgcctgatgtcttgtttgaaacgcctaatccggctgtatcgcctgaaatgccgattcattacgtaaccttggatggaatggacgaagcggttgcaatgaacggcaagaagtttaagatggatcgcatcgactatcagatgccaatgcataaggttcagctttgggatattgaaaacaccaatcacgcacctggcatgattcatccatatcacatgcacggaaccggctttgtcacggtagctcgggatgggcatgcgccaaatccaaacgagctggggcttaaagatacgattgccatcaatccaggcgaacatgtcctgcttaaagtctggtttgacgtgcccggcgtctttatgtatcactgccacattcttgagcatgaagacggcggcatgatggcacaattaaaagtcgttgatcccaaaaatcccaacaaacaatatcagctgatggatcacatgaccctaatgcgcgcctttgccgaagaacgccatgtgccattaaatgagctctggctgggcgggatggattcctatcgcaaaatgggtgaagaaatgtagcatatttcctgggaaattttgttttttactactgatcagccagctataaaattgccgaaaacaaataatggtgcctgctcaagccgctaaaacttgagtaagcaccattttattttaagaaaaatagaagttcaggccacgactgtctgattttccatctgctttgactacttcaagaccaaaaagtacagcagcacaagcagaccaagggcgatccggtaccagccgaacaccttaaagtcgtgcttcttgatgtagcgcatcaagaatttgataacgataatcgatgagacaaatgccgtaatcaagccgaccatcatgatccaaaattccattgaggtaaacgccagaccaaatttaagcagcttaaacaatgctgccccaaacataactggaatggccaagaagaaggtatattcggccgctaccgtccgtgatacccccaaaagcagcgcaccgacaatcgttgccccagaacggctggtcccagggaagacagcagcaatcagctgaaagaagccgatcataactgccatgttatatgaaatttcagcaattgaattaaccttggcttttttacccttgtgcgccgtttcaatccaaataaaggccaccccaaaaacgattaaggcgattgcgacactgactggattgtagaaaagccgttcgaaggtatcattgaaggctaccccaataatcccagccggcagacacgagataaagatcttcagccacatgatcatgatgtctttatcaacatagcgccagatgccttttggtgcgtcaatccccacggcttgactgtgatggaacggccagatgcgcttccagtagattacaacgacggccatgatcgcccctaattggatgacgacttcaaacatgctgtaaaacgatttggacacatccaatttaacgaactggtccaacagaatcatatggccggtactgctgattggcagccattcagtgatcccttctacaagcccaaagaaaaaggacttgattagttcaattatcattaagttaaacatcctttcaaaaatcgctgtttataatgataagcttttttttcaagataatatagggcctttaccaaaatttcacattctaaagtcaaatgagaagtcgaaatgctggtgatcgccagtaaaccgatcagcatgccgctccataaccaagcggcggttgccaaacatcatccaaagcgtaaccgcaacaaagtagagaaactcaatcgtcagggcaatccaatcagccagactggtgctgccgacgatcgtttcatgatgcgttaagcaaaagattgctgcatcgataaagaaatgcatcagcatcgtcagccataattgtcccgtgtatagatagacgacggccagatatagacccagaccaagtgcaaaaatcgcctgcagaagcgtgacatcccatttctgcacggcagcatttggcaggtgcagcagaccaaaacagagcgcactcaggcccaccgcaattggtacgcgctgcgtcagattacggcaggcataaagcagcgcgcctaaaatcccaaatcggcaaagcgtctcttcagcaattcctgcttccagagccgtcaagaccaagcgccggttccattgaacgtgaaaatcaaactgcagccagccagtttggaaaatgtcaaatgccacataaattacataaacagccagcagaacgctcattacccaccagctccaaccagtgccaaacgttggtaccagcccaggccatgacagatgccaggctcgcatcaaaaccgttaccgaaacaaaaaatgccagggcaccccaaaagccggtcccaataaactccttaaacaactgtggctgaataaacttatctggcaaaaagtactgcatcatcatcaccgttgtcataaacagataaaccaaaaagacgatgcaggcaatcacgttttccaattgaccgccaatctcactggtaaacggtgcaaacatgattaggtagtatagcagcgttacggcaattacgcctcgtgccggcagatgcagccgcacgatgatctctctggtgacggttccccacagcatgatcagcatgatcggctgcagcatagtctgtaagaacacgtcgacaacctgcagccagcgcggtacatgcgtgacaatcgtgatcatcagcccctctaaggcaaccagcgccaaaatgaataccagcaaccggatcccgcgccccataatcaagacgttccaccaagcaacggcaatcaagaaaatcaaagcgccgaccagctgggcttgataccagatgtgaagatagtctctccctgacatcaaaaagcctccttaaataatgaaaaaaacaaaaataattacagttttcatgataccagagggcagacaattgattaagtccggaatcgaaaaagtcaatttattataatcaaaaaagcccgccatttagacgagctttggttaattgctatttttcagttgcgactggctgcgcgtttttcttggccgccggacgactacgccgacgcggacgcggccgtgacttgtcgctttcattattggcagcaccgtttttggccttgtgcttgggacgcgaattagtccgtcgtgcgttatggtgaacgtcacgctgcagatcgctgccctgcccttcctcatcggcattcaaaatagtaaccatcggaataataactggccgccgccccgtccactcaaacaaaagtttttgcagtcggctaacgatggtgcggttgattgcccgccgatcaacgtgctgatggttcttaaacgtattcagaattgcccagaagacttcatggttagccgccttgatcagctcttgtgattcatgcatatagacgaagcctcgcgaaacaatgtcgggcccagccacgatctggtagtcttttaagtcaacaacggcaatcgcggtaactaccccttcttcagaaagcatccgtcgttcgcggatctctgggttaccaaccgtgtcgccagcatcgcgaccatcaatatagacatcactggccgtttcgatatggtcggcaacgcggcaggtatccttggtcaaggctaaaacatcgccattagccaaaacgaagctgtgatccattggtacaccggttagctcagccagcttggtatgaatcttctgcatccgatattcgccatggaccggtgcaaagaactttggcttcatcaagcgcagcatcagttcttcatcaacctgaccaccatgaccggatgtatgaatattgttgacataaccatgaattacctcggcaccgtcttcttccagcttattgatcagagcattgacgctggtagtgttgcctggaatcggattggaagaaaagacaaccgtatcgccaggctgaatggcaatctgccggtgcgtgccattggcaatgcgactgagcgcggccattggctcaccctgcgaaccggtacacatgatcataaccttttctggcgggtagctgttaatgtcattttgatcaatcagggcatcttctggaatgtgcagatagcccagctcttgtccagccgtaattgcattctccatgctgcggccaaacacggcaatcttgcggccctgcttcaaggcagcatcactggcctcgcgaagccggtagacgttggaggcaaatgaggcaaagatgatgcggcccttaattcgctcaaagatccggcgaatatgaatatcaacccagcgttcagatttggtaaattctggtcgttccgcattggttgaatccgaagtcaaaagcaaaacgccttcttcaccaagcttggccatttgttggaagtttggtcccggcagatgaccaaccggcgttaagtcaaatttaaagtcaccggtttgaacgatcgtgccttgtggagtatgaacggcaactcccaaggtatccggaatcgagtgcgtcgtccggaagaaggagacccacagctttttaaagtgcaccgtatcgaactcattgatttcatgcagctcggcactctttaacagatgtttttcctccagcttgccacgaatcaaagacatggcaaacggaccggcatagattggtgcattgaccttctgcaaaaagaatggcagtccgccaatgtggtcttcgtgaccgtgcgtaataaagatccctttaatcttatctttgttttcaaccaggtagtcgtagttttgaataacgtagtcgacccccagcagctcgtcttctgggaacaagaccccacagtcaatgatgatgatctcatcttggaattgaacacagtacatgttcttgccgatctcgcccaagccacccatcgcataaaaagcgacttcattatttttgatttttaatttgcgcataatacctttctttcctttgtgttattaaatttcgtcaattttcgcaatccagaaatcaatgcaagtaaaaatagcgccgtcaaacagctgacgtcacgtctgaatttgaaaatgagcaactcgtattatttatccgttcaaataaaacttagtttattctaacacatcctagaaggcattagtagtaagtcgtttttggaaaaataaaaagcacggctgagtaccgtgccatgattgatttaatcttcttggggcagcttggcatgctctgactgcatccattctgcccaggtcttaactggttcaccatcggcatcaaaccgcgccgacagctcatttaagatcttaacgtagcaagacttaaccatcgaaatactcattgcagccagtttggcaacggtcagatagttgttttcttccagaatctgattgatcatcgccactgcctcatcgtcaccagccagcgcgtcaataatttccagattgtcctgcttgtactggcggacgtagtacttggcaaatgtttctaaagcattgtcctgtgctgcatcggtcagctcattaaagccaaaagtatcttcgctcatggaagtcgtcccctttaaaaataatttgtacattactagcttaacactttttacgacttctgcagttgccaacctattgacggtttcgcagcgttaatttaacgtgtccgggtccttgaacgattgcaacgacttccttatctggcgcatcatccagttttcccaaattgatcagcgtcgcgccggtcttttcatcattttcaaaatccaacagccggtcgccaataaaatgcttgaacgacttggccattacctgatgctctttttgttttttgacggcaaccggcagcgtaaagccctcatctaaaaaatacttgataccggtcacctgcaccagcgtcatcaacgtatacttatggcttttattttgctgatcctgctctgaagcaatatagcctttgcgctcccaatatctgatctggcttggtgaaacgttggctgtttgcgaaagctcgctcatgctgatgcgcagtttttcatgaacgaacatcttgcggaactcttccgtaatgggactcattttctgattcctttcctattttctatcaattataaccattttacattgtaacctaaaaacactaatcaatataatatttttaaatatctttatcaagaaatttgacaaagatatttaattatcatatatttataatcgcttttaaaaaatcagtaacttcaaaggagggctttacgtgtctgcaaatacagcagtcgacatcaatggcaagccataccatcgtaatctgttggtaatggtaatgctgatcgggagcttttgtacggttttaaaccagacgattctggccacggcttttccaactttaatgaaggcctttgacatcagtacggcaaccgttcaatggctgacaaccggttttatgatggttaatgggattatgattcccgtttcggcatatctcagcaataaattcaattcaaaatggctctatatctcagcgatgacgatctttgagctgggtaccattacggcttttgcagcgcctaatttcggcactctgctatgcggccgtctgattcaggcaactggggtcggaatcacgatgccgctgatgcaaaacatcatgctgacgatcttcccgcctgaaaaacgtggcgctgccatgggaatcaacggtctggtaatcgcgttagcaccagctctgggtccttcgctttccggctgggtagttgacaactactcatggcgggtgctctttggcatgatcattccaatcgttgccatcgtgatctttgccagcttcttcttgatgcaaaacgttatcaagactaccgatcctactttggactggctttcactgcttatttccacggttggtttcggcagtgtcttgtatggtttctcatcagtcggcgacaaaggctggaccgatgccatcgtctggggcaccattttgatcggcgtcattctgattactattttgatatggcgccagaatcgtttggagcatccattcttgaacttcaaggtctttaaaacgccggaatttgccctggccacgctgctcagctccgttgtaatgattgccatggtcggcgttgaattggtcctgccgctttatctgcagatcgtccatggcatgtcggctttccattctggattgacgctgctgtttggagccatcatgatgggggtaatgagcccaattaccggaaatcttttcgaccgctatggtgcccgtcgcttagcaatgaccgggatgtttatcttgacgatcggcacgctgccctttgcattcttgacccgcgaaacgccaatcctcgacgttgtttttctttatgccgtgcgcatgtttgggatctcaatggtcatgatgccagtcactacttccggtatgaacgctttgccattcagcatgatctcacacggaactgccgttaacaacacgattcgtcaagtagcctcttcaatgggttcagcaatcctgatctcagtcttgaccaacgtgacgaattcgcaaaaaccggcacattcactgcttaaagcctcaccgttgcagtacaagtcgcagatgatcgatgctacgctcaacggctatcatgctgccttttggattgcgatcgcctttgccgtaatcggtcttttggccacttcgcgactggggaatggcaacaagattcacgctaaatacgactcaaatgccaagaaaggaggcaatgcataatgattaccattatcatgtttctcggcgccattgccttctttgccgcgatcatgttctcacccagcaatcgtactcgttggctgttgggaatgatctccggcttgatctttgtgggatcgactttaatgattacggccaacttccatgagcattggggaatgaaacaagtcacaacgaccaagacgcaaaagatctattcaaccagctcgcagatgcaattggcgctctaccagccagttggcacttccggtaaagacaacgtatacatctaccagaccaagccacggcaaaaaaagccccagcatacgcaggccaatgagtttacgaccaatcgcctagtttggactgattcagatcaggcgaccttaaccgtcaaagagactcgctggcgctttaaaaacgacttttataaagtactgtttgccggttccaaaatggatgggaatctagtttcgcggaccaatacgtttagatatccaaaaacgtttgttaagatttcagtcaaacaggcacaggcgctaaaaaagcaggcacaggcactgaaatcacccgcagctcaggctcagttaaaaacacaagcggccgcctacgttacagctaaaattcaggcagccaagcagcaaaatcctgatctgacggaagctcagctgcaaaagctcacccaacaggcacaacaggaatatcaagcacagatgatcaaaaaaatgatggctgccaaataaaagcagtcatcgcttaatcaatattaaaacgacagcgtcacatcatattcgatgtaatgctgtcgttttttgttaatatcgcaaaaagcctaatcaacgacgtggcgctcaaacggctggtcgctgatgccttgtgccagaatcttcttgcaccattccttggcagaaaacagtgagtgatcgcgatagttcccacagcttttttccgtagttccttggacgtcttcccacttggtctggtaggcaatttcttccaatgaggacttcaaggctttagcaacttcagtcgtgctgtgctcgccccaggtaattaaatgaaagccagttcggcaaccgaatggcgaacaatcaatcacgcccgtcaagcggtcccgcagcaagccggccaacaggtgttcaatcgtgtgcagaccagccgtcggaatggcattttcgtttggctgaaccaaacgcagatcgtaattgctgatcttgtcgcctttaggtccttcttcaaccgtaatcaagcgaacgtatggcgcctttacctttgtatgatccagtgtgaaactttcaactttagccatgaaaaattcctcctaaaacttaattagccttattatagaacttttaatcagctctgtatgaataaaattatcaaaccatggcctgggcaaacgttgccggcaattcaatcgtaaagtcgcgatgctgcagcgtgaatggatcgtcaaacgcgatatgcgaggcgcagagcagctgatgatcaaactgtgcggtctgaccgccatacagatgatctcccagcagcggatgaccaaggtagctgaaatgtacccgaatctgatgcgtccgtcccgtatgcagtcgtactctgaccaatgtccagtcatcaccgcgctcttcaacccagtattcggttctggcaaactgaccatcggcactgacctcgcgtcgcgcctgtcctgctacgcgcgcgattggttcttcaattatgccatgatcgtgtcccaagacgccttcaacgatcgcttggtattccttaaccattcgatgctgctgaacctgttgactgatcatgctgacggctacttgatgcttggctgtcagcagcagaccactggtaaagcgatccaggcgcgtaatcagatgcggccgctgatctggcgagtcttgatccatcaagtatccggtcacgcggttaagcagcgtgtcgtcgccagtcgtcggtcctggaatcgatgccagaccagccggcttattgacaaccagccagttggcatcttcatacacgatctccagggtaccgtggcttggctgaacgtctggattgggaaactctggcacgactttgatcgtcagtggctgattgggtaaaatcttagtcgttggtcgcaccgttcgatgatcaacctgaaattcaccagcaccatttttaatgtcgttaaacatccgatgtcccatacctaaagtctgtagatattttttaatcttgatcggttcttgaccacgatagatccaagtattttccatttttccctccaaaagagcatacaaaaaaagttgagaccgaaatcccaactttcaaaaactatagcggtccgtacgagactcgaactcgtgatctcatccgtgacagggatgcgtcctaaccaaaactagaccaacggaccaatttcacaacaattgatagtatacgaaaagatttgctcagcgtcaatagcagcgaccaaaattaagtcgttttaaattgaaaaattttttgccacgtcagatgcaatctactattattgatattgaattgcaaattggcagaccattttgtttgtcaggctgacataataaaaaagtgaggattctgaaacatgaactcatccctagctacacgcattaaaaattggtggcagcattatgccaaactgctgaagctgctgttcattgcttcagtgattatttttgtaatcacggcgctgggcagctttttaaaagatgttgactggcaccgtgtcggtattggcctcgccagtcagtcacccattcacgttttaatgatgctgataggcggctgcatctccatcgtgcctatgcttggctatgactttgccattactcattttttgtctggccgtttttctaagcactacattatcagaagtggctggatcactaataccctgaccaacgtcgccggttttggcggactattgggcgcaaccttaagagcctatttttatggcaagcattccagtaaaaaacaggtcctgtttgccatctcaaaaattgccatctttttactgtctggcctttcgattctttgttggctggcgctggcagtcctgcttttagtgccgaacggtcatcatttcgatcgctacatcgtctggctggtcggcggcggcctttatttccccatcgtctttattttcacgcgtctacaaaattccagcttttttaaggatctaacgcccaagcttgaattgttcatcgtggccagctcaactggcgagtggctgctggtggcactctttttcttgatgattggctggctgttggacgttaagatcaatttgttgttggtcctgccgatgtatgtcgtcgcccagctcttaggcgtcatctccatgctgcctggggcaatcggctcctttgacatcatcatgctgatggagttgagtatgctgggcgttgatcgctcaacggctctggtctggctggttttcttccgcgtcttttactatttggttccgttgacttttggggcgttattgtttgtataccatttctgccagaagattaatcgctttttcaaggggctgcccaacttaatctggcatcaaagcgcgcatgtcttgatcacggtctttatgtacttttccggtatcctcatgctgatcgatgcctccttgcctgatctgactgaaaacagccgctttctgcagcgtttctatcctttcactttcttctttttgcatcagttaagcaccgttttatttgccattgcgatgctggcctgtgcgcgcggcgtgcaggccaagctcaaaaaagcatactggccgtctttgattctgctgctgattggtatggtcaacacgctatggaatctgggaacctggggactgaccatctacctgctgatcctgctgctgctcgttttgaccatgcggcatgccctgtatcgagaaaaaatggcttattcgctaggaaaggcatttagtgatgggatcgtctttgtcggtatttttatactttacattattattgggattgtaaatgagccaaactactatcaccatcataagattcctcagttcatgttcttccccggtgaaagtctctggttctccggtttcatcggcttgatcttaggaattttggttatgctggccattctgcgctacttcaccagcggctacgatccgtttaacggctatcattcattcgatgcccaacgctgccgacagctgattgagcgctttggcggcaatgagaccagtcacctggcttttttgcgcgataagaatctctactattatcaagttgaaaacgaagaccggctctttttcatgtatcgacgcaaatatgacaagctgatcatcatgggcgaaccagtcggcgaccaaagcgtgctgcacgatgccctgagacagttcatcgttgaagccgaccgctatggctatcagctggtattttatgaggtcggacagtcgacaaccatgctgctgcacgaatttggctttgactttcttaaaaccggtgaggacggtctggttaaactggctgacttcacgcttgccggtaagcgtcagcgttcacagcgcgccttgatgcacaagtttgagcgtgaaggctacacgtttgatgtggtagaaccgccatttaatcaagatctgttaaaagaactgaagcacgtttccgacagctggctgggtaagcaggttgaaaagggcttttcattgggcttttttgatgaatattacctgcagcaggccccaattgccatcgttaaaaatcaagaccagcagatcgtggcctttgcaacgctgatgcctaccgggggcaaacagattctgacgatcgatttgatgcgtcacgatcgcgatctggcaccatcaggcatcatggatatgattttcgtcaatctattcctgtatggtcaaaaagtcggctatgaatattttgatctgggaatggccccattgagtaacgtgggcgaatcacagtttagtttcatcgaagaaaaggccgcgcactttatttacgagtacggctatcggctctatggcttccaaggactgcgcaactataaagaaaaatatgccgatatctggctgtcacgctacaccgtctaccgtaaaaagagctcgttggtcggttcaatgctggccctggtcagtgtcgtcaatcagcgttcaaaccctgatcacagtcggcggctgaaaccgcagctaattgaagatattctcaaacattaattaaaaggtcgtctcttaagatgaggcggctttttttgttagttgaccaatttttaatccgtaattgggggcagttctttgataagaattaaaaaaattaatttttaatcaaacattgctaaacttaattcagcgcgtcacacttgataagtttacgcttacacgttttaggcagattgttagaatgcacaaaaagttcttgcaagctgtttaaattatagttataatttaaaacattagagaattctaatttaaatataattatttatcgcttggttttcccgccaagtctggatgcgttgcaatcatattggaactttttgcagaattaggattgtctcacttagttcaggaggaagatttatgggattttggaaaactatcactcgaaaagaagaccccagtgtctaccaagataaggacagtcaccttattcgctcattacgcgtacgggactttttggccttaggggttgggacgattgtgtccacttcgatctttactttacctggtgaggttgctgccatgcataccggtccagccgttgccatctcgtttgtgatcgcggccgtcgttgctggtctggttgccttcgcttatgctgaaatgtcggctgccatgccatttgctggttcggcctattcatggatcaccgtcgtattcggcgaattcttcggctggattgccggttgggcactgctggctgaatactttattgccttggcctttgtcggctctggtctttctgccaacctgcggccactgcttgccaacatcggtatcaagctgccggcttcactttccaatgcttttggtaccagtggcggggtcgttgacctgatttctctgatcgtgattgcactggttgccatcctggtttcccaaggggttaaggatgctgcccgtgttgaaaacgtactggttacgctgaaggtgctggcaattctgctgttcatcgtcgttggtgcaactgcagttaagcacagtaatttcgttccatttattcctaagtaccggatgacttctaatggtgcttttggtggctggcaaggtatctatgctggggtttcgatgatcttcctttcctacatcggatttgactccattgccgccaactctgccgaagccatcaaccctggcaagacgatgccacgcgggatcttgggctcactggcaattgccgtggttctgttcgttgccgtagccttggttctggttggggttttgccttaccaaaagtacgccaactctgctgaaccagttggtctggctctgcgttcaattggtcacccagtcgttgcttcggttgtccaaatcgttgccgttgtcgggatgtttactgccttgattgggatgaccatggctggttctcgtttgatctattcattcggtcgtgatggcatgctgcctaagttcttggggacactggacgaaaagaaccgtcccaaccatgccctttggaccttggcaatcattgccatcttgattggtgccatgttcccatttgccttcttatcgcagttgatctctgcggggacgctgatcgcctttatgtttgtttcattagggatctatgcattgcgccctcgtgaaggtaaagatattccaacgccagcctttaagatgccattctacccagtaatgccatgcttagctttcctggcttctctgttcgtgttctggggacttgacattgatgccaagatctatgccggtgtatggttcctgcttggtctggtaatctacttcacttacggaatgcgtcactcttacttgaataagacgaaaaaggactagttgtaagctttaaaagggggcggctgtcaaatgacggacagtaacaacaagcatctgctggaagaagaagccaaagcgtttgcttcttctggccggatcaactattacgatatcgttatcgatcatggcaagggcgcggtgatcaccgatgctgacggcaatgactatattgatcttttggccagtgccagttcaaccaataccggtcatgcccaccctaaagtcgttaaggcaattcaggatcaagcggccaagctgatccagtatacgccagcctacttcgctaatactcaagaagcccgtctggcgccacgtctggcaaaactggcaccaatgagcggtccggttgaggtttcatggggactgtccggctccgatgccaacgatgccatcatcaagtttgcgcgggcctacactggtcgtcagtatctggtggcctttactggtgcctatcatgggtctacctatggctcaatgtcgctttccagcatcagcatgaacatgagccgcaaaatggcgccgctattgcctggtgtcgtcaaggttcctttcccatcgccttgggaacgtgaaccaaatgaaagcgaagaacatttcgttgatcgtttcttccgtgaattcatgcggccatttgaaacctacctgccggctgaagaaacagcggttatcttgatggaagccattcaaggcgacggtgggatctgcaagacgccgcctgcctttatgaagaaggtctatgactttgccaaggctcatggcatcttgttcgcagttgatgaaatcaaccaaggcatgggccgtaccggcaaatggtggtcgattcaaaactttgacggaattgatcctgatctgatgtcagtcggcaagtcgctggcatccggcctgcctttaagtgccgtggttgggcgcaaagaaatcatggaatcacttggggcgccagcacatctatttacgacggccggcaatccagttaccacggcagctgccaacgcaacgctggatgtttttgaagaagagcatctgttggaacgctcagctaagctggggcaaaaagccaaggcattctttgaggccgaaaaagaaaaattcgacttcattggcgatgtgcggatgtatggtcttgacggtgggatcgatatcattgatccggcaactggtcaaggcgacactaatgccacggttaaattgatgtatcgaatctttgaactgggtgcgatcatcatcagtctgcgcggtaatattctgcgtttccaaccgcctttggtaattaccgaggcccagcttgatcaggcctttacgatgattgatcaagcctttagcgagctggcagctggcaagcttacgctgccggctaaggctgctaaaatgggctggtaatcaagcaaaaaggatccggagaataattctccggatctttttttagatgttttctttaagatagtcgtacagcgtatcctgcttaattgtcttggtatctagtcccagtgcctcagcaattgcaaatgcataggcccatgccgttgccggaccacgactggtaaccaggtggcctgcttgatcagtaaccgtaagttcttctttaaaatgaccgtttggtgccaactgctgcgtttctttttcaattcccggatagcaggtatagtcatgaccatccaacaatccatagcgtgccagtgcaatcggcgctgcgcacattgccgcacaccatttgccaagcgactgacgcttctgcatgattgccatcaactggtcattatcgcgtaaggtctgcgcattgccatacccgccaggaaaggccacgatatcataatccaacagttgatcactgattagcttgtcagctttgaaatcaatctgatgagctccgtgaatttccgatcctaagacgcctacgatatcgcattttacccccatacggcgcaaaacgtcgactaccgttaagccttcaatctcttcacagccatctgcaaaaactactgctgccgtctttgtcatttttatcacctcatagttatgatagtccaaataagcctattgttgatcaaaatcatgagccatctccataatcacgtgctctgattctggaattggatacaatggataggaatgaaacatcccacgcccaatcacggtattagtgttgacgccagctgcctttagccgccgcgtaaagtgaatggcgtctggatacatgatctcatgcgtgccaatgtagatcgtaacgttgcgcagctgatccacggggccatacagaggactgagacgtgcatcgcggggatcggtctgcccagcccacagctttcctaacgcccgtaaaccttcttgatcaagcaagtgatccttggctgcgtactttttgatcaatgggtttcccagctgcagatccagccatggtgaaatcagcaccagccgacctggttgcggcaacccctgctgtgccagattttcacagaaaccagctgccagccctgctcccgatgagtcgcccattaagataatgctactgactggccgctgatcatacagccatttataaagatcaagcagctcttgataggcatccttaaagtcatgattaggtgccaatgggtaatcaggtaccacgatctcggcatcagctgcttttgccaaacgattcaaaaactgccagtgttcttttaacggccgctgaacaaacgcacccccggcaagataaacgatcagattgcgtgcttgagcattctgattgagccaaatcagtggataaggcgctgtcaccagtttcacgggaacgctgaactgaacgttggctgggatctttaaaggctctcgattggctcgccggcagcttgtcaccagctcctgccgtttttgagaatcagccaaagtctgcttgaagcctgacagctgaatactcatctcggttaaggttgcccttttggatcgcgaatgtccgcaacgtgccatttcgcgcaagctgttgcccaggttatcggccattgcggctaaaatatgatgatcaaaattttttctatccatagactgaaattcactttcttattgtctttgcctttaatcctatcacgaatcagccgctaacttttatttgatttttttaaattttatcggtttccaactgatctagcttttgtgcaattgcttcccaatcatgacgaacgatcggctccagcttgcgtgcatataaaaaggctgctggatgatacattggaatcaccgtatagctctgatcgctcatgacatagccttgatgatcactggctgctctttgaatcgggcaatgcaggatctgaccatgcagactgccaattttcgcacttggccctaataagcgctgcaggctggtgtttcccagcggcattaaaatctttggtctcacctggtccagctcccagtcaaacagacgcgcataggcatagacctcagccttggttggggttcgattgggcgttttttcaacgattgcaccggttttcttatctttgacccttttgattgaataaggccgtcttctgaccacgctggtaatatagacgtcttctctggtcatgtgaagatattcttcaatcagcttcatcaattctttaccagaagcaccaacgaacggtacgccggttttggcttcctctcttccaggcgcttcgccaatcagcataatcttaggatgtttgggaccctgcccggctacaaatccggttagatgatgaccttttaatgcatcctcagcctgctgcagcagtgatggtggatactcaataagcatgctttcaccttcataaataaaaaagatttcggttatcaattataataacagaaatctttggtattactaactggtatgacgccacttcggatcacccaaaatccgtgccgcgatcagtcccagcggcaagaaaacgataatcaaaagtgctttggtaatccataaggcaccaacgctgatcgacgtgagccccatattatacatggcccgataaaggtaaagtccaggcaccatgatcacgattgccggtaccgttaaagaaattcgcggatagccaagccgatcacgaacaaacgaggccaggattcccgccgtcaacgcccctaagaacgcggccgcacctgctggcattacgttatagtcaaccagttcgagccgcagcgtattggcaattgcgccgattacacctgctgtggctgccattttaggcgtggaattaaacatgatcgaaaagccgaaaaccccgcaaaagctggccggcagccgcagtaaaaagagcatcagtggcgaaagtgccaaaggttcaaagttttctggcttgagatgcaccagcatggcaaccagccaaccgactaaggtagccacgataatgatcatcacggcataggccagtctttccaaaccagaacgcatgtcaagcttagaaagatccaagccgctagtaatgaatggaaaaccaggaatcacaaacagcatggccccaatatagccggcttcatggcgtggattaagcgaaattcccatgtttaaaagctttagggccatcacatagataacacaggccacggctaccgaagtcgcaagacaggcaaacagcgtcagcttacggtcaatcatcttgcgccggacgtaattaccgatgccagcgccaaaaaatgaacagatcatttcaattggtccaccgcccagcaaaaagacaaaggcactgcaggctaaagccgccgccagaccaacctgcagcggcgaatagttgcctttcatccggtgtatgacgtccaagcgtttgtgaatctcgccaacggtccagtgatcgccccgttggtcaaactccttgacaaagctttccagcgcattcagcttagtcgtattgactccagtattaggcagcgataaagcctgggtatagctgttattggcgtccatacaggtatattcgattgaaaccagaccaatatcagccgaacaggtcatattgagcttttgagagaccacgttcatcgagtcgcgtactcgccaggctcccgtgccacaagccagcatcatgatgccaatgcgcccaacaattgtcgaacgctcaaccaaattggctttttgggcgggggttacattgtcgctgctgtagaagtcatgccagtgaatcgccatatgatgacgatagttgctgagatcctcattatcgcttttgggctggccttgttcgatcggcagttttctcattgtttaaatcgctccttagtcgggatatcaaaaaattgtcaaacttcttatcattataaaacgattaaagctgcctggacgaaaaaattattttaatggtcacaagtcatgaaaaaaaggcctagtatccgatttcagataccaagcctcattcagcgttactattcgtcttctttagcaacttggcccagcagttttacaaagtgctgctcttcatcactaaggacgtagccattgcgaattgccagtgagatatagaaccattctggcaatggatcgtcaatctccaagggcacgatgcccgtctcatttttagcggcatcccggaccattaaggcaatccccacgttttctctgaccaattccttaacccatgaaatatcaggtaccttgtagacggctacggttggcttgatatgcgcataggcaaagtaggaacgcattgcggccacatgaacgtactgcttgtcataggtaatgaaatgctgattggccagttctttaaaactgatcttttttcgctgtgccaggggacttttggcactgaccataatactgtatggacgtttggttaggagctgtacatagaccttttcttcatccagcggtgccactgaccccagcatggcaacgtcaatttcgcctttaagcagcttggacagcagttcctgggagccggcttcacagatctgaacgcgccgcatgatggatcctggtactttcttggcaatcttggctaccaaaagcttaccgataatcggcggcaggccaaagcgaatctgccgttcttgaaccagatcaatcgaatgatgggccagcgagatctgttcattgatagccttagcactggccgccaaaagctgaccgctgcgcgtaatcatgttttgccggtgagcacgatccgtatagactaattgggcatcaaattctttttctaatcgtttgattgcctgagtaacggttggctgcgagacgccgaattccttggcgacgcgcgtgtagtttttatacttgaccaatgcttgaaaatactgcagatcccgcgtattcatcaaatcatcccttcagattgcatggcttctggccgtaagattccttgacgcagaccaataaaaatcgttaatatcagcagatcggccgaaccgcccagactgtagttgttgagcagatattcttgattgagccgtgccagatagtcgcggccggcctgcgtctgcgtgccgcccagctctaaatatctttttgcctgctgatgagcctcttcaacaacgtcatgacgaccagcccgtttgatcagattggtgtcctcagtctgcgcgacgatatgcataaacgtatccaacaagcgctgcatcgttgttccctggctttttttcagtgctggcacgccaatctgcatgacggttggatagccagcctcagcctcaccacgaatgcctttgatgccatagcgcagaaattctttttcaccggccgtcagctgctcaacgggcttggcatgcagcttttcaatatcgtaatcactggctgtcaatcctttaagcatccgtttaacgatcgtggtcagatccaactggggatgcttgatgcggtaagcttcggcacacgtcaggacaccgagcgaaaaaaccgcacccttatgcgtattaacgccattggttgccttaaacatcgtcttttcggcttcaatcccaaaagttcgcagttttttaaacataagcgtcagatcagtcgctgtaaaattcattcccaaatcaacgctttgttcaaaataatgatgcaaactaagggcactgtcaataaataagaatacatccatatcagggtgtgggccagaagataccggatccaccagtccaggcttgggattgacagagacttcataaatcattgctctaattgcatcattaaccagcttagcgcttgtctgttccataaatcatatcctcaattttggtaaaaaaccgcgactgattttaaatgccagccgcggtttttaaaattttaatcagtttagactaattagtccttaacctgcttgatcgtgtcaataatcgttccatcacggtattcaaccagtgccaccgtccgatcagtaaactgcagtggttctggcttgccaaccttggattcagccagcttttgcagatcatgaatatcgtagactggcagaccaggaacattgctcagggcatcctgcaggtccttgcgacgagggttgatggcaatcccgtattcagtaaccagtacgtcaacggattcgcctggcgtaactaccgtcgttacatctggaacaaccgtagcaatccgaccacgaaccaatggagccgaaataatcgtcagcttagaggtagcagcatcctggtgaccaccaatcgccccacgaatcacgccatcagaacccgtcataacgttaacgttgaagttggtgtcgatttccagagcagataaaatggcaacgtcaagctggtcaaccatggcccccttgttgtcaggatcagcataccaggaagcatcaatttcttgttggttttggttgttcttcatggaagcagccgcacccttgtcaaagtcttgaacgtccattaccttcttgaccaggccttcttcaagcagcttaaccgttggcgaggtaatcccacccagagcaaatgaagccgtgatgccggcatcgatcatggattgacgcaggaaccgcgtaacggccagggctgcaccaccagaaccagtttggaaggagaagccatccttgaagtatggtgagttgacgatcacgtcgtttaccattgaggcgatcttcaattccttagggtccttagtgaaacgagtagctccagaaccgatcttgtcagggtcacccaccttgtcaaccttaacaacgtagtcaacctgcgtctgcttgattgaagctggcgtgttagggtagtcgacaatgttgtcagtcaacaagacgaccttgtcagcatattgagcatccatcaaagcatagcccaatgagccaaagacggcatcaccattcatcccattagcgttacccagcgcatctgagtttggtacccccaggaaagcaacgtcgatcttgatgttgccgttttcgattgaacgcgcccggttaccatgtgaacggaagataactgggttctttaagccaccatgagatacaaagtcgcccaaagagccacgcattcctgaactggtaatgttggtaatcgtacctgccttgatggcttcaatcaccttgtcattcatgacaccagtcaacgaggatggtgccagcgtcaggtccttgatccccagcttcaagatgatgtccattacttgattgaagacaaagtcaccgttacggaagtggtggtggaaagaaatcgtcatgccgtctttaacggtctttttaacaacgtcttccagtgattcaacaaccttgtcgtcaccagtcgttacggtaaccttaggcgcaacccgttgaacctcgggatggccgatttcggtagtttcaaatggcttgtagtcgagctgcttcatcagatcttctggcagttcgcgatttacattatttttcaatgtagtttccctcctcgtcaatcaggttggatgcctttgccaggcgcatcacccgttcagcacgcagcacaactggacggtcgaccatttgaccgttcatggaaataacgccagaacccttgagtttggcttccttgatggcattttcaacgttcttggcgttttcgatttccttcttggttggttcgtaaaccttgttaaccattggaatttgacgtgggttaaccagcgacttgccgtcaaagccaagctggtgaatgtattcagtttcgcggtagaagccttccgtgtcgttcatgttggtgaagaccgtgtcaaaggcagctacaccagccgcccgggcagcatgcagaaccatgttgcgggcaaattcaagttcggcaccatctgggtagcggtgcgtcttcatgtcagtcgtgtagtcttcggcagacagcgcaattcccatcatccgatcagatgcagaagcgatttggtaggcgttgataacccccttggcgctttcaatggcagccatcagcatcgttgagccttcttcacggccaaattctttttcggcagccgtgatgtcagcatccagcttcttgaccatttcggcatcttcagcttttggcagccggacaacgtcgatcccagccttaaccatggcccgaacgtcattagcatagtatggcgtgtcttgaccattgacccggacaaccagttccgcgtcgccatagtcctgcgtttgcaaagcttcgtaaaccaggtcacgagcagcatctttttcagccattgaaacggcatcttccaagtcgaacatgatggagtcggcaccatagataccagcatccttaaccattgctgggttgttgccaggtacgaacatcatcgtccggcgcaagcgttctttaatttcagccatgcttacaatacctcccatgcaggttcatcagtcgtcttggcagcacgttgcgcagcggcaatcgtgcgggccttgattacacaatccaaggcgcccttgtcaacggccttaaccttagcgttttgaattcccattgccgtcagcgtttcagtgatgaccttcttgatctgggtgccaaactgcttggcaacgtctgattccaaatcaatcgcaatgccatccgtacccttggacagcatgatttgaatatcagatgattccaaggtaccagctactgcggtttccttaatttccattgatgttcattccttccttgatccgctcttgaagtatcgcaacatggtcttcaacgaacttctgcgtcgttgctgggacgagccccacgatggcatcgagattgtcatccttgatgcatttgcgtacctcagttgcggtaatataatttccattagttgccgtcttgcgatcaataatctttaacgcaactttaggcggcagttcctgctgcaaaacttgattatagattccagtcgtccgtgataacggttcgctgccaacataacgcgtctttatattgagtgccggtgcgatcgtatcgcgaaagacgcgggcatctaaagttgtctggtagcgaatcgtctggtcggctgattccaaaaagtaggctgggaaagtggcatagctgaccatataatcgccaccgtcaacgacaataacgttttttagatcagccgtccccgcttttaccagttcgaatcgttcactggtcttaaacagcgacagatccgtattgactacaaagacatagaccagatcgttttctttagctgcctgctcgaccaagtagcgatgaccattggtaaaggggttggcattcataacgatgcccgccacttttttagtcgcttgtccgtccacacgcggaacagcggctaaataatcatcaacgttcggatcgccggtttccaaaaaggcggcaacatccgaatgagccagttccttaaagccgaggtgctgaaagcttgcggaatatctggccttagtaaagacaaacaaatgaaagcgatgttcttgaaagagtcgattcgtcaaggcactgacaatagcattgaacctggctcccggcacggcttctttgttgcagacgccaatgtatttcaagacattgccggcagctgatcccgtaccaaccaactggccttgttcatcaagcagtcccagagtaaaatcgatcttgtcgacctcagcatccgaaaagttatgaattcccaacgattccaaaaactgctgccatttctgccgggtagctcgatcactcagatgcagatcaacaatgtgattttccataggacgactcctttttattttgattgactggcataatcaacaaccgcttttgctacggttgggacgacgcgctcatcaaagacgctgggaacgatattctcagcagtcggttccgcaaccacgctggccagtgcctgagcaaccgctttttgcagatccatgtcaacctttttcaagccgctggccaataagcctttgaacagtccgggaaaagccagaatgttattgacctgattagggtattggctagatccagtagcaattacggctgccccggcttccttagctttttcaggtgcaatttcctgatgtggatttgccagagcaaagatgattggctgctcattcatctgcttgacgtcatgacgattgatgacattgccggttgaaagtccgataaaggcatcctgtcccttgatggcatcatgaatattttgattttccatcctttgcggcgttcccagcttagcggcaaatacacgctgataatcattggcgcggtaatcctcactggtaatgacgccgtgaacgtcaaccagcgttaagtgcttgatgccggccgcatacagcaggcgcgccgttgccagtccagaggcaccaataccattgattacgacgcgcagatccgtcagctttttgccaacgaccttggcagcattgatcaaaccagctaaaaccacaatggcactgccttcttgatcgtcatgatagactggtatgtccagctcttcgctcagggcattttcaatttcaaaacagcgcggtgcggcaatatcttcaagatgaatgccagcaaacgatagcgagatgtttttgatcgtcttgatgatttcttttgggctgacttgatcaactgccagcggaatggcgttgatattggccagatccttgtacagcaaggctttcccttcaataaccggcaggccggcagccgggccgacgttacccagtcccagtacggcagtcccatcagtaatcaaggcaaccagtttgccgctgaccgtaaacttgtctttgagttccggcttttcggcaatcattcttgataagaccgctaccccgggcgtataagccttttgcaggtctgctcggtcctcaatgtcaaaatcagttttaatgtccagcatcccggtatgggcttgatgcagacgaagaatagcatcttcttctgaagtcatctaatcatcccttcaagttatcaaattctcaaactcatttaaatttcaaatctctcgttgataattttacactctctttttaactttttcaaatagttataatattttttcaaaattaaaaaagtttgatattattaaaagggacttatatcgatttttagaaagaaggctcatttgtatgaatgacatcactcaacaaggtcaactggctgatattgcccgcgactattatcttggccagctgaccatcacccagctgtcggaaaaataccaattaagccgttatctgattaccaaggctttaaatgaggcacgcgcggctggcatcgttagaatcaccatcaattcaccaatcgatcgcaacactgaattagagactcgttttgcggagctctttccgcataccaacacgatgatcatcaaagacgccgccacgaccaacgctgatatcgaaaatatcatcgactttgccgcggcggagattcagcgccatattaaaggcagcgaaatcgttggcgtcagctggggcggaacgctgatgaacatcatcaatcgtttccaaaccgacgtccgtgatgacctgatctttacccagtttatgggcgacaatctcaagtacagctcagcaatcggcgcaacgccattggttcagcgcgctgctgccaagtatggatccagttacctgaccattccagctccactttacattctcaacgacaccgtcagagaacagcttaaaaatgaaccagccatggctaacgtctttgaacagtgcggtaagatggacatgctttttaccggtattggcacgatcgactcagtcaacagcattcgggtctggcatcaaagtcttaacgaaattttcgaaaacgttgatcgtcaagaaatcgtcggtatgctttacggtcgcccctacaacattgatggtcagattctaacgccaaagagcgacaaactatttggtgcctccgtagccgcacttttagaggtaccttgccggattggcgtcgttaaaagcaagtttaaggcccgcgccatgctgggagccttacgcggcagtctcttaaccgacattattaccaatgaggccgtagccaaccgagtcctgctggaattggacaacaactgatctttatgcgtcgtctgctgtaggcgacgttttttttatgactgcacgctcatcgcaaaacgatctaaaatctggttgaaggcagctggctgttctgccattacggcatgaccggcattggcaacaacctgtgtctgcgctttttcatttaggatctgaatggcctgcagaaaatcaggattaaagtatggcgacttttcaccagcaaccgtcaaaaatggtaccggcatcaaagcaacgatatcgcgccagtcctggaaggcatggtcaatcgcaaaattaaaattggcactttcgtcatacggatgcagggtattggcctgacgaacggcattaaccgtagcctcgtcaatcttgacggcagtagcgcggccaagcggcattttcagtgctgccgggaattcatcccaggtcaggtccttaaagccataatgccacgtctcgtcattaatcatcttagggctttggtcaatatcaatcaggccatccaactgaccacggccaaacaatgagacatagccaaacatcgtcgaagcgcccattgaatgccccactgccaagcaatgctcaatcgacagactctgcagcaattcataaacatcgattgcatgccgcgagatgcgcgcacccttaaaagtatgttcagaggcgccttgattgcgtgcatcaaaagtaaccacccgatagccgttttgcagcaaaaattccttggtcggccgccagatttccttgcacattcccaatccactgaccaatataaccggatagccagttccttcatcctcataatccagacgtacgtgatctgatgtaataaatttcataatctttcctttcgatgcaaaaaaagcgaccccaaccggatcgcttttttgcatgtctaccacatgccgataactttcatccaaagaggtgctaccgtcaagaagactaccagataaagcagacccaagacaaagctcatgcgccaccattcaccctgcttaacataaccggagcttgccaaaatggaagcaggaccgttggcatagtgagtggtcgaagccatgattgaagaacagaatgccagcatcattgccgccagcataactggtgcccccgccgaaacggcaactccgacaaacggagcgtacaaagccgtaacgtgtgctgtggcactggcaaaaagatagtgagcgtagaaatagatgatcatcagaattgccagaactgcaacccagttcataccgtgcagaccgccagcaattgacttagacagccacttgatcagacccatttcagaaagctcgcctgccatgaagaccagaattgaaagccaaatcaaaacgttccaggcacctgtttcactcagcagatccttagtagtcaaaaccccaaagatcagcagcagtgagattgccaagaaagcaacgaatgaagcttcaatgcccaaggtgttggacatcatccacaaaacgatcgttaagatgaagacgcctgccatgatcttttcagaaactttcattggtcccatttcgcgcaggctcttgtcagcccattcacgagcatttggcgtttctttgatctcaggcggatacatcttgtagatcacgaatggcaccaggataaacagcagcaaacaaggtacgacactagccgtaaaccagcccagccaggtaatgtgaatcttcatcgtcttagccaaggcaacgataaccaggttaggtgccagggccgtcataaacatagccgaagtgatgatgttgctgttaaattcagagaacgtcaggaacgccccgatttttttgcgtgaatcgtcatttggttcggaaccaaacgtcttggccaaggattcaaccagtgggtaaacgatcccaccggcacgggccgtgttggaaggcgtagctggcgccgtgatcagatcgattcccccaacggcataggccaggccaagcgtctttttaccaaaggctttgatcagatacagggcaatccggtgacccagaccagtcttaatgatcccccgtgccaacataaaggccatggcaatcagccaggaagaagaattgctgaaggccgtcagtgcatcgtccattggtaccagcttggtcagtaccatgacagtaaagccgatcagagttacggcagcaattggcagcggctgcgtaatgcaggcagcaattgtcgcaataaagatcgccatcatatgccaggcagcgactgaaacgccagctggtcgaaccggagccgtgaaccagatcagcagcccgataattaatggggcaataaagcccttatacttaacttttgctaaacccattgtgatatttcctccaaaaaagttgtctcaaaatcttaatctaaagctcaacgccatccaagacttctttcatcttggcggcagaatactgcattgccgctacctcgcgttttgaaagcggcgtttcaataacataacgaattccagtccggttaacggaagccggtgtccctaagtacagatcattgatgccatactgaccattcaaaggcgccgataatggcaaaacgattgaacggttgaagatgatggcctcgcaaatcaaagacaggcagcgggcaacgccataataggtcgcacctttggaacgaataatcgcgccaccttttttcttgaccccggactgcatttctgcaagctcttcatcgctgacatcagcaaactcttttaaaggcttgccggcaatcgttgcttcatcaaagttggcaaacgacgtatcaccatgctcgcctaaaacgtcaacgctgatttcgcgtacaggcacatggcagcgtttggcaagtgcaactcgcagtctggccgtatcaagcgaggtccccgtaccgataacccggttctttggaaaaccagagatccgctgcgtcagcgtcgtcaaaatatcaactgggttggaagcaacgacaaagattcctttaaagccgctgttaacgattgggtcgatgatcgtctttaaaatgccaacgtttttgttgaccagatctaaacgactctcgccgggcttgcgcggaatacccgccgtgatgactacaacgtcggtatcggctgcatcttcatacttgccagcacgaaccaccgtcgtcccatcgaacatggccaggtcttccagatccattgcatcgccggccgctttttgcgtcttacgatcaacaatgatcaattcatctaaactaacgtgttgcagtaaatcgttggcaaaagcagaaccaactgcaccatcgccaaccagcataacttttgacatatctgattttcctctctactcgactgaaaaagcacttacagcactattttcaaaattttccaacaaattttagtattgtacacgcttcttgtgataatttcaacaaaataatggctaagaatacgacagagcagcgtcctaccaaccctgtcgcatattaatttattcagacccgcgtacgctactcaaagcagaaaattaatgttcgcgagcataaaccgttacttgttgaccagcctgacgaccaaagatgatcgtttcagcaattgagttgccaccgacccggttgttgccgtgcaggccgccagaaacctcaccagctgcatacaagccaggaataacgtcaccattgccatcaagtacctgcgtcttggtattgatgtgaattccacccatcgtgtagtgaatggcaggtgcgatatgaatggcaaagtagcctggcttggacagatcgcgatccatccccgtcgtccggccaaactccttgtcgtcgccagctttgacagcttggttccaagtttcaaccgtgttcttcaagacagctggatccatcttcaggttcttagccagatcctcaatcgtgtcgccatgaacgaccagaccaaccttgtcgtagaactcaatggccttggcatgatcacgcacgccttggtcaaagatcagataggcactgtgttctggcagagcggtaatcgtttctgagacgatcttacgcgtattcagctcgttgacgaaacgcttgccttggaagttaaccaggattgccccttcaccacgaacggcttcaccaatcaggtagacatgtggattgtcttgctgaacggttgggtgaacctgaacgaaattcatctgcgtcagctgagcgccaacctcttcagccagcttcaagccatcaccggttgcacctggctgattagtcgtcttgtagtcggccagatctggacggtagcgcttgatgtattccttggaggccccaaagccaccagttgccaataagacggccttggcattgatctgcttggtttgaccatcaacactggcaactacgccggcaactgcgccttgatcgtttttgaccagtttttcgaccttgaccttgttgaagaccggaatcttttcttgagccgctacatccagcaggctcttaaccaggaatccaccaattggcgccatggaagctgggcggtgcgtccgttttttagacatcccgccagtaatcgtaacgtcttccagcttgatgccatgatcagccagccagtcgattgccagtggcgagtgaacgacgaagaatcccagcatatccttatcattgagcttgccaccatctttgtaggtttcccggtagaagtcattgatgttgtcaataatgccatgcttgagctgaacgttggtctcggcggcgttcatcccagaagatgctcggttggtattaccgccaagctgttcttctttttccagtacggctacgttcattcccagttcatgggcttgaattgcagctgccagaccagtaccgccagaaccaacgattaccgcatcatagctgtctgccagttgactgactggcgtggtttgaaattgtgccattttgcagctcctttgtttagtcttcgtagtcatgacgatcagcgttagtcatcttcagcggatccatccattcgtcatattgttcttcagtaaccttgccagacttcaaggcagcttccttcagcgtgctgccggccttgtcagcggcttgagcaatcttggcactgtcatggtagccaatgtgtggagaaagtgccgtcaccgtcatcagcgagttgtccagcagttccttcatccgcttttcgttaaccgttaagccatgaatcatcttgtcggcaaagcccatcgtcgtacccgtcagcaggtcggcagattccaagaatgcatcgatcataaccggcttgaagacgttcatttcaaagttgccttgtgaggaggcagttgaaacgaccacatcattgccaaagacccgcagagcagccatcgtaacggcttcagcttgagttgggttaaccttgccgggcatgattgaagagcctggttcgttggcaggaatgtgcagttcgccatagccagcccgtggaccagaagccaggaaccggatgtcttgggcaatcttgaacatgtcagctgccagcgtcttcaaggccccgtgaaccacgttaagaccagagtggtgcgacaggccgtagaacttgttgctcttggcagtcagcttcagaccatatgcctggctgagcttttcagcgatcttttcaggcatgccttcagcggcgttcagaccagtaccaacagccgtaccaccaattgccagttcttccagcgttggttcgagctgttcaatgtacttcaggtcatgttcaagcgcagccacatagccagagacttcttggccaaaagtcaatggaacggcatcctgcaggtgagtccggccaaccttaaccgtttcccagtacttgtcctgcttgatcttcagttcgtcaatcaggtgctgtacggctggcttcagcttatccaaggcttccaaggctacgacgttcattgccgttgggaacgtgtcgtttgagctttgacccttgttgacgtcatcgttaggcaggatctctacgtcagggttgatctgcatagccttgtgagcaacgacttcattagtgttcatgttggtctgcgtaccagaaccggtttggtagaccttcaatgggaagtccttgcgcagatcttcatcgcttaaggcaagcagttcgtcaacggctttaacgatcaggctgcccttttcttctgaaatagcattggtttccatgttggcttgagcagctgcctttttaatgttcagcagtgcacgaatgatggcgattggcatgtattggccagttgggaagttgtgacggctccgttcagtttgagggccccacaaagcatcagcagggatttgaactggacctagagtatcttcttcagtacgaaattctggcatattaaaacctccaattgaattcaacatgcgatataaacaaagtgatgtaagcgttgttgcttttttacgatgtcaactttactctgcataattagatatagtcaaaacaaatagagcttataagaattccttataatcccccattaaaatgcctttcctaagctgttttaatctttttgaaacttttgcacaatctttaattaatttcaaaaaaactaaaaatttttcgcttgattgatcaattaggcattttttatttaaaagtcaatcagcagcaataaaaaatactgctaatcagctcaagcaagccattagcagtattgcactcatattattcttctgtaatctcaaccgtcgtcattacaacgtcttctttgggcttgtcagcagcatcacgagcaacccggctgatctcatcaaccacgtccatgccgctgattacctggccaaagacggtatggtgcccatcaagccatggcgtgccaccattcttttcgtaattggctacgacttcggccggccagcccagctgcttcatttgaccaatcatattgccaggtacctgtgtagcactgacgataaagaattggctgccgttggtattaggaccagcattggccattgacagcgcgccattgaagttaaaaagctcccggctgaattcatcttcaaacggtgcgccgaagctgctttgaccgccagctccagtcccggttggatcaccgccttgaatcataaattcgggaatcacccggtggaacgttaccccatcatagtagccctgcttggccagcgtaatgaagttctcaaccgtcttgggtgcctgatctgggaacagctgaatggttacgtcaccatggttggtcttgatggttgctttaggtcccttggcatctgccaggttcaattgtggataggtcatgttttcctcctgctaatatagaaaatcaatttatacctaattctatcattattttggattaacacgatctgatattgatcaacgtttttatcacgatgaaaaattttgagacaactgctgaccggcttggcagctattgatataccgtacgcttcgcagaaatcggaaacgaaaaaacagctccggcagccaggctccataacctcaacgataatttcaacagcagctggattcccaaaaccattttgcaaactagaagttcaagtccattgacgcagcagtagtcaaccaacatcagccaaacataattaaaaccgccgatattttatcgttaggatcaaaatgacagcttactggcttatcgtgactgtcagacgaccaacttcgtgaaagaattggatctttgaactgctgatcatactgagcttacctactttaccttgttttttcacccatagtaggcagctgtatattcgaccaatccaactttacctacttttgacagtttttcttcaaatcgtaggtaataatgtatattctagggttgattgggtcagaccacctttgtgaattacctacgattaggggatttttagttaatagtaggtaatgttaagctcccctaacttgatatacattaatttttacctactatgcatcgctttttcaccaatagtaggtaatcgtctttgatcatctaaaaccatgcaggaatttttgtataatgccaccactatcgtttgatgacgacttttacaactgacggacgagcgcttcttgatgaagatcagatgcttgactgactacgcgactccgaattatctgccttgcttagattcttagccgtgatcaggattatgccaccagacattctggaccgccgcgatgctgatcccaattgccaaagctgccaagcaaatcaaaaaccgcccgattcccagtcatcgagcggttttagcattaatgcaaagatgttttatttggcaacttcaatcagcttttcaccgtgcttgatctcgccttctgcaacgtgttcaaccttggcgtagctggccgtattggttacaacgaccattaccgtagtatcgtagccagccgcttcaacagccttgaggtcaaccgtccccagcttgtcaccgcgcttaacggtttggccttgctcaactgcactggtgaagtgttcgcctttcagattaaccgtgtccagaccaacgtggatcaaaatttcggccccatcatcagacgtaatgccatatgcatgcttagtagcataagcaacggtaatcttaccatcaaccggtgagtagatggtgccatcgcttggtacgacagccgcgccatcacccatcatcttttgggagaagacttcatctttaaccttggacagatcttctaccttgccatcaactgggctcagcacttcttcactcttaacggcaccagcaggctcagcagccgttgcctcagcctgaacctcaactgccttggcctcagcatcagcctcagcttcggtaactggatcgatcaggttgcggtgggccttgccatagaagaacgtgacacagaatgcaatggcaaaactgatcagctcacaaaggacgtaaagcggaatcgacttggcattgatcgaaaggaagccaatgaaaccagccgagccaagcgatacggcaatcacgtggaacataccggccaatgcactggcaacacatgagccaatcaaagcacaaaagaatgggaacttcaatttcaggttaaccccgaagattgccggttcagtaatccccaacagagctgaaacagcggctgagctggaaagacccttcatcttcttgttcttggtcaggaagtagaccgccgtcgtcgcagccccttgcgcaacgttagccatggaagcaacgacaaagatgaagtcgccatagccagttcccgacttaaaggccgagatcaattgcgtttcgatggctgggaagctttggtgcagacccgtcaaaacgattggtgagtagaaggcaccaaagataccagttccgacccagccaagcgtgttgtagatccaaacaattgcagctgtgatccagtcggaaagatcccgcataaccggacccacaatggtaaacgtcagaaaaccagtcaacagaatcgacagcagcggcgtaaacgtgaagtcaaccgcgcttggcagcttcttgtggaaccatttttcaaagatcgacagcagccaaaccgcagccagtgccggaataacctgacccgtgtaaggctgcattgaaacgtgcagaccaaagacgttccagaagtgacccgcctgcagcagcggtgaggtcatcatcataccgacaaccgcgcccaaaaatgggttggcaccaaaccgcttggcaccagagatcccaatcagaattggcaggaacgtaaacggcgctgccgacattacgttgaccattgattcgattcccttgagcgaagggtacatctgaatgactgactttggcccaaacagaccaggtgaagccagcacgttgtccaaagccatcaaaagaccgccggcaaccaaggctggaatcaacggtacgaagatgtcagacagcagcttgatgaatgccatcaccggattcgtcttttggttcttagccgcaacctgtttcaggtcatcggttgacatttcctttaaaccggtaatcttaaccatttcatcatagacattgttgacgtcaccagggccaatgatgatctggtattgaccgttcgtttcaaacgtccctttgatgtcggcatcgctatccaacattttttgattgatcttggaatcatccttgaccaccaaacgaagccgcgtggcacagtgcgcagcagccacgatgttatctttgcccaccgctttgacaacggtttgggcgactcgtttatgatccataattgctctccccagataaataattgcattgctaaccaaataaaataaatgttaaaaacatctgtaagcgcttttactgttatttatcatacctgcttttcgcaaaatgtcaatcgtttaacaattatttttaccaacaaaatgacaatgggttgacatataatcccgttttaaaggcattttgcccacctggtggaatttaaaaaaattttaatttatttgcgtgtcccgattcttaagacgcaggcaccgtcaatatcgccctgcttaacccgccgcaatgcctcatcagctttggccagcggatattcggcaactttgggatgaatatccagacgatcagccagcgtcaaaaactcttcaccgtcacgccgcgtattgctctcaacactggtcagtactttttcatgaaagagatgatcctggtaggccatttgcggcacgtcgctcatatgaatacctgccaaagccagcgttcccccaggtaccagattctccagcgccttgggaatcatctggccggctggtgcaaacatgattgccgaatcaagcagtaccggcgtttgatcatacgcaccctgcgcggaggcacatcccagctgccgagcaaactgctgcgcgtctttccctcttgtaaagacgtgaacctcaattccctgcttaatcgcaatctgcgccgtgatgtgcgctgaaccaccgaatccgtacagacccaagcgaccgcctgccggaacgttggcacgcagataggctcgatagccgatgattccggcacagagcagcggggtagccgtcagatcatcaaaacgctcgggaattcgataggcaaatccttctggtaccgtaacgtactctgcatagccgccatcgtgatcccagccggtataaactgaatgagggcaaagattttcacgccccgaacgacaaaagcggcaaaccccacatgcatgtcgaaaccaagggatcccgatgcgttcaccaagcttaaagcgctgtgtatcttcgccaaatgccacaacctgccccacgatttcatgaccaggcgtgacgttgggctgatgaaccggcagatcgccttcgctgacgtgcagatcagtatgacagacgccacaggccagcaccttaaccagaacctcgcctcgttttggctttggcactggctttaagacaaactgaagcggtgattgttcgccatcgattggtcccggcttgacaaccgcccaggcatgcatcatttcaggaattgattcttttttctccatattgccacctcgcttgctaaaaacctatacttagactacaagtaaataataacgctaattcaaactgacattacaggaggttttatcatgattgacgtaagacagaccaatgaactgacgccgcgagaactggttacgatctttaaggaacggacccgcgtttttgtcgttgaacagacctgctattatcaagaagtcgatgacgaagactaccaatgttttcacgtgcggattctaaacgatcagaccaatgagctgatggcctacgcgcgcattatgcctaaaaaagactacgtgacgttcggccgcgtgctggtcgttgaaagattccgcaggcagggactgggcaatcagctgctcaaggccgtcttggattatatctcaacgcattttcctggtctggacgttgagattgaagcgcaggcctatctaaccaagttttatggcagctttggctttaaacagacatccgagatctacctattggataatattcctcattgtcagatgaaactggtcgcaagcgttgattgataaacgtttgacatcaagccgtcaactccttaaaattaaaatgtaaaacagcgctttcaaattgacaggggggttgaaattatggaatggactcgcgagcaacgctacttaccttatgaaaagcacagcgccttggaactgctgaaactgcaggcacaggccgccaattcgtcttatcagatgcattatcacgtgcggccgaactctggtttgctgaacgatccaaacggcttttcttattacaataatgaatggcacgttttttaccagtcgttcccatttggtgccgctcatggtctaaagtcatggatgcacatgacgtcaccggacctggtacattggcagaatcatggcctggccctggcaccggacactgaatatgacagtcatggcgcttattcaggatcagcccgtgtaattgatgatcggctgttcttaatgtataccggcaatcatcgtgatgctgactggcaaagaacgccttatcagctgggagcctggctggacaaacaaaaccaggtaaccaagctggaccagccactgtttgtcaatcccgatcacatcagcgagcattttagagacccacagttgttgaaacacaacggcagatactacgccatcattggtgcgcaggaagccgccactcaagaaggccacattgatctatgggtcagcgatgagcttactactggctggcaagaagtcggctatgttgattgtatggacgattcaatgggctatatgtgcgaatgtcccaatctgatcgaagttgacggccatcccgttttgattttttgtccgcagggcttggataaaaaggtcgccgactatgaaaacatctacccaaacatgtatctgaccggtgatgatttcgactatgaaaaggctaaactgatcaacagctcacagattcccgtcaacctggatgatggttttgacgtctatgccacgcaggccttcaacgcgccagatggcaaggcttatgccatcagttgggtaggcttgccagatctttcctatcctaccgacacggaaaactgggccaattgtctgagccaggttaaagaactgcactatcaaaacggccgcctgcttcaaaaacccgttgcggcaatgaaagaactgcgcggccaggctgaatcgtttaatggcaacgtcagccacatcaagaccggccgccagtttgagatgatcgttgacatcgccgccgaccaagctggcacgctctttttagcagcttcccaggatctttctgccggtttacaggtgcgttttgacacgcggactggtaaactaagcgtagatcgcagtcatgccggccaacctgtcgctcccgactttggcacggtaagaagcgtaaagctgccagccgatcagcctttaaagcttgacgtttttatcgatcattcgctagccgagattttcgtcaatgatggcgaacacgtcttgactctgcgtttcttcaatgatccttgtcaggtctgggcaggctttgatgagcggatcaatgctcatggaacggtatggcagctgaaaaacatgtgaaggaagttttgtcagtgatgctcaatcagcctctggatgtttttgacttaaaaaagatccaggtcaacgccacgaaagccgaactggaaaccgatggcaagctgcagcgccgccacgtcccagtcgaaaagctcggtgaatacgttcccgttcagcgcgatccaatcaatttgatcaagctgaccgaagccaagatgatccctgaactgctgccattgcgtcatcaacgcatggccgccagccgcttcgccttttttcgcggcaccgcggaattaatggaacaagaccttaagcagcagtatcaaagcggcatctcaatcattatcaatggcgatgcccatttaggaaactatggcttctatgcctcgccagaacgcaaattgctgtttgatctcaatgattttgatgaatctcggatcggcaattgggaaagcgacttaaagcgccttttggtcagcacctacctggttggcctgcagaataattttgagccagatcggctgcaagcgctcttaagcagcatgtgcaaggtttatcgacgcggcgtcaagcatgccgagacgctcactctgctgcagcgcttttatttttcatacgagattcatgatatgattcaaacgctgaactcgctagaggataacgatcgtgccgaaatgagccgcatcgtcgatcgaattctcaaaaagagccataagaacaactcagaaacggtcatcaaaaaattcacgacgctcaattcgcgtggtcatctgatcttccgtgagaatccgccccgcgcccgccacgtcagcgaccacactttcagacagattcaagctgcctataacagctatcgcaactacgtcagagaagacatccgcgttttgctggccagctaccatctttcggacgtgattcgctacagcgtcggcgttggcagctttggtacgcgctgctttttattgctgctgaccgggattgatggcagtcacctggtcctgcagatgaaagaagccttgccgctgcgctataatctgctggccatgccggttgctgaatccatcaaaagcagtctgaatgctggacggcggatcgttacggcacaaaaggttctgcagtcggcttctgatccttttctcggcagtacgcattttgatggtcgcggctactacctgcgccaattccgggacatgaaggaatcaattgacgcgacccgcttggattttgaaagtctgagcgtttatgccgagatctgcagttttttattagccatggcgcatttccaaagtcctaccgctcctcgcattgccggctatctgcgcaagcaaaaacagctggatgaaggcttggccaactgggcggttcaatattccaaacaggtcgatcaagactatcagcgctttttagcttacctgaatcaatagcaattataaaaacacctcgtctggcaactgccaagcggggtgtttttagtttcatgaatcgttagaccgctggactggtcggtttcttcatccggcgtcgaaccaagaaatacatagcgatcagaatcagcagcgcgaccaatgccccgctgcagcgcttgaaatcagcattaaacagtgcatcaccgccaaatgcatacaaaaaagaggttggcagcattccaccggcaatcatcagcagaaaatgcccgcgatcaagtttcattctaaccccggcataatcaaccaaaacgctgggaattacgggaatcatgtagccaatcgtcaaaccaatcaaaggatgctgctgatcggtcagtgccgtcagcaggcgactggtcttgatttttttcgaaacgtcgacgtgcttgatcagcccaacgaccagacagctgcccaagacgttgccgacccagttcattgcaaaaccgatccatggtccatagcatagaccagccaggatgcagagcagcgaattggacattcctggaatcgcattcaaaaggccaatcacaatggttaacagcacgatatcagctgccccatgcgaacgaatcagcttcatcaattgatgccgatgcgccacggttgggtcaaccaccagcatcagttcgcgccgaaaatcccagaccaataaaatcagcccaatcagcgctaaaatacccccaaccgtcaaaacaattctgcgttttttcattgcaatctcccctagactaagacgacccctgtccaactgatcagccaggcaggggtcgcgcaataggtgtgtatatagtatacgggtttattgtatgaaactttaccgccaagtgcaactaaattcatcaattcattgatagtcagcatgacaccagcgctgtttttcaatcctccaacaaagctttctaatcaagatcacttgtctggccaataacccatcaatttcacgcctaagcatttcctttcaccagccgctctacaagactcagtcccaccaggtattgatattctggagatccagctgcagccgatcccactgccggtttaagagatgatgagcagctgtttttaactgagctgccgtgacatggcgatcgctcgtcaaaccgcgcttggcaaattgatgcgcgctggcttttagatagaccgcgtatggttcgatcagggctggcgaaatctgcagctttttaactaacactccggccatcattgcagatgcctgctgataacgctgcttttccaaatagccatccagcttgtcggccatttcttcaatccactggttcagcggatcgtctggcgtcagatcttctagaaaacttaaattaaacgaccagtcccaccaaggatgctcacctacaaaccagcggcgcgccgtttgatcttgaatcaacggtgccaggctctggtacagtcgcttggtctgcaaatggctgaactcatttgccggccggtgctgccagtctgcaattactggtaccgcatgctttttttcaatcagctcccattgacactgaccatcgttaagctgtttgagactaagatagctgtcaagcggtacggttattttctgccattgatcaaatgaatttaccaagcccatatttttcctcactgattaatctttttcgttttccaagcggtgcagcgcatcatccatggcagccttttgctcagcagtaacttcggggaaggaaagatccagcttgcccagccgtttggtcaaaatatcagagacgaccagccgcgagtaccacttgctgtcgctaggaattacgtaccaaggattattttgggtagcagtttcgttgatggctttttcataggccagctggtattcatcccagtattggcgctccttgatgtctgaagcggagaatttccagttcttttccggcatggtgatgcgccgttcaaaccgcttcttctgctcgccttttgaaacgtgcaagaagaacttcaaaacgacataaccgttgcgcgtcaagtatttctcaaactggcgaatgtcttcgtagcggccatcccaaaaggcatcgttgacatcagcaatcgataggacgtttggcaggttggcattaagaatcagttcaggatgcacccgcgaaaccaaaacgtcttcatagtaggaacgattcaaaacaccgattgccccgcgttcaggaagtttctggtggatccgccacaaatagtcgtgactcagatcagtcttgctgggctgcttgaagttattgaccgtaaacccaaccggatcaattccagaaaagatgtgggcaatcatactatccttgccggcagcatccagtgcctgaaagaccaagacgacgccatagcgcgatcttgaatacatcttcttttgaaatttcttcagtttttttagattggcttcgatctgacccttgacgttttcaaccatcgtcatgtcttcatcgttatagccatcgattttggttggggccgcttcaatatcaaagtccttgccaacaaatttatactgtttggtatccattgcaaaaactcccttcaaaacatcattaaaaactattataccgcattggacggcaactattccgccaatcaatcgagtcagcaggcattcttaactaattgtgcaaaagacggtcctaaaacataccattgcagcagtgcttaggtttgagaatgaataaaaacctggcttataattaagtcagcatcattagaggaggagtttttaaatgaccgcgcaagcaaccctcgattggcagcatgagattcaccatgccattattgccgcattgcccaaccgcgactatgaactgattgcctttaatcaggccaagtcgaccgaaagcatctacgccaacgttttgcatggtcagcgactgttttatctgcgtttttcctggcatgagaatgaacgctcgcgccgctttgccgatgcttcttttgatctgcgccgctatggcagtcatcgtgagctggttgcaagtcttagaaaaaatttccagcagccgcaatttggcagcatcaagcttggctattggcattttgtctggctggccatgttggaaaagctgggccagactggcaatgagccactgcattttaataacaatggcgttttgatcaatcatcagctgctcagcaatccggcggctctgcatcgcttgcgggcattgatcaactttggcctggcaatcgcggttcatgaagacgcctaccttgctatcagcaaagacggccttaacctgctcaatcattactgggatgttgccgactttgctgacagccgccagtgggacgataatccgcggatcatgacgattgatgaactgacttggcagctcaacaacatcaagccccctgtccgccatgccaaacgccattaaatacttttaaacgcgcgactcaagccccgctgaagcctgagtcgcgcgttttctattttatttatgaattctcttgatggaactgatgagccgctccttcattttgccaggccagataaagtgcttgatcaacaggatgttttaacaacagctccacgccaaaaatcggcttattggttcccttttgcaaaaactcatgagcagatcccggcataacctggcaaagaccaaggtagacaaactgcgactggtcctgctcatctgaatttttaacgaatagatgcaggctggcgtttggattcagcagcttttcggcatcgcggctgttcagcgtgcggttggtcttggaataaaaggaaagctgcgtccggctgcgaaactgattgtcaaagtcaatcgcggcccgcgtatttgagtggtggtaggtcacaaataaaatccccgtctcacccatgaaataatagccgccaattccattaggcaccatgtattgcgcgttgttcaagagcttgacggcatccatgcgggtatagcgctggttgagcgtcagcggctgtttctgatcatactttttagcctgcagtctgccggtttcaatggcatcattccaaaacagcctgaattcagcgtctctcagatagttttgaatctgggggtgcagctgaatctgctgaccagtcgtgataatcaagggctgattgccatagcggatccgactgccaatcttgcctttagtcagataatattccagcgtcaagactcgtttaaccgatgccaaggtcgcgtcgtcaacccaacagccattctgatgcagttgcgcttgataatcagcgactgtaatcgttgactgcttggtcagcattgccaataaaatcagttcatgctggcgcttgccattggccaattcctcagtcagaaactgtaaaaccggttccgtttgaggattgagattgaccgttgctcccattttttgcaggaagtgcggataggtcttaaacttttcggcaaagatgctttcatcaaggattcctgctctttgaaaatcagccatcaatggtgttcttcccagacgctgcttaagctggctaaactcgcttttgagcagactcatcccggtcagctgagccttttcaactgacgccaggatccgctcataggccagccgcgtaaatgagatcgttgaaactcccagggttggctcagcatgcagcgtctgaagcgcccgactgcgctggtgggaatgatcatcagtcagtgcctggggaatcaaatagttgtgctgatagttaccgataaaatcaatcactgtcaaaaaatgcttgcctggcgctttacgcaggccgcgtcccagctgctgcagaaaaacgattgccgattgcgtatcgcgcagcatgatcacttgattgacgcagggaatatcgatcccttcgttaaaaacatcaaccgtgatcagataaaccagctcaccggcttgcagtctggcaactgcctgctctcttttggctgccgaatcctgtcccgttagcgcctgcgtcggataccccttctgcgtcaaaagggcggccagttcttgagcttctttggttcgcgagcaaaaaatcaagccatgcaagacatccccgtcatgtccataacagtcagccactttgattatccagtccacccgttcaggctgaatcaaatgtttgagcggcgttttttcgctaacggtctgcccctgccagacatagtcactgacgccgacaaactgaaatgggcacagcatccgctcgcttaacgcctcttgaagtcgaatctcataggccagctggtagttgaacaaggcatagacgttgaaatcatcggttcgatccggagtagccgtcagtcccaataaaaagcgcggctgcagccagttgatgattttttgatagctggccgcaccggcatgatggacctcatcaataatcacatagtcaaaatcagccggcccaatctgatccaagtgccttgccagcgtctggaccgtggcaaacacgtatcgcgcggttccaggcgtctgctgactggtaaaaaagccatagtcttgatcttgacccccaataatcttttgaaaactggcccgcgcctttaaaagcagctgctcacgatgggcaaccaccaggacgcggctaggttgggcgctttgaacggcaaacgcggccaaatacgttttccctgtccccgttgctgaaattaccaaggcccgcttttcaccagcctggcgcagcgcctcaattcgtttgcaggcagctttttgcatggcattgggcgtaatcaaatcagactgactcgtttgcgatgctgagcttaagactggtgcctgccagcctttttgatatgccgtcagccatgccgcatttaactgaaccgctgcctgccattgattgccaaactcagctgcaaactgctgaataacggctccttgatgcttagagctgactttaagacaccattcggcattttttaaaagcgcgtccatcgttaggttggcactgccgatgatcaacgtctcatagtcttgatggtcaaaccagtagcctttttggtgaaagccgacctctccagtcaagcgcaccttcaaattaggaatcttcatcaattcggcaaagacctggggagaattgaactgcagataggttcccgtcaaaagctcaccgccaactcctttttgcgccaggtccatcatgatcgacttgattggcactaaaacggccggcgtaatgaaggcaactgccatcttaaaattcgtgcaggtgcgcagttcatttttgatttcgttaaagatcgtattgccttgtcgattggttaagatttctggtcccagtgcgccagccggcagactgccatcgataaagccattttgtaagtcagctcgcaactgatcatctatccacgtcataaacctctccttaagctaacaatgttgatcacgatatctactttaggttaattcaaaatctgtgacaaagcttttgcctgcaaacatggcataactgcttcaaaattcatgaattcttcaatttgaggtgttaaactattttagtctttacaaaagtttttatattctaaataaaaaaatcatggaaggaaattgtaatgaaccagcgaccagcacgaaaaactcagtttaaacccaatcgaaggcgccgtctgtttaaatggctgacgatcatcctgatatttgtcgccttaggatgtacggccggtttgctgattcctggtctaaatagttcccgtaacgccagcgttaaactgtcatcgcccttaaaaatcgtccaaaaggtagtctccaacagctcctcatcaactgccgacagtaccaatactcagctgcaggacgcctggaaatcaactctgcagcaggctgatgggcacgtggccattgccgtctactcgaatcaaaccaaaaagacctacacggcatccaacgctgcaaatcattcatatcgcatggccagcacagtcaaggtctcaattttggtcggtctcttgatgaaacagggcacattaaacagcagcgagcaggccaatgcccaggccatgattgaaaacagcagcaataccgccgcttctgctctgtttgttgagctgggcgaaaaaagcggtctgcaggagacttttgacaaactgggaatgactgactccaaagcccatgaagaatggggactttcaactactacccccagcgatcagcttaaactgctcaacgccattttctactcatccaacctcttaagcaccagtcagcagtcgtatgtacgcaatctgatgcaaaacgttgaaagcgatcagcaatggggcatttcagccggcagcaccaacttctaccttaaaaacggctggctggacgaagacgatggctggatcattaatagtatcggctacatacccggtaacaatggcgccagcgacagctatacgatcgccgtctacactgatgacaactcttcaatgcaaaatggtgaaaatacgattgaaaagctggcaaaatcaaccagcaagatcttaaacaaataggtccagcagtttaagatcggcactgctttaccgattcagcataaaagcgctgatttagactttgaacagtctgaatcagcgcttttgcttttactttagctttagggcaacctgtggcatgtcgttaggcgttagcttgctgcctttcagtgttccccttatcttgatcgtctttttttcaagcttggtatctttaggcagccacagcgtcgttgttttagctgctcgtgccttcttttgaccgactttgatcagcgtaccttttttgatcgtctgtggtgcaaagcgacccaatacgcgattatagaggttattggtctgttggaactgattgttgaagtcgccaggaacgtttaagactaccgtaaccaggcggcgattgttaaacgttccggtgctgacaaagcagttgccggctgaatcagtcgtcccggtctttaggccatcgatctcaccatctgctcgatccagagccgctcccttgatcatcagattgatgttttgcatgtggtaggtctgtgaatcactgactgggaagtcttcttgagccgtcttggtaatattgacgacatcaggataatggtttaaaagccagctggcaatcttagccagatcaacggcagaaatctgattttcggcgtttttggagacgttctttaagcgcaaagtccccagatccccgtttgagagtccgatcatgttatagatcttggcatcggtcacgccagcttctttagccacctgctgcatcttggcattgaacttggccacgctgccggcatcagctaaggctagcgcttcggcactaccatcagctgaaaccagcatcattgaatcaaccaatgacttaatcgtatagctctcgccttcattcagcggcacgttggaaaagcgccaatcgttggccattaccgccactggatgcgagatcgttactttttgatcccagcttagcttatgagcctgaatatctttttcaatgacggccagcgtgagaatcttaatggtggaagcaaccggataccgtttttgcgcgttcttttggtacagaatctgcccagtcttagcatccatggcaatcgcagccttggcagcaacatcctggctcgtgcctacgttttgtcccgattggtggccattgctgtctgatgagctgtcctgtgcgacaaccgttgattcttcagttgcctcgctatcagccaaaacaatcgaggagagacccagcaggctgagattaaggctgagcagcaccagaaccagactctgcaggcgtttcttccagctatgtctattcatctttagtatcaatccttattaataattctttctttacactgtcttttctatcttaacgcaaaattctttctgattatcagcaaaaaccaaaaatcccttatcgatttttagctgctggtttgactcattggtttgattgccagttaattattggcaaagtcagcgtttcgatactgctgaatccaaagcttgcttcaagcgctgattatttgcataacggcccaaacatcgatattctaaggtcatcggttaagcttagattttaatgacgccagcgaatcgaataaatcttgctcaaatatcttaaaacaattattttctagcaaacaaaagcaggtgatttaatgcagctaaaaatttcaaagaccgctcaacaatggctgatcaaacagctggatctgcatcctggcagcggcgtgcgcttctttactccaactggtggccgcaatggacacgtcaattatggccccaagcagtcctatcaaagagaagatcagcccaagcagccggttttgcaggttattatcgatgagatcaactatcatatcgatgatcaagacagctggttcttttcaggcaagaccacgctgatcgactatgatccgcaaaatggcctgacgtttcatttctttaatggcaatggcgagccggtcgatgccaacaccgcagcttctaaaggcaatacccgctttgaggggctgtgggactgatttcgccatagttatgacgctgctgcaatctggatcaggttaggtccgtcattaacagcttaaatagcggctcttacgcagaaatttttgtataaaacatatgacgaaaccatcattacctacttttcgaaaaaatcaatgtataagtaggaaaaaactaatgtatatcgagttagggatccctaacattacctactatgttgataaaaacacgtaatcggaggtaattcacaaagtcggtctaaccctatcagccttagaatatacagatttacctacgattcacagaaaaaatggcaaaagtagataaagcaaaataaatcggctatgcatgtacctacttttggtaaaaaatctgtcgatagtaggtaatttcaagccgcccaagccctcaagccatactttcttcacaaggcatgcagtcaagcaatcataaaagtcgggttcctgcatactttcaggattatcagccagccgccaaaagctgccatttttaagccaatccagtcccgttaaagccgtcatgattctaccataagctttggctgttcgatgattttgatattgtaaacgttctttccgactgctaaccaaaaatacttcatttttactgaaaaactggtaatgacatccgccactaccagttttttagtttctgtttcgttattcggcaaccgtcttagcaattgcagcattaaccgcggcctgctcgctttcaatcaattctacgcgactggcaatcaccttttcatccatttgaatttcgcgtttcagcattgggtcgttttccttaggcgtaaagaaacgcttgaattcggccaatcgctgcgaagtcttaaagatacgagagattacggtaatataggttggaaattccatgtcgccgccaacggtcttttccagccatgaccattcctgctggatccagtcccaggctgcctgttgaccatgatcattagccaaaacgcctctaaaccaagcccgcagatcctgtggcttgatggtatcggcatcttcaaaccgatcaatcagctgggcaatcaattgatcatcctgcgtcttggtcaaagctgcacagatatcctgcttaaaaccggcatcggcagtcttttgataatccgccagcagcgtatcaaacagttcctggctgccatagtttttaacctcgttggccagcaccagtccccgtacatcagccggcagatccgccagatgatcctgatactgatcaaacaatgcctgcgcctgcttgattgtgtcacggttttgcgcatacaaggccgcgctcaatacgattggccgcgttaattgatcatcattggactcatctttttgtgaaagccagccaagccgctgcacctgcttgacgctaagttgatcaaacagctgctgcagttgacgctctgtcttggcagccggctggacaaagtttttgagactgttagccacacggtacagcatttcattaacgattccagaacgactgtctttaaagcgactcagcagcgggacgatctgagcataggaaatctgccgtccttctgccaacagacgcagatcctgcagcagctgcagctgatcgatggctcccagttcatcaaggtgatccaaaatatcatttagcagcgtctcatcatatttaacgatgacatgcgaattatcgcctacattaacgcggaacggccgaccattttgttttcgcagctgggcatagtcgcctaaaaccaggctttgttcgctaaagatcgctggtgcctgattataattggcatttaatggaatctgccagagacggctcttttcctcgccatcaccaataaagaactgctgctgactgagcataagcttgccatcctcaaccttgacctcgactaccggatagcccggatgctccagccacgactccatgatctggccaacattcattcctgaagcctcgcccagtgcctgccaaagatcggctcccgtagcattgccatattgatgggcagcaaagtagttcttcaagcccctgcgcatcgcatcatcacccaaaagtgcccgcaccatcaccagcatccgcgcgcctttggcataaacgattgctccatcaaacagcgtatcgatctccgcggggtcatcaacggcaacgtgaaccgactgcacgccatccgtagcatcccgctgcagcgccattggaacctcagaagtctgaaacatctcccaaacgttccattccggctccagagcatcgacggccacgtattccatcatgttggcaaatgactcgttcaaccaaagatcatcccaccacttcatcgtaaccagatcaccaaaccattgatgtgccagctcatgcgtgatgaccgtggcaatcagccgtttttgattgagcgtcgtattgtccggatccaaaagcatgtaggcctcacgataggtaaccaggccccagttctccatcgcgccggctgaaaagtctggcaaggctaattgatatgactgtggcagtggatatggcgtctggtaaaagtcttcataaaactcaatcgcacgtttggcaatatccaatgagaaatcaagttcttttggctgatgggccttcgtagcaaagacaccgatctcaacaccgctcttggttttggcaaacttgctctgcagctcgccaaatgcaaatgcaaccagataagtagacatcttgacggtttcttggaagtagtgcacgccattttcaacatgatcttctggcatgttggtaataatggtttcgcctgggcgttcgtcatacttgatggctaacgaaaacgtcgccttggcttctggctcatcaatcccaggaaaagcctgccgcgccgccgtggtttcaaactgcgtaccaatcagctgctttttttgaccggcaaccgtgtagtatgacggatagatccccatcatcgtatcagtcagcttggcatcataaactacttttaactccacgtcaccagaatgcggcagttcaagctgaatggcttcttgacggtcgctgaagctgaatggtacgtccagtccatcagcctgaacgctggcaacgtttagaaacttttgatgcagtgcaatcttagtgtccacagcattgcctttgatcgtcgtaatgcctttaaaatgcttggcggcgcggtcgatatccaggtagatgtcgtagtggactggttgaaatttttcataaaaacgcgttgagtctgccatgttctttcctcatttcgttaaatttattgaacattataacgccaattgctaaaaagattgaaaccgagtacctcatcagccttcaattcttataattttttaattttaaatggtattctttgccagaatcggtataatggtagctagttatttttaaggagtttttatgcagtttttccataaccaattaaatatccatctgattatggtcggctgctgcaacatctgattaagcttaacggtaatgatgagcggttcataatttgaatcgctcttttatttttggaggacacagcatgagtgagaaaaaccacgtcgcgccaaagttaaaacgcacaatgacggcgggacaaatggaaatgatctctttgggcggcgcgattggcgttggactgtttatgggatcaaaatcaaccatcaaatggaccggaccttccgtacttttggcctatgcctttgtcggtttgattctgtatatcgtaatgcgggctttgggcgagatgatctacgtcaatcccagtacggggtcgtttgctgactatgccacccattacgtgcacccaatggccggctacatggcagaatgggccaacgtttttgaatatatcgtggtcgggatgtcagaagttattgcctcaactgaatatctcaagtactggtggccgcatactcaaacctgggctgcgggtctgatcatcatcttctttttagccatcgccaacctggccagtgccaaagcttatggtaccttggagttctggtttgccatgatcaaggtcgtaacgattgttttaatgattattctaggctttttggtgattctgctgggatttggcaatggcggtcatcccattggctttagcaatctttgggctcatggcggctttttcaccggcggctttaagggctttatgttctcaatgtcgatcatcgttgggtcatatgaaggaatcgagctattgggaatctcggccggtgaggttgccaatccgcaaaaagccgtggtcaaatcagttaaatccgttttgtttagaattctgatcttttatgtcggcgcgattttcgtcattgttacgatctacccgtggaatcaattggacagcgtcggctcgccatttgttgagacgtttgccaaagtcggcattaccgcagcggcttcgattatcaactttgtggttttgacagctgctttatctggtgccaactcagggatctacagttctagccggatgcttttccgcttggcgcatgaaggcaatgctccacgcctgtttggcagactttccaagcacgtggttcccgatgcagcaattctgggaatttctggcgggattctgatcggctttgtcttagacatcttcgccgaatacttcagcaagtcaactgccgatctctttgtcgttgtcttcagttcatccgttttgccagggatgattccttggtttgtgatcttgctggctgaactgcgattccggcagcataatcctgaactgatgcaggatcatccgtttaaactgccactttatccattctcaaactactttgcgtttgcaatgctgatcatgatccacaacctgaccaggtgaaaatttataat

SEQ ID NO: 1905 - DNA, 1911 bp, Unknown
  gut microbiota DNA sequence
tttcttgaaggcaatggatagctgttggcgtgattttaaacaattacaggatggtcttgaatatagtctttaatttacccattttgttaagcggttaactaataaaaaataacaagggagaaaaaccaatgacaactaatgcagttggaatctacgaaaaagcgctgcctcaagatctgtcttgggaagaaaagtttaatctgacccatgagctgggttttaactttttagaattctcaattgatgagagtgatgagcggttggcgcggctggattggacggctcagcagcgagaagactttcgcaatgcaatgtggcgaacgcacagtcgaatcaacacattgatgctttctggtcatcgccgctatccgctgggttcaaaggatccagcagttcgcaagcagtcgcttgaaatgatgcaaaaagcgatcgatctggccgtggatcttggaatccgcaacattcagctggctggctacgatgttttttatgaagataaaaccatggaatcacgcgaaatgtttgttgaggatttagctaaatgtgtcagcatggcagcaaaaaagatggtcatgctttcaattgaaacgatggatgatccatttatcaattcattaacgaagattgcgcactacaagactcagattaaaagtccctggctacaggcttatccagaccttggcaatctaagtgcctggcctgaaaatgatgtgccggcacaatttgaagatgatatcgacacggttgcggcagtccatttaaaggatacgcgtgccgttacgccaacctttaaaggacagtttaaaaacgtgccgtttggcgaaggctgcgttgattttgaaggcttactgcggatgctggtgcggcttcaatacaatggcagctacacgattgagatgtggaccggcgataatcaagatgcggatccagtttcagagattaaagctgctaaagcctactttgatgctttgtttaataaagtaggaattcaacaagaagaagtaattaaataaaaagtgaggatatctaacatgctcgaagaattaaaacaagaagtctatgaagccaacatgcagctgcccaagctgggactggtttcgtttacgtggggcaacgtttcagggatcgatcgtgaaaagggtctgtacgtcatcaaaccatctggagtgccatacgatgagctgaagccagaagacatggtcgttgtcaacttgaaaggcgaagtcgtagaaggggacatgaatccatcttctgacacgccgacgcacacttatctgtacaaccacttcccaaagattggcgggatcgtccacacgcattcaccatgggccgtttcgtttgcagcggccaacatggatgttccggccttaaacacgacgcatgccgatactttctacaccgacgtaccagctgccgatgctctgaccaaagaagaaatcgaagaagactacgaaggcaacacgggcaagacgatcgtgcggacgtttaaagaacgcggtttggactatgaagcaacgccagccgcattggtttcccagcacggaccatttacctggggaccaacgccagacaaggctgtctacaatgccaaggtgctggaagtcgtagctgaagaggactatcatgccatgcaattgacgcgtcaaaacctggagctgccgcagtatctattggacaagcactactaccgcaagcacggtgctaatgcctattatggtcaaaataatgcgcactccaaggatcatgccaaacatgaataataatactttataattaaaaatgtattttaaattataataaatttactaaaatatcaaaaatatatttaaaaataatgatattataaaaagatgaaacccttttctaggatttcatctttttttgctagggttgttataactggggaacttg

SEQ ID NO: 1906 - DNA, 7255 bp, Unknown
  gut microbiota DNA sequence
cactcccccaattgataaactgatagcggcaattccggcaacaatccaaagcttaccgcttttatacatcttaaagtgcattttataatcagacatttcccaatatcccccataaactaattattaaatataaattaatttatagtttaacactttatatgacaatatataacaactaatacagttattatattaatatagaaataaatatttttataaaaaagaagtcttgccacggtaataccgtagtaagacttcttttagtttaatatccagtactatagctggttgaatcgtcagtagagtacgaaccataagtcgtatcagcactatacgttgttccataagttgaactgccgcttagcgaagagctcgattttttagaggatgagctgatcgtattgctggtaccactgccaggcgtattgtaagaagcgccgtttggcaagacaaaattggtgttggtgtagccatcataagtcgtctgcagattgtacatcttggtttcattgttaacgactttctcagccttcaaacctaattgattccgaatcagcttcgaaacccggttgatttcctttggcgaggcgatctggaaagaaacgccctcaattgtcgcatccaagccttggaaatgttcagtcttaatgttctttagcgcaacatgatagttggtgtataaagttgccacgttgtcaattggaatattggtcttaaccccatccttgacagcgtccataatcttgttggcagccgagatggaacccgactccttgaatttcttcataacactcttcataacctgctgctgccggttttgacggccatagtcacctttaggatcatcatagcgcatccgggaatactgcaaggcgtcatgaccattcaaatgcagcttacccttggcaaaatgctgaccttcatagtcaaaggcaaatgggttgttgacatcgaccccgccaaccgcgttaacgactttcttcaaaacacccatgttgacaacggcatagtaatcaattggcacgcccaagagctctttaacctgcttgacagtctgcttagcaccaccgatctggtaagcggcattcagcttaacatagtccgcaccttcgtcagtatcaaccttgatcaagatatcgcgtggaatactggtcatagtaaccgtttctttcttgggattaatagtaaccaattcaagcgtatcggtattaccacccttattcccacgatccagagcaccaacatcagtccccattgccagaactgataccggcttgccttctttcagcttcttgctgatcttacccgaaccatcagaaaagactccttgagcagtactatgaatcttatgatactcataagcaccaccgagacagagcaatacgatgatcaaaccaataaagcgatagacccagcgcagcttgttacgcggctttttgggactgttttgtgactgattattttgattatgatcgtgtcgatattcggcacgtgtttgatagtcgccattcattgtcttgctatactccaataaaccatttttttatcataactaaccctctaactttagcagatgtaaagcgctatcgtcaaattttgttaaaagatttaaagaatccgtaaagactaattaatgacaaattgtaaaatccgccatgttaactcatatttataggctataatgatatattatataatcgttgaaagataaagtaaggttggaatttaaaatgtcaaaattatcaattgtagttccttgttataacgaagaagaatcaattccactattctatccagccgtggaaaaagtcgttcgccaaatgaacgatttacaaattgaatattggtttgtcaatgatgggtcgtcagataactcactgaccgaaatgcgcaaactgcatgaacaaaatcccgaacgcgtccattacgtttctttttcgcgtaattttggtaaagaagccggattatacgccggattacaagcagctactggcgattacgtcgtggtaatggacgttgatctacaagacccgccagaatttttgccacaaatgtatgaattgctccaaacaggcgaatatgactgtatcggaacgcgtcgtgtcgatcgtactggcgaagccaaattcaagtcgtttttaagcgatcagttttaccacgtcattaaccgtatctcacaaaccaacatcgttcctggtgcacgcgactaccgaatgatgacgcggcagatggttgatgccgttctatcattaaaagaatataatcgtttttcaaaaggcatctttagctgggtcggatttaagaccaaatatctggactaccataacgttgaacgagtggccggtgaaactgactggtcaacttggaaattgttcaaatatgcaatggacgggattaccgacttttcacaggcaccgctttcgattgcggtatggttaggaacgacttcatttatactttcaattattggcctgttgtttgttattattcggcggattgttgaaccaggcagcagtgtctttggttgggcttcattgatctgtatcatcctgttattcggaggactccaattattatgcattgggatcgttggcaagtacattggacgcatctatatgcaggtcaagcagcgaccaatctatattattaaggaaaagaaataatgataaaacgaaaaagcctgctgttttggtcagcagaactattaattgtcgcgactttaatttgggtttgcactaaactggactttctgtttcatcccatcatcgtcttcatatcagtaatctttgtaccactgattgtttcaatctttttatattacatgacgagcccggcctttcgtttgttaatgaaaattcgcttaggtaaatggcagatgaaacgtgggattgccagcatggtgatcgtcttgggactcttgctgctgatagttggtagtctcgcagtcttgattccaccaatgattaaagaacttaatcaaatgattcactggctgccaagtgctaccaacgacatgcagcattggctcgcgcaagcttctcaaaaacatgaatggattcgcaagatcgacctggcagattattatcaacaattcaacaagcagattaccaaatacgctgaaaagctgttggcggggctaaccagcagcgttggctcaatcatcagcacgattaccagtgcagttgtcgtgctcgtaaccgtgccagtcatgcttttttatatgctgaaagatggcgatcgttttgtacctaacattcagcggttcttttctgaaaagcatgccaaagaggttacggaactgctgcatcaaatgaataagacgctttcttcatacatctctggacagatgatcgaatgtatctgtgttggaattggtacctgcattggctatctgattattggcgaaccaatggcaatcgttttaggcctggtagctgggatcaccaatatcattccttatatcgggccatatattggtattgcaccagctttaatcgttgctttggcagttgacccgcagaaaatcatctgggttattgtggtagtgattgtcgttcaacaaattgatggtaatattatctacccaaatattattggcaagagcctgcaaattcatccattgacgattatcattctgttgttggccgctggcaacatcgctggtttgctagggatgatcctatgcgtgccactgtacgcggtagttaaaacaatggttgattactgcatgacgatttatcgcttagaaaaaaatgacgcaaaataaggattagaaagcttgtttgtagcaagctcctaatcctttttaaatgccgtggctaatagactttacaccatatttgtaatactatagataggataattctcgaaaggaacataaaaatgactgattcaaaaaaattggcagaagccgttaacaagcgccggacgtttgcgattatctcacaccccgatgctggtaaaacgacaattactgaacagctgcttttatttgggggcgtcgtccgcgaagctggaactgttaaaggacgcggcagcagcaattttgccaagtctgactggatggaaatcgaaaaaaagcgtgggatttccgttaccagttctgtaatgcagtttgactaccagggcaagcgcattaatattctggataccccagggcacgaagacttctctgaagatacttaccggactttgatggccgttgactctgccgtcatggtaattgatggcgccaagggtatcgagccacaaaccaaaaagctgttccaaatctgtaagatgcggggaattccaattttcacgttcatcaacaagtttgaccgtgatgcccgtgaaccgttggatctgttaaacgaaatcgaagacgtgctgggcatcgaaacctacccaatggactggccaattgggatgggacggcaatttatgggtgtttatgatcgttataatcatcgagttgccctttcccacccacaggattctgccaacccttacctaccattagacgaagatggtcaggtaattggtgaaaacccattggctggtgaaggtgaatggaaagacgccctagatggaatggaactgattgaaatggccggcagcgagcttgatgaagaaaaaatcgccaagggggaccaaacaccagtcttcttcggttcagcactgaccaactttggggttaagactttcctggaaacctacttaaaatttgctccagccccttcagcacacaaaacagaagacggtaaatcgatcgatccactgacaccagagttttctggcttcatctttaaaattcaagctaacatgaatcctaagcaccgtgaccggattgctttcgtacggatttgttctggtgaatttacacggggcatggacgttaccttggagcggactaaaaagccaattcgtctgtcaaacgtgaccgaatttatggccaatacgcgtgaaaacgttgagaatgctgttgccggtgatattatcgggctttacgatactggaaacttccaaattggtgattcaatctacaccggtaaacaagacatcaagtttgagaagctgcctcaatttacgccagaactgtttgtccgcgtaacgccaaagaacgttatgaagcaaaaatcattccacaaagggatcaaccaattggtacaagaaggggctgtccagctctatactggctataactccaacgactatattctgggtgccgttggtcaattgcagttcgaagtgttcaagttccggatgcagaatgaatataattccgaagttattatggaaccactgggtagtaagacagcacgttgggttgatccagaacagcttgatcctaagatggtttcttcacggaatatgttggttaaggatcgttatggcgctccactattcttgtttgaaaaccaatttgcggaaaactggttcaagcagaagtatccagatgttaaactgacggctaaactgtagggggaactccatgataaagatcaaagagcacgtaaataatagtaaacttatgattatactagggttattgttattttctataatcctaatatttcccttttttgttgcaggtcaattaggtgtacattctgactggagctttcacgcagcaagagttcaacagatttatttgaatttaaaacatggtgaattctttacattcatcgggaccaatacatttcacaatgtcggcaatgggaactttttattctacccaaccgtttttctttatccttgggcattgcttgaattcgtacttaaacctattgaagcatatttagtatacgcatggttattattgtttgtaactatgttggtaagctacttctgcatgctttcatatagcaaaggtaacaatcttcaatctatcttttttgcaattgtttacacaattgctccttatcatttgtacctcattttccaaaattatgtattaggagaagctcaagcctatacttttttaccaattgtatttttaggtatttacaaacttttatacaaagatgaatttataacattagcaatcggaatgtcattggtagcatactgtcattatgtgtcattgtttatcgcaggagaagtcctttttgctattgtattggtctatttttttgtaatgaaatgtaacttcaaaaaagtattgttgttattaattaaagcagtcttattgtttggactattaactatttggcaattcatcccgcttctcactgattgttggaaacaaggattatttaccccaccatccggatttattattattccatccatgacaaacttgattattaattcctttaataatcaagtctctaatcaaggcggactcggcatcttgctaattctagctctcttttttggctggaactgggttaaaaaagattccattgataagacagtttggttatccggaattactctcaccatattaattacaaatgtttttccacataacttatttaaaaatacaatatttaatgtaattcaatttacgtacagatatactgattttgcgattgtctttctaagtattatttgtgccgaaggattatacaagtatataaactctgacaaaaaattcacagtcttaaaatcttccttgttattgctatctatattgttactctatgctggtagtatcaccaatatatatgaacgtaatgctaatcataataacagtgttgaggtattagatcaccctgctaaatcgtataaaacattacgtccagataatgattcaccagtcattttaaataatcataactataattatcaatttagctatgccgctctatttggagaaacagattatttcccaatgcaagcttattatcagaaagaaagcattgtagaccatattatttatataaacaattctaaaaagcaaataactccaattgcttctagtaataaactaatctataaactatcattaaataataatgcaactgtagacataccgacacttgtatttaaacatactactcttaaaattaatgggaaggaaacaaaatatcatatttcaaaacgaggaactattgtagttaacctaaaaaaaggcaaatatcagcttactgtctcctatcagccccctattatctactatgtatgttttacaatctgtttattaacttggggatgtttattaattattacattatataaaaagtctatcttcaattttaaaagcagaaataatacgaatttcataaatgcacactaacaacatgtattccaatgactgcgcggtgtcgat

SEQ ID NO: 1907 - DNA, 4797 bp, Unknown
  gut microbiota DNA sequence
gtttcaatcagcatgaataagaataaacctggcgcgattgtctatcacatcaagcatcaattgactaccagcacgtttctcaaggacttcacgcgccatgtcgttttacacaagccaagcggaacggaaacgattgatctgatggctaagatgcaggctacgcgaactcatgatgagattacgggcacggatacgtatgaaaactggcaggtcgtcaactcgtttggtcaagtagcagccgataagattgcctacgctggctatcaggcctcagttaaaaaaattgccgccagcgcgccgaatgaaaatatggctgctgagacgacgattgatgtgacttatacggctaatcccggcgtgcagacgattgaatatgtcgatggtcagcgcaatgtcatttcaaaacggctgcttgccggactggttgatcaagaagtcaccctggataccagtcagaatggcaacgcggctttaccggccaactggcagctggcaaagggcgtgacggtaccaagcagcattaagattccagcgtctgatcaggtgattgcttttgaagttgagcatcagctgcaggacgtttccgcgactgatcccgacgctcaaaaagtagttacgcgagtcatcaacgtctttgatccacacaagggtcttgatacaagaacaaataccattacgctggtccgcacggcaatcaaggatctggttaccaatcggacggcctatggtgaatggcaaaatcccgatcatcagatatttgacgagtttaatgtgccacagatcaccggctatacggccagtcgtgatctgattgccgcctatatgccaaatggcgaagataccacgctgacgtacaacattacctattcggccaatgagcagtcagtgctggtagtctatcaagatcagcagcataacgtgattggacagacggctgctggaggacggacggatcagcgccttacgatcgattttacgcagtcattgcctgatggctgggtcttggcggccggacaagctgatcagcagcagattacatttacgggatcatcaatggcgccaatcatagttgagatcgtacatggtcaggttttagttgggcctgatcatcccaagacgccgcaagatcgcctgccgtataccaaaaacgccttttatcccagcggtgtgggctataacaaactcaatcgaaccattgcgcgccagattacgatcgtctatccagatgggcaaaccgatctgatcagacagaccgttcagtttaaacgcagcgcgacggtagatacagtgaccaaagccgttgtctatggtgagtggcaggtgatcggcaatgatcattttgctgagttcgtccctaaagaactgtcagactatctgccaagcctcaagctgattgaagccgccgtacctggtccagaagacgttgacggcagcttgacgatcagctattaccaccgctatacgacgcagacgattgagtatgtcgatgctgacagtggcgagctgattggtgatccgcaggtaatcgatggcgaaacgggaacgatggttgaaccaacgctgatgctgcctgatggctggggattagatgaaaatcaagccgtcccaagcaagattgccatgaagctggttgacacgccaatcaaattgagagttcggcaccaggccgttctggttgactttgatcatcccgtgcaaaaaggcgagctgattgccggtacccaaaatcagcattatcaggttgatttgggaacagatgtgctgaatcgctatgccacgcgaacgatcatcattaccgatctgcagggcgaacagtcccagattatacagcgggttcatttcgtgcgcagcgtctgggtagatgcagtcaccggtctgccgatcattccattgaccagcctggaatggcagccgctcgatactaaatcattctggaatgccgtaacgattcctcaaattaaaggctatcaggcaatcattacggatgaggccacgggacaacagctgccggcaattgagcaggtcagcccggatgcaacgagcagtcagacgatcatggtggcctaccaggcgcagaatggtcagcggcgcatcaattatgttgatgaaaatggcagcattatcgggacgcagacggttaacggtgtcttaaatgctgtagtaccagtcaagctgattttgccgccaaactggcaattggcaattccagatcagcagccggccagcgttaagattctggctaccgatcagccaattgaaatcttggttgcacaccaattagtggaaaaagagccgcagctgcgccagattacgcggacgatcaactttaagaatccattgacccaaaatgccgtaacgacggtcgtgcagacggcaacttttaaacgagcggtctatcatgatctggtcagcgataccgatacttatggcgcttggattccactggttgccaaatgggatgagctgggcttgcctgaagttgccggatatcagccttcgcagacggtaagtgggctcgcggtaacgccggatactgccaatgtcgtcttggatgttgagtatctgcctgaatcacagctccagacggttaattacgtggaccaaaacggcaatctgatcaagacgcaaaactttgctggcaaggttggcgaaacgatcaagccggcattcaagcttcccgctggctggcgattgctgacggggcagcagctgccggaatcattggtcattcaagcagctaatgtgccattaaacgtgcagattgagcctggattggtcagtcagctagctgaaacacggacggtcagccgcacgatcgtcttgaaccttccaaatggcaagacacagaccaaggttcaaactgctaaatttacacggaccgttgcccgtaatctggtaaccaaccagtttgtttatggcgaatggcagcgtcaaggacagttcgatcagtttgacgtcccaacgattgctggctatttgtctaatctcaaacggctgccattgattacgccgagtgcggattttgctgacagtacggttgagattgactatgaaccgcagattgaaacacagctgattcaatacgtcgatgcgagtggcgccgtcagtcaggtgattgcagaacagtccttggctggaaagacgggagagtggctggcattcaagctgacggttcctaaaaactggcagcttgccaatactcaaagcgtaccgacgatgattcagatcaaggcccaggcagatccgatcgtaatcccgattcagcacaagcaaaaagacattacggatattgccgatgatactaaacgaattgtgacaagaacgattaagattacttacccaaatggacagatcgaaaccatcgttcaagaagcagtgtttaaccgcagtgcgactgaagatgaggttaccggtcggatcgtttatggcaagtggcatggcagtgatgtatttgaagctgtcgatattcctaagattgagggttggcagtcgagtctgagcaaagttgagcagtcagtgccaaacgcgaacacacctgacagtacggcatttattacctatagtcaggcgcaaggcgtgtttgtgattcgctatgttgacgccagcggtaattacgttgcggctcagccattttggggtcaggctggtgaaacggtcaagccgactccgcagctgccagccggctggaaaataattggggtcaatccaatcccagctgaagtaattctacaagccggtgagcagctgctgcaggttcgcgtagcacacgttctgcgggtgattgacgaagatgatccggatcgtcatacaacggttacgcgaacgatcaatatcaaactgccggacggtcaaatcaagcagattcagcaaaaggtcagtttcattcggctggcttttgaagatgaggtaaccaatcagcgcagctatgggccctggattgccgaagacgatggcagcggtgttaccgatcgctttgccgaggttaagataccgacgatcaagggatgggtgccaagtcaaaccatggtggctgaatataagcctagcgggacggcccacagcacggttatcgatgttacctaccttcctgaggcgcgcagccggacgattgaatatgttgatgaaaacaatcaattgatcagaagtgatgccatcgtcggtcggactggcgaaacggtaacagtccaaagcagcgtgccaaccggttgggaaatcgttgctggcaaggttcccgataagattgcgtttgatgagcatgccgatcagccagtcagaatcgtcattaagcatcgagtgattacgattgacgccgaacaggcagccgaattgaatcacgttgatgtcagcgagcttactgaatccgtcgtcagagagatcagggtcttgatgccgcaccaggatcagccattgattactaagcagcaggttgattttaaacggctgggtcaatatgatctggttgaccaaaaattcgtcggttttggcgattggcaggcagtcggcagtacgctgttggcggcatatcgcgttcccaaggctgctggctatcgtccatcagtcagtggaatcggtgaacaaacagcaacggctggcgatgctgatgaaacgattgtcattagctatgctgccagccaacagacgattcatgtcaaatatgaagacgagcatggtcaggtgatcagcatggattcgatcagtggtcaaacggataagaccgtgccgattacgattaaggttccggcaggctggcaactgacagctgatcaagttgtacctgatcatgttaagtttggggcc

SEQ ID NO: 1908 - DNA, 2187 bp, Unknown
  gut microbiota DNA sequence
tgccagacaatccagatcgtcactatccaagcggcgttgcctttgccgatctgaacaaaacgtttacgcggtcgattatctttaagctcccccatggtcatattaagacgatcaaacagatggtgcagtttgcaagaagcgcggtggttgatgaggtcaccggacagattgcttaccacgactggcaggttttagatgacgataaactggccagtgtagccgtgccggtattggaaggctataccgcaacgatgcaaattattccatcactgcacgtaacagtggatatgcatgatttgacggttgaagttgaatacatcaaatccgctgttccagatcagccaacaacaccggatcaaacgatactaccaaatcagcccgtacagtcggacaatcagtcaaacagaactggaaatgttgatgccattaaagaagcatcaacgattttgccggatcagacagctaaatcaaagcaggttaaagataaacgcttgcctcagactggcagcaatgaacaagagcacggtcatatctgggcaattttggggatgctgagtatgctgtttggcgggctcttaggtggcaagcgtcgcgataagcactcctaaatgaaagcataggtaggatcgcggtcagccaattaaatggtgtttcagggctttaaatgttggtcttgtattagagaaacggaaaaattaatattaaggactgataaacgctatctccaagctaatggttgcttgagatggcgttttgtttaactgtattgttttatgctaaaattaggacgtgttatttctttctatataataaaaatgacacctatagatttttcgaaaaattgagtggagtgacaagatgaccagactgattgacgatatatttaaaagccaaaaattcatccccgagctgatgagcgaatttggctttcagaaaactaaggatacttatacatacgaagagaattttctcgatgactcatttcgagcggtcgtcaccgtgaaaaacggtaaagtcgatggccaggtcattgactgcacaactggggatgaatattaccagattgacgtgccggcaatgcagggcaagttcgtcagttcagtccgagccggttatctggagatcttaggacggattgtcgatcactgctgtctgaccatgccattcgcatccccacaagccaatcgaatcgcgggcagaatttacgatcattatcacgtcgcgccggattttccttggaagtccaagaataacaaggataatggcgtctttcggcatctggattcaagcaaatggtttggcctgatcatgaacggtcggcggggactcgtcactaaaaatgatgatgaacaaaacgttgatatcatcaatctgaaaagcgacacgctgccagttgacggtcagtcggttttcccggcctaccatatgaatcataagtactggatttcagtcgtacttgacgatcagctggacgatgataacgtaatgagactgattgatgaaagcttccgtttgacgggaaagcaggggtgattaaatgcgacagatcgtactgccaatcaaggatgatgaggtactcaagcaggtgcaggacacgctgttgaacaacttcaagtctggtcggcgcaactacaccatctttcaagtcggcaaggcaacgctgctgcgggtcagtgacgtgctgcgacttaagcaggcggacgttttcgatgactatggcgccatcaagcagcacgcgttcatcaaggacaagaagaccggcaagcggaacacgctctacctcaaaccggtgatgatggatctggtgatgtatcaacagtggctcaagcgcaacggctatgaggggacaacggaatggctgtttccttctaccacgcggccgcagaagcatattgacgagcgccagttctacaacgtgatggctaaagtcggggatctgttggacatcaactacctgggcacgcacacgatgcgcaagactggggcctaccgcgtgtacgtccagtccaactacaacattgggctggtcatgaaactgctgaaccattccagtgaagccatgaccttggcatacctggggcttgatcaggtcagccgtgagcacatgctggataagattgattttgggtaaaagaaaagcagacacgccaggagttttggtgtgtctgcttttaacttagttgttcc

SEQ ID NO: 1909 - DNA, 1274 bp, Unknown
  gut microbiota DNA sequence
gtggattcatcttgatgcttaatcggttagataggagaaatgaaatgagtaacaaaattacagtatatgaattcgatactacaagtcgaatgcacccatttttagcggcagtgcaaatcgacgcgaatattggattgaaagataatcaaacgactgtggccccaaatgaggcacagttttttaatggtcacgaatgggtaaacgagttaacaaatgcctatcattatgacgaaaagggttattttgatgcggtagcgattattcccaaaggctcggaattgaaaaccaacgaaacgttagtcgtgccatacgatagtgagggccggggtatgtataagcctaagtttgacacggcacagaacacgtggatcgaaacgttaacgcaagcggaaatcgacgcgctcaaccaacccgcagcacctaagccaaccgccgagcagcaaacgatcagtttgttagggcaacgggtagcacagacgaccgctgagaatgcgcggattaagcaagacaatgcgcaacttaaacagatggtgtcggcacttggacaaactgttgctcagctcaaggcacaatctacgattacaactgatacaacgactaactaaggagagtggtaaactatgatgactgactttgattttgtaaagacgatttattcttgggggtttccgattgattgttatgtgctctaccgtacgataactaaggaccagtacaaggaaattaccggcaaggactatgtagctgtatcatctgctactgcaactgattctgggtctgctaatgctgctcaatcagctaatacggatgttagccaagcttaagcaaataaaaaagcccacagcatagtactgtgagctaataaaaaagagcgctctttttgaggagcgcccagccggcttgttggctagaaagcaccaactgcacacggtgtgattgttttgttgataatattataccacataaaattcatggtacaataatcaagcacacatgcgcaggcgtagaaaacctgattagtgcaagaaaggaggaaactccgatgcttcacttttgtgtgattgttttgttcgtgcctagtaagcacgttaaaaaattaattaagcgactgctcaggtagcacactcgccagcgctcatcggttgggatactgatagggcgctttttgtttgcgtagattttgataaggaaggaggcaaatatgtgcatgttgattgggacgaagtagcaagtgtttgtggtgtaatttctggagtgattgctttactggtttg

SEQ ID NO: 1910 - DNA, 2470 bp, Unknown
  gut microbiota DNA sequence
ttatctaaattactagcaaaaataatttcatttgattcattacggcccgcgctaaccaaatttctttgggcgtaccgataacgttggcaaccagattgatccgcttgcgaaacgtactaacggcaatttgatatttaggcatttcacgaaaaccaccgctcattaaacaagaaacgggaaccgcatcgccaaaattcaatttttcagcatcaataacggcaaggttggtgtaggaaattccccggacatgataatgctcctgtacggcttgccgcagtttagcaaccgaatctccattagccaggctggcaatcatcgaacgaaacgactctaaaaacgcgtattgctctttttgctcattcattgctcgatgaacatgccatgccgtatccgccattgattcgctcaaaggggcctcaatctgcatgttatagcggccagtcatattttggacccgcaactgtttttgatcgtctactgacaaaaacttgcgcatatcggtgggacaagccaaactaatcgtctcgaccccgcaatactgctgaactgctttgccatatgctgccataaatgcatcatttagatgaattcccagtcttcgacactgatagtgcagatgatgcgattgcctaagatccagctcatcatgaacaacctgataatgacgctgctggtttgtagaatcgcaaagtcgcggcaaagacagcggagtttgcggatgatcattattcagctgcgttggcttgatttgcttcaacaatctcttaataccgtcaatatccgtatgatttttaatatccattgattgctctttggtgtagcaagctgccaataaatataaaagctgcttgaaccctgcaccatcagttaaaatatggctgccatagattaccaacttgttttcactgactgaccaatagatctgccattggggctgagtttcaaaatccagttttgcagcagcttgatcattaattctttgaacatagtgaatcacgctaactgcaggtgctgacagcttttgaaactcatttttatcaatatcgtatgttgccatcaattcgggaacgaccttagtcacagaaactactgcattttctaatctttcagcatccaaaggttgattaaatttgatttcacagcgcacaattggatataaagcttcaaagccaaccgtatgcaagatatttaaaggatcggccataattttctcctttcaaaaagccgcagcgaaaaatcgctgcgactttgtttgttgctagtctaattcactggtcagttcacgtaccaatggcttgccagctaccagattcttaacatcggaaacacacttttcgcccataccatacagacattcataagtgtaagcagaagtgtgcggcgtaatcaagaagtgttcatcatgcaggaatggatgatcaccaggaaccggttcaacctccatcgtatcagatgcataaccggctacttgaccgctcttaacggcatccatcattgccttttcatcgatcaaagccccacgtgcacagttggtaaagtaaacgccctgcttagtcttcttaagggcctctgcattcagcatgtggtaatctttttcatccaatgaagcattcagtgagatgtaatcacagttagccagcaattcatcaagtgataccagcttagcccatgggttttgttcccaccatccttcacgagcacgtgaatgagtgtcagcaattaagacgtccttgcctccactaaccaaatggaagatctcggcaacccgactgccgatattgccacaaccaatcaccccatactgcttgccattaaattgatggcccatgaagtgtgcccgatcttcataatgaccagcagcttcacgattggctgccgcacaagtttgacgagcaatcgcaaataaattggcaactgcgttctcggcaacggcatcacgttcaaccaacggcggcacgatggttaccttaacgccatgttctttagccgctgcaatatcaacactgttaaagccaatcccgtgccgtgagatcagttctagtccagtaatattgtcaaagaattccttagtaaagtttggcgtaacactagcaatgacaatgttgtagccttgcagcttttcggccagctctttgccagaaatatctggtgcaaacataaagcgatcaacttgaccaatcttttccaattctgaccagtgttccttaaaaatctgaccaaagctgctagagttaacgactgcaatcttgtattctgacataattaataaattccttcctttgattaatcgacgtttttaccgtacttagcgagtttttcttccaatgtcttacgaatagcgccttttccggccagcatctctttaaagtcagcctcaatcttgtcacctagaccgactgcgtagagatcattaccaaaaatcgacttattgctcaaaatccctttaatgttatcgtgaacattttgatct

SEQ ID NO: 1911 - DNA, 3529 bp, Unknown
  gut microbiota DNA sequence
gggggcgttttaaatgacaatgctgcagatattatggttctttttgatcggtctgctgtttgcggccttcttcttcctggatggctttgactatggcgttggcatggcggttaaaaccctggctcataacgaggccgagcgcacccagctgattcgtacgattggtccggtctgggatggcaatgaggtttggctgatcacggcgggcggggcgatgtttgcttcgtttccatactggtacgccacgctgttttccggctactacctgatcttactggtgattttggttggtttgattatccggggcgtttcgtttgaattccgggcgcagagtcccatggcaaaaaagccgctgtgggataacgcgctggcattgggcagtctgatcgtgccattcttttttggcgtaatgtttatctcgatgatcaaagggatgccgatcgacgcgcagggaaacattcaagctggttttttagactactttaactggttttcaatcgtcggcggcgttgctctgactctgctgacctacctgcacggcttgaactatatcgcgctcaagacaacgggggcgattcaagcgcgggcccaaaactacagccaggcgttctactgggttctgtatctgggcgaggtggtctttgcgctgcttttgctcttccaaaccgactttatcaaggtgcacccgttagcaacactgctggggctggctttgatcgttgccttttcggtgctggctcatgccaatacctttaaaaaccgcaatggctgggcattcgtcttcagtggtctgacgctggtttcgctggtagcactgctgtttagcggcttgttcccacggttgatgatttcttcgatcagcagtcaatacgatttgatgatcaagagcgcgtcatcttccaactacacgctgatcgtgatgacgattgcgacgctggttctggtgccatgcattttggtatatacggcctttgcctactggatcttccgcaagcggattgagatgccgcgcgttgaggtacgttaatgattgatcgtgatttatttcaattgccgggttccggcgcgatcgtgaaacggcttgtcggaataaagattctgcaggccgtttttattatcgctcaggctgcctgtctggctggcacgctgtttatgctctggcagggaaaaggactgcactggctgcttttagcgggctttattgccagctataccttgcgccagctgctcttatggctggaaaaacggattctggatagttttgcggaacagacggccgttgatctgcgggcgcggctgttaagcaaactctatgatcaggggccggccttggtgcaggaaaatgggactgggagcacggttgccatggcacttgatggtatcgacgaggtcaaccagtacgttaagctgacgtttgacaagacgatcggcatgatgagcgtccccgttttgatcttgattgccgttgggatttttgattggcgctcggccgtgatcttattggtgacctatccattgatcatcctgtttatgatcatcctgggcaaggccgccaaagccaaagccgagcagcagtatggcagctttcagcatctgtcgaacaatttcatcgattcgctgcgggggatcgacacgcttaagtatcttggtttaagcaagcgctactctaaaagcatctttacggccagcgagcattttcgtaaacgaacgatggccgtgctgaaagtcgcgatgctttcaacgtttgccctggactttttcacgacgctttccatcgcggtggtggccgtttatctggggtttgatcttctaaatggtcgcatggcgcttttgaacgcgttggccgtcttgatcctggcaccggaatactacctgccgatgcgtcggtttgctggtgatttccatgccacgctcaatggccgcaactcgtttcataaaatgctgacgatccttaaccagcccacgcagccacggatcgaagcaccactgcattcctggaaatcaactgatgagctgtcgcttgattcaatggcgtttcaatatccaaaaggcaccagcattaagccgttttcgctgcagatcaaaggctggcagaaagtcggcatcattgggatgagtggagcgggtaagacgactttgatcaatcttttgagcggttttttgactcctaagcaaggcacgatcaagattcaggatcaaacggtaacgacgcttaacctgccggactggcaaaatcagctgctttatctgccgcagtcgccaacgatctttacggcgacggtgcgtcaaaacgttgccttctacacgccaggtgtttctgatgaacagatcagggccgcgctggcaacagttggcatggcggactggctggccaagcttcctgatggcctggcaacgatgattggggccggacaccgcgagctttctggcggtcaatcgcagcggatcgcgttggccagagcattactggacgacaagcggcgggtcatgatgtttgacgagccaaccgctcatctggacattgaaaccgagctggagctgaaagaacgcatgctgccgttaatggatcagcggttggtcttttttgctacgcatcggctgcattggatgaaggagatggattggatcttggtaatggatcatggcgagctggttgagcagggaacctatgacgaacttttagcaaaaaatggctatttcgtctcattgattaatggaatgcgaggtgagcagcatgtttagacaaatcaagctttttcagattttaaagcatgattcgtgggtccgcccgtttctgcggcgctatcgcaaaagtctgatcctggcgatctcattgggaattttgacgtttatctgcgcggccgggctgatgtttagtgccggctacctgatcagtcgcgccgctgagcagccggtcaacattctgctggtctacgtgccgatcgtcttgacgcgtgcgtttgggattggccggcctacgctgcattatgccgagcggttggtcagccacaactgggtgcttaagatgacttccagactgcggcaacgactgtatgacgccttggaaaccgacgcgatcttttggcgtcgtcgctatcagctgggggatctgctgggcttattggccgatgatatcggtcatattcaaaatctttatctgcgcgcgatctttcccatgctggttgcctgggggctttacgtgatcctgattattgcgctgggctggctttcaccattgctggggctggccgtgctgctgatctttgggctgatgatcatcgcgattccatggtggtcaacggtagtcaatggcgcgcgccagatgaaagacaagcagctgcgtgatcgaatgtatgctgaattgacggatgacgtcttgggactggctgactggcgcttggcgggacgacgcgcagactatctgaaacgccacgcggcaacggaaaagctggcaatgaacaatcggctggccgagcaccgatttgcacggcgacgggatttcttgatggagatgctgtttttgctgatg

SEQ ID NO: 1912 - DNA, 49525 bp, Unknown
  gut microbiota DNA sequence
actacctgccgctgcccgaagagatgaacccgttcttgggctaccgggcaattcgaatctgcctgcaccggcctgacatcttcaagacgcagttgcgcgctttgattcgggcctccgaatttggtcccgttgagatcatgttcccaatgatcgcgactctggctgaactgcgtcaggctaaggcaatctaccaggaatgcaaggatgagctgcaaaaggatcacccgggtctaggtgacaacgtcaagatcggaatgatgatcgaagtgccattggctgcattgtatgccgatcaattggctaaggaagtcgacttcttcagtatcgggaccaatgacctgattcagtactgctttgcggccgaccggggcaatgacgcggtttcctacctgtatcagccgctcaacccagcctttttgcggctgatcaagcacgtgattgacgccgctcatgccaacaacaccaaggcggccatgtgtggcgaaatggctggtgatcagctggctatgccattattgctgggcatgggactggacgagtattccatgagtgccagctcgattctgcggacgcggagcatgatgaaggatctggataccaaggaatgtgccaagtgggccaatgatgccatcaacctatgctacacggctgatgaagtggaaaagatggttaagacacggctcggaatgaactgatcatcgttaaattaaattgaaaatatatcgctaaaatcaataggcagccagtctttgtaagttgatacaggaactggctgcctattttggtataaaaaagcactgttttggcatgtaccgaaaacagtgcagttatgattaaatgttcaacaaatcagtaggctggtgaagcaaaaagtcaccgtccatgatcttttcaggggtagcggcgccatatagtgctgcggcaaatttaaccccagcggcgtgtgcagccttttcatcatttatcgtatcaccaacatagacggcagtttcagatgcggcatgcatttgatctaatgctgccaaaaccggctctgggtcaggtttatggcgatcggtatcattggaggtgatgacaatgtcaaacagcttggcaaaggcaaatagattggcaaaatgatgatcgtactcatcacgcagtttggaagtggcaattgcgatttgaatgtcgggactttgcgacaattttagcaaagtttctggaatgccatcaaaaacctggatacgatcctctcgttgataagccagcttaaaccattcctgctgcatttggcggcgcaatttttcatcagttacaccagcaagctttaaagcatccaatccagtaataccgaacagatcatgcttcttttgctcaacatcggcaggatctgtatgaaagccatgcttctccaaagtttcgatcattgccggcatgtacatgtcaatcgtattgatcaaggtgccatcaatgtcgaaaatatagttcttaatcataaaatcctcctgtgtacgatcataccctcaacgttcaacgtttcaattgtaccgcaaaacattttatgacaaaatattaaaaaacgcgctacctgactttgccgagataacgcgcggaaccgttataagaaatttttatttattagtgccaacaacgccgaaaccgccgtcccagccaatctgttcgctggcagccagggtcatctgcagaaaaccagttgcttccatctcccgagcccgcttgagcttaccagcatttaatacttgcagtgcactggatgccaatgctgatttaaaagtttccttagcatcttcatcatcgccggcgaccaagacagttgtcggcagctcgccgattttgccgctctgcaaagtagccgcgaaattagtgttaaaagcctttaaaatcttgctttcaggcagcagcttctggagttgttgggcagctgagctatcagcggggacgactaattcatcccaggtttcaaaattcaatggattggtgatatcaacaacgattttaccagccagttcagcttggtactgcttggcaagggccaccagtgctgggtatggtacggccataactacgatgtcgccgagttgctgagcggtatcttttgagccatagtattgaacgttgttgccagcttcagcaaagttcttgccgattgcctgacccatgttgcctttaccaaagattgtaatttccatattcttcatcctcctggttccaaagtctgttttcttgtatcgttgtagtttataataagactaaaccttacttttagtaagtaccgacttttaagttcgctacgcactaaacggtaagaatagtgagatgtcaaaggaaaaggaggaattattttggcgaaaaaattagttcaggatggcagctgcccagttgcaaccacgatttcgctgctgaacagtcaatggaagattctgatcatgcgtgaactgctgttgcatccaagtgaaagatacagtgagctgcagcatagcgttgccggcatcagccaaaagatgcttacccaaagcctgcatgagatgacagctgatggaatcgtgcagcgccaagtttttccagaagtaccgccacgtgttgagtatcgtctgaccgagctaggccaaagcatggatccaatcttaaaaaccatgcataactggggcaatcagtatctggccagtcatcccgaaaaacgcaggacgaataaacagccggaaactgattttgcacaaaaacgaccatagtcaaaaaacgctctgcttaaatctttaggcagagcgttttgattatttattgaaagtgtcagattcaacttcacgaataaagtcagccaagtgcttgtagtagacgtcagggttgtcaatcatatggtgatgacccccatttggcgtggtaaccagtttggcatttggaatttctttttccatggtcttggcagtgtccaaaggcatggtttcatgttccccaaacgtcagcagggttggcactttaatgttctttaattgatcgcggaagtgccaatctttgagcttgccggtaatcacgaactcgttatcgccctggaagacgttgtagacagccgtgccgccaaggtctttgacgtggtagagcttggatggctgtttgcggtcgacaaagttttcgttaaggacctgcacgtcggcttggtagcgatcgttgtcatagtcgttgttcttttcgcattccttcatgaaggcaacttcttcagctggcaggacgtcttcgcgaaccttgttgacatgagcaacgtattcatcgatttcatcaaccattgaggagatgatggcacccttcaagtgttgaccgtatttaacggcatattcttgaaccagcagtccgccccaactttggccaatcaagtagaaattatcgatccccagcttttgacgtacttcttcgacctcatccaagaagtattcgtaagtcaggtacttgtcggcaatcttaggatcagaatagtctggctgatcagaatacaaagagcctaattggtcatacatgtgaacctgaacgttaagtccctgcttttttaattgatcggcggcatcttcccagtattcatgattgccgccagggccaccatgcagtgcaagcagatgaatgtcaccttcaccttgcgtgttggtccataaatgataaccgttatcaagggttaaaatcgttgtaccttgtttcaaaatcgtcaactcccattctctcagatataaacgctaaataaatggtttaaaaactattttacgttttttattagatgacgtaaaccaaaaacactgccgctttggataatatgacagaaaaactatgataatttttcaaaatcaggcaaaaaaagggctgaattttcggtcatgatctgataattgatcttttcattgccgcgcagagtcatttcatagtcggtaccgcagattaccagccgcaattgatggccttttaacagtcgatggaaaacgggctgcagcggcaaggtgagatccacgaactcatttggatagagtggctccgtgatggccggatcatgggggttctgcagattgatatgaccataggagatcactttgtaaggcgtaggctcattttgcagcctgaattcgcgcagatcatcatatttccagtgatagcccagtgaaagactattacggcttaataagacaggattctcggtcagacgcttggccgatccctggtcgatcagaaacacggaaagcaggccatgatcatgatcactagcagctctcaattttacagttggcgtgccgcgcagtagataatcatcagtcagcggtgcggtctgatagctgagactgaaacgattcttctcgcttaacaatgcctctttccaatgagcaggatgagcacaccaatcttgataaatctcagtctgccattgatagtcggtaaaatcgcgagttggcgttaccaatggctctttttcactcagtttttggtggacattgagataaaatttgacactgtgatcttcatcccagttttggtaggctgtccaggtttcaggggtggcattatcttgaactaatacggctggcagcagatcatcggcatggttatcgatttcccaaagtttattagaaagccagagattcaccatatcggtaaagtctagcgagcgaaaagcattaatgtagatatgcttgccttgatgcaggatcagcttgctgttggctgcatttttcttcaaaccgtcataaagagctttgacgttgcttggcttaacgttgtcgtcgttgagcccatggaccatcataacgctggctttgatttgatcgatctgtttccgataattacgtcgttcccaaaaatcattgtagttgccggtttgacgatccattgccagattcatctgggccagatagcgattattgatctgctcaactcgccgatagtcgccaggccgcttggtacggctaaagcattcggctgccagcgtatcggcatcctcgccttgaaaaccaccggctgctctgattaggccattttcacgataatagtcataccaactggaaatggcggcttcactaatgatagctttaagtcctttaacaccagttgtagcaacggctgttgaaagtgtccccagataagaacggcctgtcatggctacattgccattgcaccaatctgccttgacagccaatccgctggtgcgatcggaaaaagccgttcggtcgccgtgcagccactcaactacagcctgcatcgattcaacctgttctggcgagccgcatgtctgcagaccatcagaatctctggttccaattccggcacagtagacagaggcgaaaccgcggggagccagatagtcgtttagcgtataggctggcgtctgactaaaggtttcagtagcttttgcggaccccttaatcatctgatgacgtggatggacattaaacgttggctcagcaggtgagacctgatctggttctttatgactcaaagcttgattaacattatgggttgcttttacgccccattcatcattggttccctggttgtatggactggcggtaaagacggcggggacttttaacccttgattggattcagcaggtcgcatgatttcaacttttaccaaatcggcttgatcgtcaaagtcagtatcaacatcggtctccacgtagacgacctcatagatgaaatcgtgcggatcaaaaacggcgagcgacttgccattaaaaaagattggcttttgattggctgacagcttgtgagtccatttcagcaaaccttgagccgtcagtgcatccagcagggtttgaccatttttggtatgagtattcaaaagatcatagaatgcggcaatcacgtctgcggtcgtccattgttcaaaatgatggtgcaaaagctgcatctgatccatcgccgccaatggatcagtaattgaaaagtcaattgctggttcaaattctaacagctgcaggccgacaagatagaaaacctcgtcattaagcggctgcttgcttgccaaccagccatccaggctcagctcaggcgttgccaaaacgtcttggcgccaacgcttcaatgccggttcagaagtgcagctgcagttgattctttccaacagcgtctgccacatttgattaggcgtaagcgtgctgctctcgcttgcttttagaagatgaatggtctggagttcatggcattgctgctcaaaaggcagactcatcatggcaaattgattgtttttcattggcaaaacctccccaaatcacgctaagcacttatgcttattaattagtgaatattttataacattctcacgttttctggggtattggacagcataattgccttaatctttattaaaagactggtcataaacgattctaaaaggaactgatcagccattattgacaaaaagagacggttttgcgaccaaatcgcagaatcgtctctttgtcttagttagacgtcaagcttcaagctacccactgctttgacgcgaacttgagcagaaccgcctggtagataggcaagcgggataatttcgatattaatgatttcaacgctggttggatccgcgccagcactgattgcattgctgactgcctcgtttttggctttttttagtacttcttctttatctttgccttcaaagctgtagattcggttaacgtcgccactgacttgtcccaaagccgcacccactgcattggctgcatcatagtggtctggacggtacactttgctgatgcccttgatctggtcgtcaaccaaaaaactaccgccaccggtgagaatcaaagggatatcaccgcttttaagcttcatttgatcaagcgagtcggcaacggtctggttgatcgcggctaatacgctgtcagcccattcctcagaaatgtcagcaaccttgtccgattgatcatgaaatgcacgattgagtctggctgcattgtcagaggcggtctcaacatctccgccaaagactttcgacttagtgacgatttcatatccgacactgtctggtccaaccgtgaaaccatcatcatttctatggatcacggtaccaccgccaataccaattgaaagaatgtctggcatacggaagttggtttctacgccgccaacctgtgctgaaagggaagattggcgtggaaagctgtttaccaaaacaccgatatcgctggtagtgccaccaacgtcaagtaccagtgcatttttaatgcctgagagatggtaggcaccacgaatgctattggtaggcccgcagccaatggtaaagatcggatatttctgagtaaactcaccagtcatcaaggttccatcattttgactgaaaaaagtttgtgctttgatgccaagtcctgctaaggcactttcaaatccatttacgatttgctcgccgattgtcatcaaagcagcatttaagattgacgcgttttctcgttcaagcatgccgatgccgccaatctgatgcgacaaagtaatcttaacgtcattgcctaggtcctctttgatccattgcgcgacttgcagttcttgagcgggatttactggtgaaaaagtccccgcgatggcaatgcttgtttttttatcttttaagttagcacagaatgcatcaacctcatcacgattcagttcggcaattttacggccatcatattcatacccgccggaaatgatagcagctttttcattaacggctgctttcagatcggcaggccattccatataagggggaatgccaactgatgccggcttgccgattcggagataagcgaccttgtccagatccttgcgctcaacgatagcattggtggatttcgtggttccaagcatggcaaaaccaatcttactcttatctacatgactttcagccagtactttagagattgcattgaagataccaccttgtacgtctttggtagtgtgtgccttaaccgtgtagataacgttcagctggtcgtccagaattgcagcatcggtattcgtaccgccaacatcaacgcctaaacgatatgccataagctatttctcctttccctgcagctcttctactggaatatagtcgacatcatagccaaagtagcgtggtcctgccgtttcgatgccaataggagtacgccattgcggatcacaagggaatgacacaaccttaacgcgtgacccgtattgcagacgctctgacgtaatcggaaaggcgctctcaatatccaaggcaacgattagatcaggaaccgaggctaagatctcatcaccctccttggcaaccagtgtttcgttttggaattcgagactgaacgttttccctcgatagttgttgagcccctcgatttgtgcggtaccaaagttaaagccctgcttggtttcgcgcgttacagcagtcactttgccgtcgtatagctcaaaaccgttgagtcgatccaatagcgctttgaagacgtcatcataatcttcttgatgcatcagaatctcgccaatctcacgagccaatgaaagagtaccgtttacgacagatcccttgacgtccttgccagctaaaaagtagtcagagacagatgctgaaccgcccatttgaacggttagggcgcgagacatgtattctgaccaataggcgttgattggcttaagcagggcaacgttgcctttttcatcgccaacggctacttgttcaggctccaggccatggaggtggaaagtttccatctgtgcttcaggaaaggctcggccaattgcatcggcatccagaattggcaagtgcagtttggccgccgcaccgactggataaagtgagttgatgccaccgacttcaattggaatgataacatcagcttttttaccaaatgcgcgttcaagttcttgcagagggttcgtcagctcaatctcagaaggcagtttctccaatgatacggttggcgctcccattccagatacgggaacgacgtattgatcgtcctgcaactcatcgattgagatcaaatttacgggaccatacttctgaatcatgctcttggcaagcaaacggccaaccttgggatcaccaccaccgccggatcctagtacagaagctccgactgagatgtagtcaatgtcttgttcggttagttctatcatggtttctcaacctccaatgtctcatctttcttattctttgtaaggtagctcagcagcagctgcatgaagaaaccaaccagaattccgtccagtggtggtatctgcgtcagcttaatgatacccaatccagttggcgcgtcagtcgttaaataagtgactacgatgccaactacccatgaagccattgaacgccacacgatcgatttaggctcttcacggttactgatgcgattgaactcttttttgatgaagtagaattcagcaatgtagataccagggaccggtgcgatgaagatacccaaaatattgagaaatggcacgaactggttgtagataccgaataccccgagcaacgtaccgattgtacccagaatcaaaaccagtgtacgaaatttgactttagtaaagatcacattgaatcctagagaagcagagtagaggttactggtgttggtaacccattgtgttaaggagaggacgatgatgcctgggatgcccatgccaatcatgatcagcattttcatcatgtccgtgctgccgagtgatttactcatgaagattgataccaaaatcataaaggagttaccaatgaacatcccgaagaaggttccgataatggagtctttttggctcttagcccaacgtgagatatctggttgggtagccgcaccgacgataaatgaagagataaccaacgcgattgcagaaccaaatggtaaagtcgcagatgtctgagtttttggcaggccatgtgtccgcagtgcgataaacagcgcaatcagcatcagtatcaagaggaacggtaccgagatttcgcttagtttggaaaaagcccgatagccataaagcgtcgtaccgaccataaaaatacccgcaataattgaaaatacccaagttggccagttgatgccaaacgcgctgataaaagctgttcttgcgttgtctgcaaagaacccgacttgcacgccaaaccagcctaacagtgaaagaccaatcattgctgaatatgcaagcgtgcctttcttgccaaagacatagcgagtaatcattgacgttgacaagttggtagccgcgccgacagaagccgtaatcgtacaaatcgttgccaaaataaacgacccgataattacagcccagattgctttaccaagaggcagtccctttgccagctgcacgcctaaaataacggcagccagatcgacgccaattgcgacccaaatggaaaacagtgatatccaggacttttgttgtgactttggaacctgcttcaaagagtagtctgaagcaaagcttttttctttttgtgccataataattccccatcccctccgaatgttaatgaatagttaaaatttaattaaaaattatataatcagtttaataaaatcgacagatattaaatgaatatttttacttgattagataatatatatacgattagttgcttgaaataagaaattttaaacgttttttgaatatttaaatcttttaatttaaaattgattcattttataaagccctagatgatgggaaaaatctctgttatttattaataaataagggaggggagacggctctatgacttgagcaacaggcaactagaaaaaagcaaaacagccccatcacggaagatttccgcaatgaggccataaatcatataggggtacaggaccttgcagttattttggggatcgtcattcatacttatggaagcatagaagggatggtttaaatctcaattcttagtatctatcattataatcatcatcataatcgtcatgatgatggtgggatagctgatctgcagtataaatgtcccatagcgtatcagatacatcatcatgatcgtccatctcttcatcttgataaggggctggcggcaatccttcttctttacgtttcttattcatctcatcaacgttatggctgtcaagatctgcgccggtgatccactcaaagaaccaaaaaataagaacaattaccagaaacataaaaaagatggcaaagacaatcgaccataactccatagcagtgataaagatgacagcgatgaacgccgtaattgcccagcgccgatgcaaaatttttttcttttcatcattgctaatcaccagtactgcctccttacttataaaatttgaattcaaccaaattatatctcatttcattaggaggagttggttgatttatgtgcatagtttcattaataatattcgtaagcgttttatttgcctttttgcaagttgaaaaatcaaggaaatacaaggcatctataaaggttactacttgtgattttgtatacaaattaatcaatcaagcgctttctttagtgataagatgaacttgttacatatttggtttgtaaatttggaggtaatgatatgactgaagaaaaacgcgttgccgtcgttactggtggagaccgtgggattggccgcggtattacggatcagctgcttaaggacggttattatgtcgtaatcgccaaccgtaatgaagaagccggcaagaaagccgttgaagaactgaacgctcaagggtacgaaggcaaggtcgtatctgtagccggcgatgcatccaagaaggaaagtcacgaacgcttcgttaagactgccgttgacaacttcggccgtctggacacgtacgtaaacaacgctggaattgctcagatcaagctgctcaaggatgaaaccgaagctgacatggatgagattttccatgtcaacgtctactcagtactgttcgggatgcaggccgctgctgctcaattccgcaagcaggacgatggcgacaagatccgcaagattatcaacgcctccagtatcgccggtcacattgcctttgacatgctgggtgcctactctgcatccaagtttgccattcgtggtttgacgcaggccgccgccaaggaacttggccgtgagcacattacggtcaacgcctactgcccaggtatcgttggcactgacatgtgggactacatcgatgaaaagatggttgaagcatggggtggtaacaagggcgactaccttaagaagtactctggcgccattacgctggggcgggttgaaacgcctgctgacgtggccaattacgtatcctggctggcatcgaccaagtccgactacatgactggtcaagccgttcaaatcgatggcgggattcaatttatctaattccagctgtttcaaactgaatattcaaaacaaaagccgcgatcctcactgggttacggctttttgaatacttaaaaagcgcgtcatgtaagctaacgcgctgattgaagactattaattctgattaagatagtcggattcgcttcttaactggctgacatagccgttaacctcatctttttgactctgagtgacgtagtagtctttttctagatttgagagggaaacggtcctgatttcaaaatgaccatccgctacgctttctgaatcactgacttcccacatcttgtaggtaacggtatcgccgttaaccttgtagtaaagaaaactggttggatcgccgtttgcggtaaggtagctgtagtcggcaaccgcgtcactgattggattctcgccggctggactgtagcagaagaaatcattgccaatatattctttgaaccagtcaggctcaaccaagagtgccagcatgacaccggtcgttttatcatctactttggctgttttggcagtactggaagctgtggtggaactgtctgagctactactcgctttttgaatctggctgtcagaatgactagactttttggatgatgacttggcggtgctgctttgggctgccgtactgcttgattctttactggatgacgattgactgccgcacgcggtcagcagaaagcatgacactaagacggaggtgataacaatggattttttcaattctcttctctccctaaaataaaattcttaccgaaaaattatttatttataatcagtttttataggataactcatcttgaatgaaaagttataaaaataataaaaacttttaaaaacataaatcaacactaaaataatcagtcagcggatgatttaccaaaccagcatgttccacgtgaaacctaatcgaattaatttgctctgaaaggcgacagataagtatctttcggcgtataattgagtttgctgtaatcgtgaaaaattcgcggaaataaaagatgaaaaggagaacatcgtgaccaatcaagtaattgaatttcggcatgtcagtaagcagtatgatgataaccttgtgctgcgcgacatcaactttacgattgaggccggtaagttctacacgctgctaggcccttcaggatcaggaaagactacgatcctgcgaattattgctggttttgacgatgctaccagtggcgacgttatttttgacggccagcgaatcaatgatattcctgctaatcaacgacaagtaaacacggtctttcaagactatgcgctttttccacatatgaacgttgctgaaaacgtagcgtttggcttaaaaatcaaacgaatccccaaagaagagattgccaagcgggtacaggatgctttgcatatggtgcagctggacggctatggcgagcgtgaaatcacagaaatgtctggtggtcagcggcagcgggttgcaattgctcgcgcgatcgtcaatcgtcctaaagtgctgctgttggatgaggcgctctctgcccttgaccataagctgcgagtggagatgcaggctgaactgcgggctttgcagcgccgcttgggaatcacctttatctttgtcacgcatgaccaaggcgaagcactggcaatgagcgaccagatctttattatcaatgatggtatgattcagcagagcggtacgccggttgatatctacgatgagccgttgaatcattttgtggctgattttattggcgagagcaatattgtccctgggattatgaaaaaagactttttggtcaatatcaatggtcatgatttcgaatgcgttgatgccggcatgaagccaaatgaaaaggtcgaagccgtcttgcgccccgaggatctggatattacgaccgttgatcagggaaagctggttgcaacggtcgatacgcagctattccggggtgttgactatcagatcatggttcatgacgaggaaggacacgaatggaagatcaattcgattcataaaacgaaagtgggtgaaaaagtcggcatcacgtttgatcccgaagacatccacatcatgcgctatcatgaaaccgaagcggcctttgatgcacggttggacagttacgaaggtgatgatgaggaggatgaacgttgaaacagcaaaaaatctggtttgtcgttccctatgcattgtggattgtactgtttgtcgtggcgccgttggtcttgattctttatcaatccttttttaacatcaacggccagttcacgtttggcaactatcagagctacctgacttccaatgtttatttaaggatgacgttcaattcggtctggtacgcgtttttgatcacgctgatcacgcttttgatcagctatccggcagcgtatgtgatcaaccggctaccgaatcgtcagttttggctgctgctggtcattttgccaacttggatcaacctgcttttgaagacctatgcctttatcggactgtttagtcaaaacggttcgatcaatcagtttttgcggtttgtcggtctgggcagccaccagattctgtttactgatgccagctttatttttgtcgcggcctacattgagatcccgtttatgattctgccaatctttaactcactggccgagatcgattcttcgttgatcaatgccagtcgtgatctgggcgccagttcttggcagacgtttatgcacgttgagctgccattgacgatgcctggggttaaggccggggtacaggcagtctttattccatcgctttccttgttcatgattacgcgtctgattggcggcaatcgtgtaattactctagggacggcaattgaagagcatttcttgacaacgcagaactggggcatgggttcaacgatcggtgtggtattgatcattgccatgttcatcgtgatgtttgcaactggtgatcggcaaaagaaaaagggaggtcgtgctaaatgaagcataaaatcaattggggcgcgatctatttagtaaccgtttttattattttatatttgccgattctttatctggttggcttttcattcagttctggcaaaacaatggaaaagtatcaaggtttttcatggacgcactatcagacgcttttgcaagatacgcgaatgattaccattgtgatcaatacgctgatcgttgccttgctgtcagcgcttttggctacgattatcggaacgatgggggcgctggcgattaagcgaaccaagaatgccatgcggaacaccctgctttcgtttaataatgttttgatggtttcaccagacgttattatcggggccagtttcttgattctgtttacggtgattggcatgaagcttggtttttggtccgttttgctcagccatattgctttttcgattccgatcgtagttttgatggttctgcccaaaatcgatgaactttcgcccactctgctggatgcagccgcggatctgggtgccagtccatggcagtcattgacaagagtaatgctgccggcaattgctcctgggatcatgtcgggatactttatggcctttacctactcactggacgactttgcggtaactttttttgtaactggcaatggtttttcgacgctgtcagttgagatctattccagggcgcggcaaggcattgacttggagatcaacgcgctttcgactttgatgttcttggtatcattggcgctggtaatcggctactactttatcagcaagcatggcggcagccgcaaaaaccaggtcgtaacggttaaagaaggtgatgtccaatgaaaaaactgcttagctttgccattggcatcctactgctgtgcggtgcgctgtttgggtgcaataagctgctgaaccaaaaagcaaacgatggcggcaacaaaaccttgacgatctataactggggcgactatattgatccccagctgattaccaagttcgagcatgagaccggctatcatatcgattatgagacttttgacagcaatgaggcgatgctgaccaagattcgccagggcggtacgcactatgacattgccgttccgagtgaatacaccattcagcggatgaaaaaagagcatctgttagagccgattgatcatcgtaagctgccgaaccttaaatatatcgatccgcagtttttaaatctgtcgtttgatcggcataatcgctattcaattccatatttctgggggacgctggggattgtctataatgatcaaaaggtgagtcgcaaagacgtctcgcattggcgccagctttggtcacctaagctcaaaaacaacatcatgatgatcgacagtgcccgtgatgcgatggcagtggcactgatcactcagcatcattccgtcaacacgaccaacgccaaggaattacgggaagccgctgataagcttgatcagctgacgcccaacatcaaggccgtgattgctgatgaaatgaagatgtacatggaacaaaacgaagcggcggttggcattacctattccggagaagccagtgagatgattgatgctaattcacatctgcattacattgtgccgagtgaaggcagcaacatctggtttgacaacatggtgattcccaaaacggctaaaaacaaaaaagcagcctatgcattcttgaatttcatgctggatcccaagaatgccgcgcaaaatgctgaatatatcggctatgcaacgccgaataaggctgccaaaaagtatctgccaaagagcgttaccagcaaccaggctttctatccgccaaaacaaacaatgaagcatctgcaggtttatcatgacttgccattaaaagacattggtacctataatgacctgttcttggaatttaagatgtttaaaaagtaactaaaaagctgaccgaaaaatttcgatcagcttttttgattgatgtttattattcagtggccagcttgctgtgacgatagccgtagccaaagtaaagtgccagaccaatcaagaaccagatgccggccccaatccaagtatcaagggaaaggaacgacatcataaacaggcaggcacagccggaaacgattggtaaaacggggaaccaaggaacgcggaagccgccttggttgccgatgtccttgcgcttacgcaatggaatgatcccaaatgaaaccaacgtaaatgccagcaacgtaccgatattaaccagatcagtcagccgatccagggaaaccagcccacccatcacggcgataatcgctgcaacgatccaaagcgagatcttcggcgtgctggtcttggcatccaacttgttcaaaaatgatggcaagagaccgtcacgactgatggagtagatcaaacgggatgaagagtagatcatggtaaacatcatggttgccatcccaatcagcgccccaattgaaagcagggcagccagccagtcttggtgaacggcctgcagtgcaaaggcaaccggattggcaacgtccagcttggtatacttaaccatacccgtcaagacgactgaaacgcccatgtaaagcacggcagcgaccaaaagcgtcccgatgattccgattggcatgttcttttgcggattcttgacttcggcagctgagcttgagatacagtcaaagcccaaaaaggcaaagaagaccgtcgttgcccccttgaagaccccatgcatcccgtatggaagaaatggctggtagttggctttcttgatgaagaaggccccaacaacgatgaaggcaacgatgattgcaatcttgatcgcgatggcaatgttgttgacccgaaccgatgaagtcattccgaatgaaagcatccaggtaatcagtaaaacgatgatgattgctacaatgttgacataggtgccatgtgcaggatcaaaaggaccagacagtgctttggggatgttgattccacagctggccagcagtgaattgaagtaggctgcccagccagttgaaactgaggcgactgccagcatgtattccaataccagcgcccaacccatgatccaaccgataaattcaccgtagaccacgttaccataagaataggcgctaccggcaaccggcatggcagaagaaaactcagcatagcacattcccgctaaagcacagacaaccgctgccgccagaaacgacagtgagacgccaggccctgcatcgttggctgccacggtcccaggtaaaataaagatccccgtcccaatgaccgcaccgatccccatggccatcaaatcgccagccgacagcgacttgacgaatttgttatcggctttgaggtagcgtgagaggctttctttacgaaaaagatttaaactcatccgaccttaaccacctttgttataatatccaatagcttaataaatttaagtgatagcttatcataggcaaagataatgagcaataattgcgaaataattattggatttaccgaacaaaataagccataatgacagtaataatcataatgtcataatcattaaaagtcaattagaaaagcattaaggaggagcttggaaatggcgattgaaaagactgcaggtgccgtagtttatcgaaataacgatcaagaaattgaatacctgctactgcaaagcacaaacgaaggtaatttttggggcttccccaaaggtcacgttgagggcgatgaaacgctcctagaaacggcgcagcgtgagattaaagaagaaaccagtctggtcctgccaattgataccagcttttctgtctacactgaatatgacctgcccaacggcaaccggaagcaaatgacgctttacacggccgcactgcctaaggatgaggatctgcatctgcaggctgaagaaattaagaatgccggttggttcaactatcaagatgctcgccaacgcttaacctatgacaacttaaaagaattgctggatcaggttaatgctcatttaacacaggcatgatggatcagcagcataaggtttttgtaattactggcgcggcgggaaccggtaaaacgacggtggccaactatctaagaaaaaaatacgatatggccaaggtaattacgcatacgacacgcttgccgcgagccaatgaaaaagatggcgtcgactattattttgagacgcgttcctcaatgcaaaagcggcatttattagaacaggttgaatatgatcatcatctatatggctcttcaattgaggggctggaaaacggctggcggcatcatcaatttgacgtgatcgttttggataccaaaggagcgttgacgtaccgagccaagttgggcgatcaggccgtcataatctttttgacggtcagccatccgcaacagctttttgagcgtctgcatatcagaggcgatcacccagatgcaattgagtcgcggatcaacagctgcgaatatcagcgtgatctgtcgctgccgcaagaattgaaaggtcaggcaattgagcttgtcaatgatgattgggcaatgacgcagcaaaaactggatcaattgctcagccgatacatttgaagataaatgtgctaaaatcataatttcaaaaaggacggatgaaaaaatgacggatcctaaagcacaagccatggcagtcttgcagaaaaatcatctgcgcgtcaccaagcagcgaaaaacgctgattgatttgttggttgccaatccggatcgctatgtcagtgttactgaggttgacaagcatatgcgccaggcatttcctggtgccagccataacacggtctatcgcaatctggaagagtttcaagagatcggcctggttgaattgagttcgcagtctggcggcatggtggttaagtatcgctgtgacgaatcgcatcaccatcactttatctgtcaacgctgcggtcgggtgcaggagattcagctgccaacgattgattgggactttttgactcagcagctgcctggcgccgagattacgggacatagctttgagctgtatggattatgtgctcagtgtcgtcagctggcttcgcattaaattcatcaattcttatttttttcgcaaactctcactggcaatttttgcgctaagatagagagcagacgacaaaaggagagaaaaaagcaatgaaaacaccaccgtttgtgacgccatttgcgctggtttcattggttttggcgttaggtgctaccaacgtggtggtcaataaaaccaccaataccagtgaaggggctaaaatcgtcagcacttcatcgactagtcagagcaccagtcaaaaagatgaccaagacagcagtcatagcagtgatcgcaaaaagccaagcagtgaaagcgatccggatgtgcaaagcagtcatcagaccaacagtgttgatgaggagtcaacgactaagacctcatcagctaaaacgaccgacaatactacggataatggtacgactggtggtaccggcactaccagctcatcggccaataccaccagtcagactactggcacgacgactgataactcgactggtaccaactcgactactggcacgacgacaaccacgactgacaccaatcaataagggggatcgcgacagtgcttagttttctagacatgatcaatcattggctgggatattttaatatcaatgccaagctgaaaaatcgaatctacattatcattgcctttttgggtgatctgtacctgatctacgttaccacgcgccttttgatcaaccatgcatgggtgcgggggctgctatactgccttgccgtgattctgatcacctattgtctgtacatcaacgcggtctactactatctagaccgcaactcacggtttgactttttgtcgccttggctttcaaagattactggggtcgttcccactgctgaggatgccaagccaaaacgcaatgctcgtgtcatcaacaatgcgccaaatggctactttactcatcaggatatcattccagctcaagtggaggttgatgagcacgagcagcataatctgcagcgcgtcgttcaagaactgttggatgacgggatctttactgcggattatgatggcttaagcgacagtcagatcgtagcagaaactgcaacgggtgagtcggtctatgcgcttgactcgcaacagacgccgccttattttgagctctaccatgacaagcatctgcggcgaattgagatatacatgggcttgaatcaaatggaaaaactggcagtcggtcatattgccaaggtcggtttgacggacattcatactgcccacgagcaatacgagctctatttagccaatctgttcgtgacaggtggaccgcataagattgccggtcgcaatggctcaacgatcttaatggatggtcagtatggcctggttgccaacgttgcctatcgcgatcgagaaaaacgctaaaagcaaaagctgttgattagtttatgctaaccaacagcttttttgatgcattgatgattttgataagacagacagtgagctattcgttgatccagtccaaaatcttaaacatggtcgcggtattttctttaggcacgggatgagcaatgatttcagccggggtctgattaagaattgatcctgctgcatagtcgccatcattgactacgatctcgcggacgttatcggccagcggctcaaagtgaaactgcagcccaacaacgcgatggccataaacaaagccctgttcttttaagccggctgatgagtagagcaactgagcgccattgggaatggtaaacatctgctgatgccagtgcagaacggtagatgcctcaggcaggtcaggaattacatcgctctttaagaagacgggagcccagccaacttctttaacgggcgcgtctttaaccgtggcgcccaaagtcattgccagctgctgtccgccaaagcaggcaccaaacattggcttgtcctgggccagcagttctttgatcaattgccgctcttttgcaatccagggcagatcatcattaggactcatcggaccgcctaagatgaccaacatgtcggtttcatcagccgtgggcagcttgttgaactgggccggatgatagacgtagatctcgtggccgcgctggtgggcccattcactgattacgccagggccttcgttgggggtgtgctgcaaaacgttgattctcattaatcgatcactccttgttttagaccctattctatagcaaaaccgacggcctgtcttgctggctgccggtttttgatatcagatttgattaaaattcaattgcgtaaacgatgcggtggtgagctggcttgccaggacgcagggtgatatcgccgaattctggatggtgaggcgtgtcagaaagcgtttgggcttccattgccagcgcacaccatgaggcacttggccggttgaattggagcgacttgtccattccattggcagtgtacattaccaaaccattgcgatctgagtacagcttcatcttgcggccgctggcagggtcagacagcgtggcaactggttcgtggttgacgttcgtgcttggttcaacctgccagatgtcatcaaagccgccttctttagtactcttcatttcattaagcgcatcgcccaaacgacgaggagtctggaaatcaaatggcgtgccggcatttacgagctttttgccagttggaatcttttcatcgttaacgtctaagtggaacttggagttaacctgtaatacttgatcttcaacggttgctgcgtcagaatcgccaaggttgaagtaggtgtggacggttgggttgaacagcgtgttggcatccgtttcgccatccagatcgattacgacacggttgtcattgctcagtgagtaggtaaccgtaactttctcattgcctgggaaagagtcgatttcaggcgtcatggtcttggttaagacgactttaacggtgtttggcatcgtaacggtttcggcttcaaagaactggttgcctaaaccattcgggccaccatgaagcgtattaccgttttcattagtgtcgacgtgatactcctgaccatcgattgtaaactcgcccttagccagacgtccggcaacacggccaatcactcggttgttgcacatgccgttgtcagtaaagtgctcaatgtcggctgcgcttaaaaccaggttgacgcgcttgccgtctttgcctggaaccgagatttcctgtaacagaccggcatagtttaaaacgctgacctgcatgtcctgatcgttgataagcgtgtattttttgacttcttgtccttcaaaagtaccgaaactgctttctttaatttccataattaaatccacctcttaaaagcaaacgttttcataaaaagattgtaccatattacgctagtttgtgattaaaaataccaaaaataagacaaatcaagaaaacatattaattgaactgtcttttaaaagaactataatactaagaaagatgttttgtatcataaagcaacgttttataatctaagtataatctcaaaatagaaaggccgattttaatgaaaatgaatcgaacagttcgagatttccaaaatgctctggaaagcttattaaagactcaccagtttggacatttgacaatcgatcaaatttgtaatgaggcactgttgcatcgaagcagcttttatcgttactttcatgataagtatgatctgctggaacagacgatcagtacgcgcttgaacatcttgattgatcagtcagatcgcaatgaggatgaatttgttgaaatcttgatcaagtatgtcagcgacaatcgtgacatcttccgcaatctagccgatagcagctcgcaaagctctttgtacggcgagattatgaagatcgtcagtgagattctgctgcggcagcgtcatgatcctgaaaatcaggacacgatcgttacggctttgcgaaactcaaagaacccagaaatgctggcttatattttgagtggttcgattctgggggccttttattggtggcggcaaaataactatgaggttccgcagcaagacgtcattgattttgttaagcagtcaatgcacaatctttcggatcgattggaacacgatggtttaaactaaatgtttcaagaaaaaaatctgacatcgatgcagtcgatgccagatttttttaatttttaatgacgtagcgttcaaagcgggcaaaatcttgcggtgacatctcgactttgagccgcgtaccgttgttgagatattccgcctctaagatattgcagttttcattgatgtaggaaaccgttcgtccatcggcaaatggaatcagcagctcggtctgtacgtagtctttgaaaagatgacgacgcaaggcctggaccaagagctgaatagattcatcatccttggctgagataataatccggttatcgccttccatgactggatattcaaactcggtctggtcagctttattaaagacatacagcattgggatgttttcaatgccaatctgtttgagcgtcttttcggtcgtgcgcatcatggcttcataattagggtcggaatagtcgattacctggatgagcagatcagcactggcagcttccgccaaggttgatttaaaggcttcgatcagatgagtaggcagtttgctgacaaaaccaaccgtatcactgagcaaaaagcgtttttgatcgggcagcgttaattgacgcacgctggtatccagagtggcaaaaagcatgttcttttcaaaaacctgcttttcttcagaaaccccgaaacgactgaccagctgattcataatggtcgatttgccggcattggtatagccaaccaaggcagctgttggcgtatcgcttttttctcgcttagcccgtttaacatcctcagatttggcgatttctttgagttcagcccgcaaatgactgattttatggttgatggtccgccgattcatttccagcttggtttcaccggcaccacggttggtaaagccagatccgccaccagtctgctggtcaagccgctgattggcagccgtctgcagacgcggcaattggtactgaagctgggcaatctcgacttgaatcttggcttcacgactttgcgcgcgcttggcaaagatttccagaatcaaggcagtccggtccaaaatccggacaccggtttgatcagctaggttctgcagttgacttggcgtcagctcgtcattggcgattaccgtagcgacttcttcagcctcggccaggtgacgcagctcttctactttaccggagccaaagtaggtcgctggattaggccgatccaaggcttggtctaaacgatcaatgacttccatttggttggcttcggccagggctgccaattcttccatggaatactcataatcttcctggtccatgttaaggccaatgataattactggttccgcactttgtatattagtgtccattaacagaaagttcccccttttagcaaggttttattcaggcaagctcagttgattgtaaaagacgatctcggtttgatctggggtcaaggaaagttttgtgatactgccattgacgggggcatcgttggccagggtcttgtctttggcatagcggctgacgattgagcgaatggctgcaccatgagaaacaacgacggcggtactgccatcgggaagattgcgcagccggtccaaacctttgtccatgcgctgccagaattcagcatcgttttcagccagatggaatgggtcagcagctttggtgatatcgcgcgtcttttcaacagaatacttgctgaccagctcgtcataggaacggcaaagaccaatgttcatggaagccgcagccgtgtcctcgccttcaaaaaagccgaaaaagacttcccgaaaggctggatctggctctggatgaacgatcttggtaggatggctggctgctagcagttctgcggttttaactgtccgtcgcatatcgctgcagaaaagatagtcaaagtcgatcttggccaaagccttgcccacgcgcttgccgtcttcaatacctttttcggtcagcggtgcatctgaccagccttgatatttgtggaacaggttcaagtaggtctgaccgtgtcgaacgaaataaacatttactgccaagggaaaaaacctccattattctgtacgttgtctagtattcagtttaccattattccagggtaaattgtacgaaattgcgttagaggttgcgttcaataatatgccggcggatccgtttaatgagattgaaaaagacggctggcaaagatccgcagatgaccagacccagcagcagcgttgaaaaatgggcctgtacaaatggaatgctgccaagataatatcccgccagcgcgccggagactacccagatggccacgcccaagacattgccaagcataaagcggccaaagcggtatttggcgatgccggaaatcagcgggacaaaggtgcggatcagcgggacgaaacgcccaaagatgatcgcacgcaaaccatatctgctgaaaaacagctgggctttcgccatagtcggaccagccagccgccgcttgagccagggccatttgatcaagcgggtaccgatcagatagttaagcgtgtcgcccagcacggccgcgataaaaaagccgggtactaaaatactcatcttgacctcggcaccgtgcaaagcagcaaacgaagacgtgacaaaaatcagcgactgtcccggcagccaaggaaaaacaaccagaccagtctccataaagatcaggctaaataatatgacgtaggtccagctgcccagtgaattgaacaaagggaggaccacttgaggaatatgcgtcaaagcatacaagaacttagccattgcttccaccttcaaatcagcttttgagatcattctagtattttgtgaccatctaaaccagactgatggcgataagttaagcaaaccttatgcagacaagtcttaataacggaatcgcggcgcaaaaaatgttataattctaagattagattttcaagacaggaaggatgttcgagtttgacagaatcaatccaacaatacgaacagcatcatttggagcaggtcgttaaagaagttcgcaaggctgaggaaaaagccagcggcacgattgaaaacgccaaacgggatgtgaagggcctgagcaagcagttcaatgatatccacatgaataccacgacttattcggggatgatggatacggccatgtcggttcgcgcccagcagcagatgcttgatgaacgagaaaacagctggcagcatgccgccgatcgtttgagtacgctgaagcgcttggaagccaaaccgtattttgcccgtatcgattttttggaaaaaggtgcgcaaaaacctgaaaccatttatattggcctggcctcgttctctgatcgtccggaccactttctggtatatgactggcgggcaccgatctcttcaatctattatgatggcaagctgggaccggtcacttatgaaacccccgttggcaagcaggaggtcgatgtcagactcaagcgccagttccagatcgaggatggcacgatcgtcacgctttatgataccgatgaggccgtaaccgatcagatgctgctgagtgccttgggaacccattccagcaccaagatgaagagtatcgtaacgacgattcaaaaaacgcaaaacgaaatcattcgggatgccaaagatgagttgctgtttgttcaaggagcggctggttctggtaagacggctgccgttttacagcgcgtggcttggctgctgtatcgttatcgcggcaatctgacggccagccaggtggttttgttcagccccaaccaactgttcaacgactatattgatcaggtgctgccagaactgggcgagcacaatatggttcaaatgacctacttccaatacgttaatcggcgggtgccaagactgcacgttcagacgctccagcagcgctttgaaagcagtcaggcagcagtcgatcaaaacatcaatcgcctattgacgagcttaagcagctttaaagcagttggtgcctatgccaaggcgcttggacagcggggcctgcgctttcggaatctgatgtttcatggcaagccgttttttaccaaggaacaaatcaagacgatctattactcattcaatcgcaactataacctgggcaatcgtctggatgcgaccaaagatgcgctggatcatcagctgagaagccgagttggcggggccatgcgctcaaaatgggcagaagcagccgtccaaagtctcagcaaagagcagatggacgcgatgatgaacaatcggccgcgcgagtttgaatcaaacaagcaggaatacaacttctatgccaagcagatcgttttaaaggagttcgcgccgattcatcgagcaattcgtcataacatgtggatcaacatcaatgcacagtatctgctgtttttaaaggccttgccaaagatgattgatctgcagaagtttgatttgaccgagcagcagtggttggcatttatcgaaaaaaccacgcaggatctgaaagaacggcagatcagtgctgccggcatctcaatctatctctatttgtatgatctgctgacgggtaagcgcggcgaacgtgatattcgctatgtctttgtcgatgaggttcaagactatgacgccttccagctggcctatcttaagttcagtttccccaatgcccgctttacgctgctgggagaccttaaccaggcaatctttacgggcgccaacagtcggcaattgctgcggcagctgggtacgatgtttgatcccgaaaagacgaaagtagtacagctgaccaagtcatatcgctcaactaaacagattaccgattttaccaagcatattctcaaagatggcgaaaaaatcgaggcctttgagcgtcaaggcaagcggccaagcatctaccagctgacaaatctaaacgatgccgtcgcacaggtcgtcgcggttctaaaagactatcaagaacagcatgatgcagttgccattatcggtaagaccctggctgacagtgaacagatctatcagctgctggctgagcagggcgttaaggcaaccttgatccgcactgaaaatcagcggctggttgatggtgtgctggtcgtaccttcatacctggccaaagggcttgagtttgacgcggtaatcgtctgggatgccaacgaccaaaagtatcatggcgacagtgagcggcagctgctttacacgatctgttcacgggcgatgcatgatttgacgatcgtcagcgtggggcaggccagtcagctgtttgccgatgtgccgagtcatgagtatgaactgacggatcgtttatcataaaatcttcaaatttaatgatgatcaggcaggcttgtaaacaccaatcagttaagtcggctgcagtcaatcaagctgagatgcaaaaaaattccaaacatttgttaaaaaacgttgaataatcgtaacgactagggatcttttattgtatgatacctaatgttgatattttttgatggaggaaagattatgaaaacagcgttgcagaaggtaaggcgtggcttgaacaccaagctgggcttctttcttctcacggtgctcttgtttgcgattaagagttactgggcttataaaaccaagttcaacttggggatttccgacagtatgcagcagtttttgctggcgtttaacaccttgcctggggctctggtctttttaggcatcgcgctttatttccgcggtcgactttcatactggctgatgatcttaattaattttctgctttcgacctggctgtttgccaatattctctattaccgagaattttccgactttattacctttaacatcatcaaaggttctggagcggcatcaaacaacctgggcaagagtctgatgggtatcattaagccaaccgactttttggtttacgctgatgtgatcatcttgatcgttctgctggctgcgcattttattcggattgatatgcgttactttaaggttcgctatgcaatgacgattacgatgattggcttcgtgctgtttggtgctaacctggccatggcagaaaaggatcgcccgcagctgttgacgcggacttttgacaacaactacatcgtcaaatacttgggactgcaggcttatacgatctatgatggcgtcaagaccacccataacagtgcggttaaggctaaggccaacagcaatgacatcaagccagtcttgaagttcttaaagaaaaactatgcttcgccaaatattgaatattatgggcaggcaaaaggcaaaaacatcatcatcatccacttggaaagcttccagcagtttatgattgattacaagtggaaaggtgaagaggttacgccaaacttaaacaagctttaccatgccagcgatacgatttcgtttgacaacttcttcaaccaggttggtcaagggaagacagccgatgcagaattgatgctggaaaactcgctgtatggtctgccagaaggttcggccatggttactgacgggacgaccaacacgttccagtcggcgccagctctgttggaacaaaagctgggctacactacggcctcattccatggtgacgtacctagtttctggaaccgtgacaatgcctacaagagctttggctaccagtacttctttagcaaggactatctgccaaaggttaaggatgaggacatgggttatggggtcaaagacaagctgttcttaaaggaatccgcatactatctggaacagctgccacagccattctatgctaagctgattacggtctcgaaccactatccttacatcattgacaagaaaaatacttcaatcaagtcatggaataccggtgacagtacggttgatcattatgtccagactgcgcgctacctggatgaatcagttggcgaactgctcaactacctggattcaaccggtctgcgcaagaatacgatgctggttctgtatggtgaccattatggaatctccaacaaccacaaggcagctattgctcagatcttgggtaagaagtcagtcgacaattatgacttggcaatgttccagaaagtaccgttcatgatcaacatggaaggcttaaagggcggcgtcaaccatacttatggtggtgaaatcgacgttctgccaaccattgaggatctattgggcatcagttccaataaatacgttcagtttggtcaagacctgctttctaagaaccgcaaccagatcgtgccatttagaaatggtgactgggtaaccaacaagtacaccaagtacaatggggattactactacaccagcagcggcaaggagatcaagtcgccaaccaaggcccagaaagccgagtttgccaagattcaaaagtatgtcacgacggatcttggtctgtctgataaagtcgtcaatggcgacctgctgcgtttctacaaactgaaaggctttaagacagtcaacaagaagagctactcgtacacgctgaagaatggcttgaaacagcttaaacaggcgcaaaagaagagcaagaccagcttgaagagtcaaaacaacaaccaatcaacgctggatcaatacacgaccgatgcacctgaattaaaaggcgtcacgctgaagttcccgactaaataatccaaaagctcagtcgcttaaacggctgagcttttttaatgaggcacggctgatatgctggtctggacgcaaaacgatggctgcagcagaacagatcattacgacaggtgcgaatagctgttgctctgctctgtttaccaaaaggctgctggaacagggacggtactgtaatattagctataccgtgccagaagcgaagagattacgatttattttgcatttgcgaacgttttcacacatagcgatcgtttgtgataaaattaaaaaagaaatttgacaaaaaggatcaaaagaacatggatgaatggctgaattatgatcgctttgatcgtgaaacctggcatagttttttcccctatggcaaaactttcttaacccaggaaaatcttgaggatattaagtcgctcaatgaccagatttcgctaacggatgtacgtgaggtctacctgcctttgattaagctgattcagctgcagtatcaaaactacttgcagatgcagctgcagaagatgacttttttgcgtaagccgatgcggcgaattccctatattatcggcattgctggttcagttgcggtgggcaagagtacttccgcgcgcctgctgcagattctgctaaagcgtctgatgccggataaacaggttgagctgattacaactgatggctttatctatcccaatcgtgagttggaaaagcgaggaatcatggcgcgcaaaggattcccggaaagctatgatatggaaaagctattgacgtttttaaatgacgtcaatgccggcaaggattacgtacaggcaccgatttattcgcacagtgtctatgatattgttccggacgagtaccaggtaattgagaaaccagacgtcttaatcgttgaaggaattaacgtcttgcaactgccaactacgcagcgaatctacgtcagcgacttttttgattttgcggtttatattgatgccgaacccgaattgattgaacaatggtacttagaacgattcggcatgcttctggatacggcttttcaagatccaagcaattattactatccttacaccaagggcaatcgtcaacaagcttttgcgatggctcggaaagtgtgggatacggtcgacttgccaaatctgcgcgactatatcctgccaacgcgcaatcgggccgatgtgattctgcataaagccgaaaaccaccatattgatcggatttatctgcgagaagactaaggaacgttacccaagtcatgatggcaattgtcagcagtattgcttagtgatgttgggatcttgctgacaaagctttctggcggggaatagcgatgactttttggaaacctggcaatgtgagacggttaaggtaagccggtcttgtgaagaaaatggtcccctaagctgctatggggcttgaaactacctactattccttgatttttcgcataatttggtccaatcaatgcttagcaacgatttttacgctcattgtcagctgaatctacaagaaaaagcgctccaacaagcctgcttgctggggcgctgtgttttggtcggggattttgcgataccgtgactggttatcaagagtacggccgtagtagtctattgtgtttttgcaatgccgcgactggattacttaagacttttaaagctggcagtaaaatagatggtgtcgtctttccagtcaacgcttaggctgcctttgaagtttttgaccaggttttgggcgattgaaagaccaatcccaaacccagatcttttttcattgttatgagaggtgtcattacggtagaatcgctcaaagaacttattgtagtcaacgtttttgccctctgcataactgttgccgactttgagcagcacgtttttgccatgtttgtcggcactgacgtcaacgaagatcgtaccattaggatcacagtatttattggcattatccaatagaatgctgatcagctcgtagtagtaattgggatcagctttaagcttgaggccaggctgcagttgatatttaagctgatgattggactgagcgataacggccttgaagttgtcgatggctttttgcacttcagtcgctggatcaatttcctgcagctgcagttcggggcgctcatccagcttggctaatgagatcatcagattgatcaggtgcgtcagtcgctgaacctgctgcttgttgctttgagtccattcgctttcgccgttcatcatttcttccagttcggtgttggcggaaatgatggaaagcggggtttttagctcgtggccagcattagtgataaattctttttgccgcttttcagcttcgataaccggcttgatggctcgcttggatgacatgatcagcacgaactcaaagagaatcagactgatgatgcctaaaacgattccggaaagcatcaagtcatgcgtattcttgaaaatcatcgattggtccaaaaagacgatgccaatctgaccatttttcttcttgaccatcttataggcatagctggtcccttgatagcggataataccgcgcgttcgctcacgctgctgaacggtttttgccagatcggcaattgcatctggcgagaccgttaagatatgagagttgtcaatcttgatgctcttgccgtccttgctgatattggcgctaaaatagcggtattggaacagctcttcacgattaaaacgagagcccagccgctttttggccgcctcattggcatttttagtggaaagctggccgttgtgctgagaaagcagggtcaaaatgtcgttggtttcacgatgggcatgaatgctgaagaccgaaaccatgctgccaataatcgtaatcaagacgattaccaaggctgccgtagaaatagcaatgaatttgttgcggagtctttgaatcattggcgtacctcctttttaagctggctgacttaactgataaggacctcctttttgaccatcgataatggtgcttgatcctactgcctgcagtttttgtctaagatatgagatatagatccatacgtcttcggcatcggcattttcgtcgcgatcccaagcctggttcaacagctgctgcgtagagagctctttgtcggcatttagaatgaaatagctgagcagacgcgtttcctttcctgaaagactcattgagttgtgacttgccaagcgctgttcagcctgatcgactttaagatcgccaaacgccagtacgtcgctgtcgtattcttcagtccggcgttccaatgagcgcagccgcgccaacagttctttgagtgagaatggcttggtcagatagtcgtcggctccggcatcaagaccggttactttgtcatcgatttcagccatggcggtcagcataatgacgtaggtgcgatcaccggttgcgcgaatttctttaagggcctccaaaccggttttaacaggcatcataatatcaaagatcatgacgtcataggcattggcctgggcatgcttaacggcttcttgaccattaaaaaccggatcgacatcatagccgacgctcttcattgccatgatcaatacgcgggaaagctgtttttcatcttcagcaagcagaattttcatgaaaaaatccccctaatcattttcgtggataagttgacggatcgtctgcatctggacatcgcaggcagccagctgatcggcacagcggcgcagttccttgccgatgcgttccggattgtcaatgtcgtgcttatatttcatctcgtgttccaggctggcccaggaatccattgcgatcgtgcgcagctggatttcgacaaaataatgaccgggtgtctggccatcaatatcctggtatggcgtcacaacgtctaagatcaagtggtagctgcggtagccgtttggtttggcattggcaatgtagtctttttccttgacgatggtgcaccagtcggcatcacgcaaaagatcgatgcagcggtagacgtcgtcgatgaagttgcagaccacgcgaataccaaccgcgtcgcgacatttgcgcagggctgactccggtgttgctgggtagcctttgcgctggcatttttcagtcatgctgtcgttggccttaactcgaccaatcaagtgctcatacagcttgggatgaccgttggcaacctgggtgctgcttaactgtttgatccgatcgagcacgtcgtttaaaatcagtggcagattatcggcgcacggaccgtagatttccatttccatcattcctcaattctataaaacgtattgctgatattaattaatgttaacgcaaaataagacttaacttaagaaataaaactgaagaattactaaaataaagcttaagaaattattcacttagcctcagtcagtttgcatcgactgaggcttgattaacgattgccagttcggatattaagcgtttgctgacttaacagccggctgattttaaattaatcgtccgtaaatatggtatgagaattctaatttaacgaaatatgttaggcaaaccagggtataaaatcatcttgaggattgaccttgttcggttttacccgtaaaatagcctttagatttaaaaacaatgatcttttacaaaaggagtggaaactaagtggctaacgtcaatcttgatgcattcgacaagatcctcgtgctcgacttcggtagtcagtacaaccagctgattacgcgccgggttcgtgattttggcatctattccgaattgctctcccacaagctgagcgctgaagaaatcaaagagatgcatcccaaaggcatcattttctctgggggccccaacagtgtctatgcaaaggacgcctttaaggtcgatccagaaatctacaagttgggtattccaattttagggatctgctacggcatgcagctgatgtcttatgatctgggcggcaaagttgagccggccgacgattctgaatatggccgagctgatattgaagttatcgatgacgacgcggtaatgttcaagggcttgccaaagaagcaatatgtctggatgagccatggcgatcgcgtcgttgaggcaccagaaggctttaaggtcgttgctaccagcaagaactgcccaatctcagccatcgccaacgacgaaaagaagctttacggcattcagttccatgccgaggtccgcaacagtcagtatggtctggatattctgaagaagtttgcctttgacgtttgtggggcaaaagcaaactggtcaatggacgactttatcgacatgcaggttgaaagcatccgtaaagaagtcggcgacaaaaaggttatcctgggcctttccggcggggttgactccagcgttacggctgttttgatccacaaggcaattggcgaccagctgacctgcatctttgttgatcacggcctgctgcgcaagaacgaggctgatgaggtaatgaacgccttgagccgcgacctgggcgtcaagatcgtcaaggttgatgccgctgatcgcttcttgggcaagctgaagggtgtttctgatccagaacaaaagcggaagatcattggcaaggaattcgtggaagtctttaacgaagaagccaagaagatgaaggatgccgaatacctggcacaaggtacgctctacaccgacgttatcgaatccgggaccgacacggcgcaaaccatcaagtcgcatcataatgtcggtggcctgccaaagaagcttggctttaagctgatcgagccattgcgcagcctgtttaaggatgagactcgtgaactgggcgaaaagcttggtattccgcatgatctggtttggcgtcagccattcccaggtcctggtctggggattcgggtcttgggtgagatcacgcctgaaaagctggaaatcgtgcgagaaagtgacgcgatcctgcgtgaagagatcaagaaggctggtctggatgaagaaatctggcaatactttacggtgctgcctggcattcgttccgtcggcgtaatgggtgacggtcggacctacgactacgcggttggtatccgcgccgtaaccagtatcgatgggatgacggctgactttgccaagattccatgggacgtcttgcaaaagatttcggttcgcatcgtaaatgaggttgatcacgttaaccggattctttacgatgtcacgagtaagccgccttcgacaattgagtgggaatagggattgattaaagagaaaagccgatataacggtatttctggtaaccaaccctaaccaaaatcaaagccccgtgattcactaaaacgtggatcatggggctttttctgttgactttttagtagggaagcagataaaacgattccaaaattatggataagatcttatggccagctcgtcttttgaaacgaaatgatcattggtttgggaatggtgatgattaaaaaacatcctgaacgcccaagccagccagctcagcagtgaaataacgattaagaaattgagccataatggagcagcatagcttaaataggcagtgttttgccccggctgctgaatgactgtcgatgagccaaccaaagaacacttaaaacgggtcagctttttgccgttgatgatcagccgcgattgacggtaggtaacgattggcagctgaattctgccgcttttatcagcctgccaagtcagctttaagcgcccatgactgacagcttggatcttgatacttgatttttggtcgacgactgaagcgccatagctgtaagcggcctgcatagcgtcaacgttggctttggcagtggccagatagtcgggaacgcgtttttgcagctgttttaaaaatgtttggtagttgctggtatgcatggcttttaagacgttttgccgggccttttgatgatggttgactctgcaattatagctggaaattttgaaacaaatgcgaacgttgtcgggcttttcgattaactttgacgcaaactgcctaactaaaggtgttggctggttatgctaaaatggttttagatctttaaggacaggtagataaaaatgcataacttaatttttctggatgacctgaatggcgcggatttggatccatatgtacggttgaatgaagcccagctgtttcacgcattggagcctgacccgggactttttatcgcagaaagtcccaaggtaatcgagcgggccctgcgcgctggctatcaaccggcttcgcttttagtggaagaaaaggccttgacgcgtgatttagcagatctggatcatgaaatggcggctaatcagaccagcggcttaggacagacgccaatttacgttgccaatagcaaactgcttcgtcagctgccgggctataatcttttgcggggcgcactggcagcgatgcatcgcgtcaagcgtctggagctggctgattttttagcgaccatgccggctgagcatccccgtattgccgtgctcgagagcgtggtcaatccagccaatattggtgcgattttccggtcagcggcggcgttgggcattgatggcgtcatcgtgaccagcgactcggcggatcctttttatcgccggtcttcgcgcgtggcgatgggaaccgtttttcaagtaccttggacttatgttgacgccaaaacctggcagcatgctggtattgatctgcttcatcaggccggctatcagacggcagccatggcattgcggcataataccgtcagcattgacgatcccaagctgactgcagtggaccgcctggcgattatcatgggttcagaaggtccaggactaaaagaggcaacgatcgagcaaagcgacttcacgatcaagattccaatggctcccggagtcgattctttaaacgttgcggccgcctcagccctggcattttgggaactgggcaatcgggttgccgaatagcagcattcaaaaaacgcccattcacgaatgggcgttttgagtttacagatcaataatttgatagtcgaatccttgagctttgatgaatttcatcagatcggccgctgaaagaaagatcgtatgcgtattgatattgggatggaacgttaatggaatgttttcagccagcatgtcttgatcaaagtagatctgaatgttgtgagccgcgttgttcataatgccaaatggcgaaacgatgccggcctcaagccccagctgatcttcaatgtcactgtcatgagccattgagatgcgcttagtgccggtaagctcttgaaactccttaaagtccatgcgcttggcatcgtccatgatcaccaggtagaagtttttcttcttatcctttagaaacatcgatttggtgcggacgccgattttaccagcaatataggcatcggcttctgcagtggtcttagcggcgggatggtccaccatttcgtacttgatgtccagtttttgcagctcgtcaagcagttcttggtaggcgattgcagaacctttagtcatttgattcacctcttgaatatttattaccatcataatcaaagcaagaaagcgtttcaacaaaaaacagtcacggttgaggaccatgactgtttttcagtttagatgatgtcgatgaatcgcggcagctagtcagccagcttaccgactactttcagcttgcccaagacgctttcgccatgaggagcatgagcaatagccgcggtggcatcagtgccggccgtaacgccatggtgcttgccgccttgccatgctgacacttcagttacgtcgtagaccgtgcctttaacggcaacataggccggctgaccgttttgaccattgaactgctttaattcggctaaagtaaatgttttttccatttgctgattcctccttaatgagaaaacgattgtagcttgataactgaattgtacaagagctgatggaaaaaagccaaataactgcccctaaataaatattaaattttggcaaagcgactgattggctgccaggcggcttttaagatcacccaggctaacaggccgccaacgatggcactgactgcaaagctggggacgaataagaaaagtgatcccttggcactcatcagcaaagcagcgattggataggagaccagcgcgccaatcaaacctgtaccgatcaattcgcccaaagccgccagccatatcttgccaaaccgcttaaacagccagccgctcagccaggcgccaaagatgctgccgggataggccaaaagcgtccccgtgcctaaaagattgcgcacggttgaggtcaaaagcgcctgcacgactgcccattccggccccaagaccacgccagcaacaatattgatcagactttgcgttggcgcgcatttggccacgccgatgggaaacgagaacatgctgccgccacaaacggccagtgccgacaagacagcggtcagcaccagctgataggtccgttttttcataagattcctcctaaaaacgttttaaaatcgcctcaaaccaataaaaaaactctttcccagtgccgagaaagagtgcttaatcattaatcaaaagaacgtgacgatgcggccacgccaaattaagctgtctccctccgctagtcctaactagatcaggttatgtgggtatctctcagccaaatcaatggcaccccagacagagtcattttatttcaactaccatttaaccaccgcatcgccgggattgacaagcgatgatgatactaaattcattagtcgctagataaagtatttaagtaatttttaaaataatgattgccttttaagaaaaatttggtattatctagttaatcacttaagtaactaactaaaacatctgttgcttttagtacatttgtcgcattcaaacggatttttgagaagtagaaactggggaagattatgcaaaaaataaagcattgggtaaaaaatcaccgcaagacaacgatcggcacggcaatcgttttggttttggtgattggaatggggatcatcaataaaatcaagcagaacaaggcagcgcagtcttcacgctatgtcgttgccaaggttgccaaaacgacgcctttgacgctgaccgggaccgttgccgcccaacagcagcaggttttgagtctgccatccggcaaggtgcagtcgatcggggttgccaacggacaaaaggtcagtgagggtgatcctttggtaacgacctacagcgagagtgccaatgaagaactggccgatgccaaacaggaactggccaaggcacagcgcaacgtaacggcacagcaaaacaatgtcagtgtggcgcaaaaggatgcggcggcgcaaagcgaggatggcacggcttctggatcggccagcagcgttgcccaggcccaagccagtctggccgatgcgcaaagcgacgttacggcagctcaaaacaaggtcaacacgctgagtcaaaaggtcacccagactttaacggcaccatttgacggtacggtcacggtagacgacactaagcaggacgcaccggtaatcacgatctattccaacgatctgaagtttaagagcaaggtatcggaatataactacagcaagcttaaaaccggtcaggagattcatgtgcgggcactggcaacgggcaaacaggccgatacgacgatcagctacctggccacggtgccgaccacgaactcgcaaagcaacggtgccagctacgaggttgacgccgacttgagcagcaaagactttatggatgggcagacggtcaaggcttcagttgcgcaaaaccagctgcggattccaaagtccagcgttaaaaatgggcaggtctacgtcgttaaaaacggtaaggccaaggcagttgccgttagcggtaagcgggtcaacgaatactttgaagtcaaaagcggcgtcaaggctggtcagcagatcgtcaccaacccagacagcaagctgcataacgggaccaaggtgagcgctgatgacaatgattagactggaacacgtcaacaagtactatggtcagggtgcgactcgatttcacgtgctgcatgatatcaatctgcaggttgatgccggtgaattgatggcgattatcggggaatcagggtctggcaagtcgaccttgatcaatatcatcggttttttggatgatgattttgaaggaaactatttttacaatgaccaggcgatccatgactatacgcgggcggattttgccaagctgcgcaaccagcacgtggggtttgtctttcaaaactttaagctgattcgcgacatcagtattgccgaaaacgtcattctgcctctgctgtacgctggagtaggtcggcggcaggcaaaaaaaacggcggcccgagttttgagtcgcgttggtctaggagggtatgatgataagctgcccactgagctttcgggtggtcagcagcagcgggtctcaatcgcgcgcgccatcattgccaatcctgatttcttgattgccgatgagccaacgggggctttggacactaaaaccagtcaggaaatcatggacctgtttaagcagctcaatcagactcagcatacgaccatcatcatggtgacgcatgatccacgggttgccgaacagtgcgagcgcgtcgtcaagatcattgatggccgaattgtcgacgatcgaaaggcgggaggaaattgagaaatgccgaactcttgcgcagtgctctgcaatcgctaagagccaaccccaagcgtagttttctgacgacgattgggattacgattgggattgcggcggtaattacgattctggcactgggaaatggggtcaagaaaaggctcagcgacgagtttaatacgactcaaaacggcgagcagtatacctatctttactttacgcccaacgattcgcagtcggcagcttccggatttaccgaaacggacttaaacgcgattgaggaacgatttggcgctaaggtgaaaaaagccgcaatctcgcatgaaaccaacaatgcttccgtctcgccgctggttggcaatgagcgggtcaacaacgccacgatttcgctgtttaagcggccaaccagcaagatttccattatagcgggccgcaatcttacgaccaatgagcttttgactgaagaaccggttattctgatgaaagagtcgctggctaaaaagcagtatcagacggttcaaaatgcagtcggcacttctgtttcaattggggatcacgactatcgcgtggtcggggtgtatcgctcacaggccaacacctataatgacaacaagtacggcgccgatctgattggcggcaccaagctgttttattcggggactacggcgacaaccggctatggcattaagctgaccttttatcaaggcgccaatgccggcaaggttaccaaaaagatcaagaaatacatggaaaagaagggaaccaacgctcacgatggtacctacatggcagtcgatgccggcgcggaactgaccaaagtcaacaacatgattaccggtttgacggcctttatcagtgccattgcggggatctcgctgtttatcgctgggattggggtcatgaacatgatgtacatctcggtttcggagcgaacgcaggaaatcgggattcggctggccgttggggccgcgccgcaaaacgtgatggcccagttcttgttagaagccatcgtcttaacggtcggcggtgggttgctgggctttgtcatcggctggctgctggcgggcataatcagtaatttcatgccttaccacattcatgccgtcataaccttgaattcgttcctgctggcatttggggtctcagcttcagtcgggatcatctttgggatcttgccggctaaacaggctgccaacaaaaacctgatcgagattctgcgttagtcaatcttcattaaaaagcggcagtttaaagaaaatatttaaggcacgttgtcaagcttgaacttgaacagcgtgcctttttggcttgagttgatggaattaattttcttgacgatggtaattgccaagcagccgcagtgaggtcgtatagtttttcagttcggccaaagtttcggtaatccgcgggtcagccagattgctatctaggtcaacatagaaatagtattcccaggggttgcccagcaaaggccgcgattcgatccgcaccatgttgatagcatgctctttaatgacgcgcataacttcatagagcgtgccaacctcatttttcaaggtaaaaatcaatgaaatccgatcagcatccggcaagacttctggtgcgcggccaaaaatgataaaacgcgtgtgattagacttatcgttttcgatgctgggtgccaaaacgtccagatcatataatttggctgcttcagtcgaggcaatcgcgccaactgccggatcctgcctttcagcggccattttagctgccagtgccgtattgaggcattctttaccttgaatctggtgcgcggctaaaaactggctggtctgcaaaaggccctggggatgcgaatagacttccttgatgtcattgagtttggctcctttaacgcccaataggttttgggcaatgtagatggactgctcgccaacgataaagaaatgatacttgttgatcagatcgtagttgtcattgatggcaccggttgaggaattttccattgggacgacgccatagtcgattgcgccgttttgcagtgccaaaaaaacgtcttcaaacttaggatagttgcgactttcgacctggccaaaccattgatgcatggcctgagaagagaatgatcccgggacgccttgatagccaacggtgaccccggttcgctgcggttgtgcaatcatagataattcctccgtgatctaaaaaatttcttctaatcttagctgattgtctaaattatgacaaccattaccggattagttagtggtgcttgtttgggaacatgctaaaatagacgggtcgataaaaggagatttttatgaagattatcattgctccggctcggaatatgaaagctgatccggattcattgccgattcaaggcttaccgcagtttttgccgcaaacggaaacgattttagattatctgcgcagtttaagctatgaccagcttcatcatctttggtgggactgcagcgaaaaaattgccatttccaactatcaatgggtgcagcagatggatctttaccatcagctgaccccggcattgctggcatttaccggcctgcagtaccagtggatggctccgggagtttttgatgagaaagcacttggctatgttcaagaccacttgcgcatcttatcgggcttttatggcttattgaggccgtttgacggaatcgtttcctatcgcttgggtatgggtgatcgagctaaagttgcggggaccaggaatctatatgagttttggggcagtagactggccgatgagctttattcagaagacgagctggttttgaatctggcatcaaaagaatatgccaaagcagtcattccttacgtcaaaggcaagcatcaactggtcagctgcacgtttgtcaaagcagagcatggccacttcaagactcaagccacacgggccaagatcgcacggggtaatctggtgcgctatcttgctgagcgtcaggctgatgatctggcagtcgtaaagcagtttgatcttggctatcattatgatgagcaggcatcgacaaatgataacttggtttttgtagcagattaggatgggaagagagaattgagaatagagaagtcaagtgacagtcgtgcgctggcaattgcaacgattatcatgggaattattgccggagccagttccggtttgttaagcattgtcctggacgcaacggaaagagtattttttcattttaccgaaaccaacgcgattccagtcgcgttttcagccacgccattaaaccggctgctggcgccgattattggggctttgatcgtatcagtcgtctggtactttatgcagctgcactatcgaccggttaaattgggcaaggccgttgatggtgaaaaaatgccaatgggggccacgatcatgcatgtcacggctcaggtgttctatgtcgggactgggggatctattggtcgggaactggccccaagagaagctggcgcaatgtgggctcagtcgtggatccgattgggtgatcggattggctggcttaagctggctccagaagaccgtcgcctgctgattgccgcagcagctggggccggttttgccggcgtctacattgcaccgattacaggagcgatgttttgcctggagatcctctataaaaagattgataaaaaagccgtgatcgtcagtctgaccatggctgcgattgcaacgatggtcggtgcgatcgtcaaaggctggcaaccgtattatctggtggcatcacgtcagttttcgctgcgcttgattccctttgtagtgatcgtggcaccgctgatgggctttttgggtacttggtacaaacggttgattggccgcgccagtgcactgcgcgttaaggatcggcggatttttattacgatgccgctggctggggcgctgacgggtgccgttgcctgttttttcccagaaatcatggggaatggccgaggtgtggcccagatggcaatcaatgtgaccagtgtttctcattcggcagttgctttactgctgttcggcttttttgccaaagggctggttactttagcaacgattagtggtggcggctatggtgggacactgacgccatcaattgccatgggttcgtctttaggcgtactgttagggatgatttttattcaggcaatgcctggcgaaccgttaatgcagtttgccgtcttaggcgcggcctttttcctggcagctactcagcaggcaccattaatggcaatgtttatgctgtttgaagtctgtcatttgaatttttcagcccttttgccattaggattaggtgtggcactaagcatggcaatctctaactggatgcaggctcaaaaagcataaaaacaaagaaaggacggtgctgatgaagtctaagcgagtagatgcgccgctggtacctttggcaatcgcgctggcagcgatgttatcgattggggcggccgttgtctggcatcaatggctgttttggctggtgacggttttgttattgatctgtttagggctgtatttaaatgcatcatggcgcggcaaggagcagataattgatgaaacaatcacgtatctgcatctgtcttctgacgcgcaggtgcttgatctcggcactgatcaaggaaaggtgctggtaaagctggccaagcgcttaacgatcccaggacatgcaacaggggtcgaagtcgggcgcaaatctgcacagtcgcataattcgcttgcccacgccaaggacagtcttcaggctgcagcaatggcagatcgtgcttcagtgcaggcagcggacgtattgaatctgccatttaaagatcaccagtttgatgggattttgatttggatgacgctgcatcaggtcaagccgacgatcaatcgcgcgcgggccgttcaagaagcagctcggaccttaaaaagcgatggtacgctggcaattattgattttaggcattttgatgagtaccaaaaggttttggcagggctgggctttcatgacattacggttcaccagtgcggcgtcaacggctggtggggtgttccatggttaagtactaaaattttattggccaagcgtttctagccgcaagcaggctgtcagttgcgctgatgattaaaagcgattgaaaataaagcgttcagcggttttgagaggcgattgccgactgctgagcgttttttatgagctttttttaaatgctggttgttctttagtaatgaaaagcttatccttattcagtatgcattcgacagggaggaaagattttgaacaagagaacgaaaggcattctgctggccgttacgggagcttctttttggggaacttcaggcgttgccgtgcaatatctgtttggcgaaacgacggtcagtgagttttggctggtcgggctgcggcttttaggagctggaatgctgctgctcatcttggccaagctgactggaagatcgtcaaccaaggcattgtttagcaatcgtcatgacgtcctgcagctggttttatttgccttttttgggatgggtatgtcgcagctgacttattttgcggccgttaagtacagcaatgccccgacagccacggtgattcaatacttggcgccagttattattattggctatacggcgctttctcagaagatgctcccgcgccgaatcgatgtggtatcgatcatcgtagccttggttgggacgtttttattggtgaccaatggcaatctcaatcatctggcattgtcgccgcaagcatgcttttgggcgcttttggctgcgctggccaatgcaatcagcacgatggcacccgggcgactgtttgcccgctatggcacgcttaatgttacggcctggtcgatgctgatctgtggcatttgttttatcccgctgtactttattatgccaatgccggccctgcgaccgttagacgtggccttgattggctggattgttattggcggtacgcttttggcctatacgctctacctggccagcgtacaatatatcgatcctagtacgacagggatgctgggagcttttgagcctttggtggcaacgattctggcggtggcgcttttgcacactcaatttggtccggtcaatatcttggccagctgcctgattattttggcaactttcttgcagatgatgccgctgcagatcttttcgcatcgtcgatcattaaactaaccaggttgtgtcaatatgaaaagccaagcgtggtggggatccaccagcttggctttttgattatttgacagcttgttttttgccatttaagccgttacggcaaagatagacgatcgcggccagaactaagacgcccgcgccaacgattactgagatgcgcgtatcagggttgataaacatgaagacaacgatcataatggcgcttaacgctggacatcgatctagat

SEQ ID NO: 1913 - DNA, 8026 bp, Unknown
  gut microbiota DNA sequence
accccagttcccacggcagaagcaattgctccccctaagccgcctaattctgtagcattaaccagttcaaccggtacgttaagaacattcgcaaacatctgtacccaactggatgaattgcatgcgccgccagacattctaatcacttccggcttatgactgactttttgcaacgcttcaatgtgatatttatgcgcaaatgcaattccctcatatacagcacgaatcatctctgatttggttgtattgctgcgcagtccaataaagcttccctcggcatctggtgctgcattgcttccgtacaaaaacgggaagaagagaaccttactaaaagtagcatccgtattttccaaaaatgcttcaaggtcatcatagatcgaatgacccgcatcttttgcgtctcgcatctcagccgtcatcagcattttcaatatgatcgccaggttcccagccgaagtcggactggaagcctcaatcagattcttcccagttggaaaaatcgaattcattaagccgctttcttggggtgccgttttatcactaggaaaaatattcatattccaagtaccagcaattacactgaatttagaatcatccaacactccagttgcaattgcacaggcatcaatatcaaacatcccgccaaacaccggcgttccttcttgaaggttcgtttgagcagccgctgcttgcgtgatcgttcctcttagatcagttgctttaatcaattccggcattttatcaaacatttctggaatatcaaaaaagtcgaaaagctttgcgtcatattgctgcgttgctaagtttaaaaagttatttcccgaagcgtcgccaatctcctgctttactacaccagtgaggagaaaaccgacaaaatccttatttgataaaaccgcaccaatcttctcatactcttctggtcgattatctttaatccatttcaaaagaactggggcctggcttggcatcacatgctgtctgctgattgaatagattttactgactcgtttttcaaattcctcagcatattcttcggcccgactatccgctgataaaataccattcataaagatatggtattcattatccagcacatataatcctttaccatgaccaaccgttgcgatcccagcaatttcttttcccgtcagattagcctttccaagtactgctcttatagccgccgcaagatcattgcgcagtttaacaagatctatttcatgaaaaccagactgcggttcaagcccttgcgtggggaaagcctctgccgccagctgctgtccatgttggttaaagataattactttggtgtttgtaccaccattatcaatagttaaaaagtttttgaccatatcgctatcatcctaaccctcggtatcaatcgcatatacagctacttcacttacttcacggtttgcagaaaaaagatactgacgaccattcttttcataaacaaggacgttgcttggaccaactttttcatcaattaattgcgaatcgaggtggtcactggtaatcaattcaaggtcctgttttccagcacgccaaccaaaaataaagtattctcgattgccaatcctgccaccccaaattgcgtggccaaatggcgtcttagcatcactgcgagaaatctgattgaactcactgtcagaaattcgaagatacggaccatggaaaccttcaatcgttagatactcatttttaccatcttgattgacatcggcactgaagatgtctgaagtttcataattagttaattgttcaatttcccaatctttaccatcaactggccagttaagtttaaaaattccttcaacgcccgtaataaaggaataaccattcattcgcttatatccatgatttttagtaattcggatatccaaggcgtgttgattaatgattttttcctgttcatcatcatattcgccaacccatacttttcctggatcagaccaatcatcaacatccttcttgctgttggcaattgagcatcctacataccagtatccttttcccgattgctttggaatgatatcgaaacgatgcacgtatggaaattcaccaattatcttttggtcccaatccttaccgttccaagtctccttgacaatccgacagttaggcgaattaaagccaggataaaatcgttgcgttgccaaaaaattcaaggtgtcagggatctgaaccatcgtcattgtcccacctacatttggccatactgtagttcgcgcaaaatcattgtccagatcatatgcatagcatggctgggcttcttctgatgccacaaccagaaaatcccgtcctttggcattcatacgcataatcgcatagcaatgatcgagttgatctttaaaaattttcgaaaacttcatgattatcactttcttgatctttttgcagtctataccaacaaaagctattggtattttccaatagcttctgtacttggatttagctatttattaacttgattaactgcctttccatcacgtaagtacgaaatcaggttattcgatgcttcttcggcaattgccgtccgtgcttctaaggtacccgtaccagcgtgtggagacattacgacattatcaagttcccgtaaggcttctggaacaacaggctccgtttcaaaaacgtcgagccctgctccagcaatctgatgattctttaatgcatcaatcagatcatcttgcttaatcaaaacgcctcgagcagcattaacgatatatgctgtgtttttcatcttagcaaagacgtctttattaaactttccagcagttgaaggcagtgccggtgcatgcagagtgattacatctgattctttgaccagtgtctcaaagtcaacatatttcactttcaattgctgttccagttcatcaggcagcggatgtggatcattgtaaatcacatccataccaaagacttgagcaaacttggcaacctctgagccaatacgtcccatgccaaagacacccagcttcttgccttgcagactcatccccatgtattgctgttcggagacatcgacccatttgccttcacgaacgatcttgtcatacatgtgtaagcgtcgaaccgtagccagcagcagcgtaaaggtcatttctgcagttggtacgcgcacgcctttaggacagtttgaaaccacgatccctttgctcttggcatactcaatatcaatgtgatcaaagccgacgccattggcagtaatgatcttcaggttggtacctgcatcaatcaattctttatcagctttggttcccatcagcaaaagcccatcatattcactcaaatgctcaagaatccatgctcgagtttcaacttcagggtcgtagaaaacatcaaaagttgctttcagttccttcaatccttgttctggaataataccagtaactaatacttttggtttgctcatacctattctccttaatcagaattagtgagtttccttaaacttcttgtagactggatcttcagccttagctgctgcttctacgttggcaggcttaaagtaaatgcgattagcgttattgtacatcacgtcttccagctctgcttgtgagaagatatcagtattttccaaccacgtagctaattggtgataagtgttgaaagttgaagaccatggagagtcagttccccaaatgatccgcttagcaccaagaatctttttagccagaccaaccgtcttttggcagcgtggatatggaaaggcttcagtagtctcaccatcaatgtcttggatggctgaaatatcaacatagatattttcatatggtgcgaattgttcaagggcattctctaagcgattcaaatgatctgcattagggaatgacaggtgacatactacaaaatcaagtttaggataacgcttagccaagttaacgattgcttctggctggtagctggtttgagtatagtcaccgtagtcagtagtaatgacaaagccagggtaatcagcgagataatgcatgatcttgcttacattgttgtcagtatccaaacggaatggcttatggaacccatgcagaccgcccccttggctgatttcaaacttcaatgcccggaaacccagatcctcaacatgacgcttaacgatatccatcgcgaagtcatcatatggatctacggcaaaggcaccgataaatttacccggatattgcttaactacttgataagtgtagtagttttggtagccattcagtgtaccttgcagaataactgctttttcaatatcttcttgttccattactggaaggtatttttcagctaaaaagttgtcgtctccccagccttctggaattaaatgaatgatttcaccattatcccagattgcataaccattgccaagtgggctcaaacgtccttgactcttagaaccggccagtgcacgtaccaaatgaatgtgtccttcaatctttttcatgataaaaccctccaaattctattttctaaattagtactcaatcttttcgctgctgccagagtaaccagcattcttgtcagccatcttgttcaagtaagtccagatttgaggacggtacttgcgcagaccaaacagcattaccaggtaaactacaacgcagacaccaatccaaaccgggttctgagaaataaatgcagcaaataccaatgcattcatcggccgtgcaatcaagttaaaactagtgatcaaaaccacaccagctggaattgcggcaccgtagtgagaaaccgcaccggtgtagatcgtccccagccagctggaagcgtacagacccaagctgaaccatacaatcccattagcaatgacctttaagatattgccgcgagtaattgcaacgattgactcaaccataaatggtaacgagatcaagtcgacgattggcaaggtcttgttgccaggcaaaaggaatgcaatcaaaaccatgattggaattaagataacgccggcaataatcgttgctggttcaccgtagccaaccccatcatcaactgccaagaaccaacgctttttatcattgatcttatcaatttccttaccttcagcttgtgattcttgcttacggttcttatcgatctcatctgccagtggcgtaaaggccttagcaaagacattggtaaccaatggaaagatcgtcataacggccgccagttgaatcgagaactgtaaaatctgtccccatgcttgcagagtccctaagtcttttagattaccgagcaccccgatgataaatcctaagagaatccccagggtagttggttcaccaaacacacccagcttgtccttaaaggctgatggcgtcatcttaaccttgttcaagccaagcagattccaaagcggatccagcagaattgctggaatcgtctgctcaatgttgtgcagtgagcagaccgttgcattcttaacgccatagtagtcagaccaacgatcggcttgaatttctgccaagatcagagtgtacagcaacatgaagaatgacagccccagcgacagccagaagttatgcgttacatagtaggccatcgcgccccaaaccatgaagccgaagttgttccaaaggtttgaagccataaataccttagtgatgccaagagcaaataaaatcaattcaacgatcagtccgaatacaaagaaagtcaaaccgactgaagagccaaatgaagccagcgaacctgcctgccagccaatatcaacgaccggaagattgattccagtcgtcttaaccatttgacgaatgatcttagtaacgactggagtaaattctgtgataatccagccaaatccagttaaaccaaccccggcatagaatgcactcatcattgctactttaggacgaacctttaagaaaagcgcgatgatgaaaatcattatgggaaccacaacagtagcaccaaacgcggagaagaaattattaacagcgtttaacatattagaaagcatctcctttccttttcaaagtcagtacttatttagtcgcttcctttaccaaaccaagctcattagcaatcgtttccgcattgcccgcatactccaatccaaagtcatgtgcgaatggaaacttcttaatcaatgcacgccagtttagatcgccgtcttctaggggaaccgtcttcaattcgccttggtctctgacagcatttttcaagtgcagatatgtcgtaaactgtttcaagtcatcagcggcctgatcaacgtcagtatccaaccaaatccagttagcaatatcgaagcagtaatgaatgtctttaatcccagcatcttgaataatttcaaaaaatttcttcgttattgctaatgaactgtcagccaacgtctgattattctctacggcaatctcaaattgaccatccaaaattgctgccaatccctttaacaattcttccttgctgatatcagacaagctcccaatgttcagcttcaagtgcgatgaattcaattccctcatctcagtcacataatcaagagccttattatttaaatgatcgcccgtaaccagcacatcattgacactgtaaaagacttccaatccaagcttttgcgcttcttttgcaatcgctaatcgttcattttttgatccgttcaagaattcatttctgatttcaatcgcatcaaagccaagctgttttactttttcaaccaatctgctttgagaaactccattgtccagatcctttttgaaggcaatggtattcaaaacataggtactcatctcggaaaaccaccttccgcctcgcgtctaaaaacacactgaaaatccgttaagcgcttaactaaatttacgaattagattctaattccaagtatcttttttgtcaaccggtagcgctttcttacataagcgattgagctctattttttcacaatctataacttgtaatttggaataaaatcctttaaaataacaaaatcaaaaagaattataggattctagtttcaacaatttcacaaaataaaaataaattatttttattttttcaaaacacaagcccttactttcgtcattgatcatttaacgattttttgttaaccgcattactaatcgtgattaagtattaccttattacgcacaaagttgctccgacaaaaatgtgataatatattaagaaaaactggatcggtatgcataaatggaaaaattaacaattagcgatattgcggcattggcaaaagtttctaccgccacggtatcaaactacttgaatggtaattttaataaaatgtcaatcaagaccagacgccatctggaggaaatcatcagccaaaccaactatcatcctaacagtactgcacgcgatttagcaaaaaacgaaagcaaaacgatcggtgtttcaattgcggacatcaccaatccctttacctcagcagttttgtccggcatttctgatttctgcagccagtatggatataaagtcgtatttaccaatgctgatcaggatcccgaaacggaagtcaataatattattcggctgcgctctgaaaacgttgcaggattcattctcgatcctgttagcccaaacggaccaatctacaaagcattttcaaataaatcttcggtcatggtcgatttgcaggcaaaacagttaaaaatggatacgatcgttactgacaacgaaaaatccgtctttgaaatgacccaaaaaatgattgctaaaaaatatgatgatttatattttgttagctggcctttaaaagacgtaagtacacgtctgcagcgttaccaaggcttcttaaaagcaaccaattataaggatgatgacagccatttgctgatcgtccctcatcacggaaagcaggaagaatacattgcttttaacaatcgagtaaaagaaatcattgaaaacaaaggcagcaaaaaagtgggcttttttacaatgaacggtcgtgtttttttacgactattacaagctgctcaacagtacggttttgcttatccaactgattatggagtagcaacctatgaagaattagactggatgaaagttttaaatcctggaattagctgcattcaacaagactctagaaaaatcggtgaacaagctgctgaac

SEQ ID NO: 1914 - DNA, 368 bp, Unknown
  gut microbiota DNA sequence
acaggttccgtaattattccttagaaaggaggtgatccagccgcaggttctcctacggctaccttgttacgacttcaccccaatcatctgtcccaccttagacggctggctccttgcggttaccccaccggctttgggtgttacaaactctcatggtgtgacgggcggtgtgtacaaggcccgggaacgtattcaccgcgacatgctgattcgcgattactagcgattccgacttcatgtaggcgagttgcagcctacaatccgaactgagaacggctttaagagattagctaaacctcgcggtctcgcgactcgttgtaccgtccattgtagcacgtgtgtagcccaggtcataaggggcatgatga

SEQ ID NO: 1915 - DNA, 1287 bp, Unknown
  gut microbiota DNA sequence
tcagcatagagactaagatcaaggcaattgaagagtactgtacaacggcaagttctctgcgggggatcgctcgcaaatacgggattgcaaagcttgactttcaaatctgcgtgggtatttatgcacgtttcggtaaggaaaaactattgaatccaccaaccgtaactggggatttccgcttaaatctggtaaagtggaagcaacaaaacctagcttccattccagagacctgtatccactttggctttcgttcatcaggctctgtctatcaatgggagtgtcagtacaacgaacatggagcacaagccctcttaaaactacgaccaggaaggaaatcaaaacatgaactcaaatcacgagaaagagattcaacgtttaaagaaacagaatcagcttctccaaaaagagaacttatccttaaagattcaactcgacgcctcaaaaaaattggcagccttgagaaagcatccaaaaaagaacttgcccaagtaatttatgacctcaaggcaaaatatcgtttgaaagacctgattgaagcactgccaatctctatgtcgacttaccagtattggcaggctaagtttgaacaccctgatgaagccgaagaagagcttaaatccgtcatcaagggcctgtttgaatattttgagggtgactatggcgttcgtcggctgagcgcgcaggtgcgtgactattaccggattatcaatcgtccactgcccaatcacaaacgaatttaccgcttgatgcgtgaaatgggccttcaatgtacgaaatacagcaaacgccaccgcaagtacgattcttccaaaggtccgtcgggtaagaaggctaaaaacgtaatccgtcgtcgctttatgagcaatcgcaaatatcaaaagatggtctgcgacattactgaattgaaggctaaggatggcagtaaggtttatctggaaattatcaaggatctggcaaccaaccagattctgacttgggaaatcggtacgcatccaaccctggaattcagccttaagccgttgcgcaagctaatcggtcttttaccgcacactgggtatcaattaactttgcatactgaccaaggctggcagtaccagcatcgtgcctggcgagtcttattaaagcatggccggattcgtcaaagcatgtcccatcgagcaacgtgtctggataacgccgcctgtgagaccgtctttagcaaacttaaagcagagagcaggccggacactgactatgccaatcaagaagacttaattcaaaccattgaagagtggattgactactacg

SEQ ID NO: 1916 - DNA, 1301 bp, Unknown
  gut microbiota DNA sequence
aatacgttgcttgttgtacttatctacatctacacctgctttgttgattttcatttcggtgtaatcaaggaaaaaccgaatttcatcaatttcttcttgcgtaaacataagccccatattgtcccttaaagtgtgatcactttgtaaacataaaatagcaactccaccaaagggactgtcgtccataagtctgttagtcattgtcataaactcccttcatgccgattcgtttcaacgtttcagcgtttaccttcacgcctaaattggttaagcgatactttttgcaaaatgatttatagccaatttgatggaattccacgtgatgaacccggcaaagcgctgataaccttgcttgcgtatggtctagcttgttacgattgcgccccatgccgacctcatcaatatggttaatgtcagcagcacgaccgcagatcaagcagcgccgatgttgaatgcacttgaactgaaagtatgattcatcacgtggtaacaacgggtagccatcattgattggtacttgataatcaaaaatgaaatcaatcaccaggtttatcagctctgttgcgtctgataccgtgctaacagtatcattcgctaggctaatttctttcccagctgtcttgattgtgtattgaagataaaagtattccttcaaccactcagccggttcgcctgaccatctgtgaatatcgcttaacagtgcaaagaatagtcttctttgttttggtcttgccttgcgtttgtctgggatttcatattgcaccggtacaccgcttgttttgccgtacatcgtttcgatatgcgacaagttaggcgtttcgtccggtgcaatccaccacccgccctgctcccagtaggctttaccgcttcgcagcattagaacggaacatcatcggcgctgttgtcaaacggcaaagcgctatcgaacggttgctgttggtagttatcgttctgatagccgttagattgataaccgccttgttggctttgatcgttattcttctttgaatccaagaacgttacattctcagccacgacttccgttacatagacccgttggccttgattgttttcatagttgcgagtttggattcggccttcgatgccaatcagcgaacccttaccgcaatatttgcagagtaagtcagcagtcatgccccacgcttgaatgccaatgaaatcagcttcacgattgccgtttgaacccttgaatcggcgatcaactgccaacgagaagttgacaaccgacgtgcctttgctggtttcgtgcttttctaaatccttagtgatacgccctgtga

SEQ ID NO: 1917 - DNA, 1051 bp, Unknown
  gut microbiota DNA sequence
cgaaagtagttgggggatcgctccctgcgaggatagggcattgccatgcacatctaaacgaactttggcacctggcattgtgtgtcagggttcggatattggagagttgtccgagaggccgaaggagcagcattggaaatgctgtatacgggttaaagcctgtatcaagggttcgaatcccttactctccgtttcttatgacccattagtcaagcggttaagacaccagcctttcacgctggtatcgtgggttcgaatcccgcatgggtcacttatggaggattagctcagttgggagagcatctgccttacaagcagagggtcacaggttcgagccctgtatcctccattgcaactgaatagttgcatccacaaggatggctcggtagctcagttggtagagcaacggattgaagctccgtgtgtcggcggttcgattccgtcccgcgccactttatggaggagtagcgaagtggttaaacgcgacggtctgtaaaaccgttccttcgggttcggcggttcgaatccaccctcctccattattatagggatatagttaaacggtataactacggtctccaaaaccgtcattgtgggttcgattcctactatccctgctcaactgaatatcttggcggtattggtgaagtttggttaacacatcggtttgtgggtccgacatgcgtgggttcgaatcccacataccgcccttttatccaacagtctaccaaatgttggatagtttgaacgaaacgttcaggcactatttggtggtatagccaagtggtaaggcacaggtctgcaaaacctcgatcaccggttcaaatccggttaccaccttttagtaaagacttatgcctctgtggcggaattggcagacgcgctggactcaaaatccagttcccgttgagggagtgtgggttcgacccccaccggaggcattaaatattcggttatatatctttactaagcagtcatcagtttttactgatgactgtttttttgatttttagggtctttgtcaaaaatctagggagtttgaggctggtga

SEQ ID NO: 1918 - DNA, 663 bp, Unknown
  gut microbiota DNA sequence
atcgttgttgtggacggctagcagcattgccatcatcatctttatcgccgacaaccccgaacaacgccattagctgataacgtttggcatacgtaatagctgaaccttgaccttgtgggtcgttcttggtcggccgtaaaatcagcgggtctgtaatgattcgctgaccgcttgaatgcattaccattgttttgactgctgaattgccttcaaccgtgtaaaccagttggatataagacaatcctgtatctttcaaagctgggtcaatagcagcttcaacgcctttcagtgtcaaataatcgttcttaaaaaatggattctttgcgtctaactcgggttgtttaagctgttgccggaacaaagccattcccgcagctaacttgtcaatgctttctgtgatttccattacttaataacccccttgtagttggttgccagataagcacctggtacttccttgccatctttgattgccttcttgatttcagccttaacgggctttcgatcaactttgaccgtttctttccaatagtcagccggaatcaagctttcatcgctaaattcgactgtttgtgattttcgcttgctatatacgtgcttttcggttcggacctttgctgtccctgagttagcaacgatataaccaacgtattcttgcaggcg

SEQ ID NO: 1919 - DNA, 2110 bp, Unknown
  gut microbiota DNA sequence
cgccaaagtttaggttgacgtccttaccgttaactttaatttgcatttaaagccctcctagttgtcgccaacgccttgtccggcgtcagtgtctttattccaagccttaccagcgccatcagtaccatcattctttggcgtaccttcaattgcaccaacaccgcggaaaatgtaagccaattcggcttcttgatcttcgctcagcgttacccaaccacgaactggaccatagtcaaccgtgatagtcgtttcacggctcgaaacatcgtccgggtcgttgtcgttactgtcttcggtaaccttgccccgcagatatagtgcatagtattgaccttccgaattcttgcgttgccgattaaccgcccagaactccatttcttcgttgtcgaaaatggaatcaagcaactgatcggcaattttggaccagttgttgacaaactcaaacttgaagtcagtttccaagcttgacgtggtagttaccgtgccagacttagttttctttttgtcggaatcgcgctgtgggtcgatgttcaagctcgtttgatacgggataagctgaccggctactttagcagcctctgacaatttgcgggcatagacaacgacgttaacgccttggatttgctctaaatcagtatttgccattctctcactcctaactcaattgaaaaacaagcgacacaattccgtgcattaacacggtatcttgcacgcttgtatcagtaataatttgattgctgttaagcgacggccgaccaacgaaccggaaattttcggaaagtaaaacgccatgtccgattgcagacaaggcgttcatcatttttgccacgttgtagcgattttctccagtgtcccacacgttaagcgtgatatcgattctggccccgtaggcgtccttatatggactaatggtggaatttacatcacccatgttaacaaacgggtatggcgcattctcgctctctagtggcaaatgatcatacacggtatagcctagctcttgtgcttttgaaaataccgcgtcgaatagttcctgttcaggtatcatgccatcgcctccttacttcatcatttttttaagatcgttaacgaactgtacactttgatatgcgaatgccggtttaagcgtaggccgtgccgacatgaatcgagaaccgaattccaagtaagggaaatactcagtatgtggcgcaacggctactgtcataccagcgtttgaaaacgtggtagacagtgaacgtctggtagcgccagttgaatagcccgctgtataagcagcagccatgttctgtgccgtttttgtcttaagcagcgcgccatgtttagcaacaatcgttttcgtttgtgttgccatcatcataggtcgcttggcaattgcacgttgtagctctctagcgcctttaatctgaaacgttactttagccattgctttcacccacaatcagcgtgaacagttttaacggttttctcatcgtctgcaatacatacttttgctcgttatcgtcaatggtcaggtaggaccacttaggcggtgcagcataaagccgtatcactagactgttctgtttatagtcgccaaacaattgcgccgacttaaccgtgccaacgtcagttatattgccatgcaacgttgaaaccagtttttcaccgcctacatagccgtgtgttttcgggtcataatgccgttccgacttatcatagaacttaattacatggtcaaaacgcatttaatcgccccgctttcggtacgggtcaaccgtagttagtacgccatgactatgacgtttgcgccagtcgtcaatgtcagcttgaaaatcgtcaaaatcgttgctgttgaacgtaatgctttcaccttcttgagtgtatgacgccataccctcgttttttaagcgattgtaacgccgtacagcaacttcaatcgggatataagctaactcgttggggacttgcacgccagcgcctaaagccaatttaaaccgcaattgtaagtcagtgtttttaagaatcagcgccaaaacagaatcttggcttgtgtcatcagtcgcaagccctagcattgttttcagatcgtcaagacttgccatgatagatcacctacttgccaacgccc

SEQ ID NO: 1920 - DNA, 3927 bp, Unknown
  gut microbiota DNA sequence
ccgtcatcttagtagcatcatgatcaatatcttgttgtgtcttaagtagtacgttacgcttcatgaccagtttcagtgctggtgagctttggttagccttgatcaaaatcatctcggtatcagtcagcttcttacttcgtacgatttgagcacccaaaacatcgtagtacgtgccgttgataacttggttagctccgacttcactacctagcttcttgttaattgcgtccatacgtagtttagatgccgtcttagggctcatgatagcaacgacagtagaatcatcttcatcattaaaaacatcaagtgccgtttgcaggccttcaaccgttggcgtgatcgttgccgtttgactgccacccttcgcagcagtcagtacggccgtatcaacaaaatcagcaatgctcagtcccagttgccgagtgctttcaccaattgcatcaccgtaaccagacagcacagcttcatcagtaatcatcgtacccttggctgctttttgaaccttaaccttggtcatcttagtgcctaatttgtcgaacgggatcgcttggccttcggcaatgttttttgcatcaccaatgtaggtgaatttagggaattgcagagtatcaccggcgtttccaacaagcgtgttatcaacttgtgcaagtggtgtgaaccgcattgcgtgttgcatcgtgtattgaacaattggcgcattgacctcaggatttaccaggtccgcaatcatcgtcatgttatctgccatagttatttacctcctagaatcttcacatattcgtcgggattctcacgctgaaatttaattcggtcggcgggtttcagtttgataagatcgttaggcgtcaatggcttaatcttcttcccgctaacttgtggcgttttccccgctaatagtttgtttcgttcatcttctcgaatcgcctcaatcgcagtcagcagcacgttcacgtttgcttgagtgctttcggcggtatcagttacaaccagatcaagcaagccgttgtcggcattgttaaaaccaccgtctgccaacatttgcttggcactgtcgcgcatttcatagcgtgccagctttgcagcagcttcttcagcccgcttgtttgctttctccagttcatagttagccttttgttcggcgttcatacgcgacaacttcttggcctcgtcttccttagccttaagctgttccttttgacgctccaaacgttgactaacaatcttgtttacttcatcttgcgtgaacgtcttgggctgattgtcttgctctttatcgctttcgtttttgctttcgctcgtttggtcaggttcgttatctggtgcaccgttcgaaccttcaccctgttcagcaaaaaattgcaagttcataggcaacccatgttgttgttcatcaaaactcataaatacacctcgttttaagcccggtcggctatatagtccgaacttgttcttttaagcctgcaagcaagtcaaaaaggccaaaatttaagcatgaaaaaagagaactctagccatgcttgagttctctcgattttgtttttaatttggaaaataaaaaggcctagccacagctaaactttctttgcgccaatagctttttcaagcgcctttgaacgtttaccgccgataagattatcatctctgccttcaacccacgtttcagatatgctgcaacgacaatttgggtgttctggaatctctggcactttagcaaccgtatagacgccttcgccgaatccactatcacgacttgcaattgctcgacaagcagggcacgctttcggttcggcaatccattgaacgtagttgtagccgtgctttttgatcgattccaattgcacgcttatttggattctcgcgctctcagttcgtgctaatcgctcggttacatacttttgattgccaaccgctgttttgacctgctcacgtagccgtgtagccattttacgtgggttttgaccctgtatcataccaatgcttaaaacttggcctagcttggctttaagggcgtcttggtcagcccacaatctttggctaaacgttgccccgttggtttgcgccattaagattttagcagcatctttgccagtccaaggtgaacgttgcgcgctgtccatcatgataccggcttgcctaatgacttctttttgataatcaccgcttaacttatctcgtagactagaatcaactttgatgttagctcgcagcatatcaagaccaacttcggacttcaaatgttcaagccggttgattcgcattgtagcgttgtagaccttcaagcgttggttcacttggtcgctaaaatcagcatacgttactttctgaccattagcccgcattttctccgcctcagccacgattgatttagccttggtttcgtacgccttgacgtccatttgagttacttggtccttgcctacacggttaagttctttctcgatactatcgctaatatcttcgattgcttggttgtagtaggtttcaagtaacttgccaaactcagcgtcgttttcaagctgtttgagttgccaggccttctcccgcttggctcgctcttcccaatagctactcggcatttacatcatcgctttcggtgtcctgcttttgctgatcggtcattgaaggcatagcttgcaagttgttacgcacgtcttcggcttgttcttctcgcatacgttcgatttccttcttcgggtcgtcaacgattgacaacgtgcttaactgagtttccttcgatacgatacctgacaacgtagacgcagtttgtgcttcattctcgatgtcaagtggaatgttacgagctggaacgatttgcaagtctttcataacgtcagcacggctaactgtgccaatcgccttgcccagacctaacgcagtgcccagcagttgacgcagactaatagcaaacttacggtcttcaaacgcagcttgattctgcatgcttaacagcttgtagcgaatagcaacaccgcttgcgttaccgctaaacgcttcatcgttaaggttggcaaccatcgcggtttggaaaatatcatctttcaaacgactaagcatgttttcttgcatgttgtcgccatcaggtttggtgatgaaatcgacttcaccttgcgcagcgtctgtacttggcgaataaagcacgtggtcttgttccaagttgagaaccgtttcgccgttttcatctgttggcaaaggaatgccaagaatcttaaggtacgcattatcaaagtaagcgacctggttagctttctgactgatagcacggtcatactcttcgaccaacgtatcaatcttgccaatcaaagataaccgctcatcgttggcatagaactcagcagcaggaacagcaccaaacaagtggttggtctgttccattgtcttgccatcgttgccgaaataagtgatttctttgtcagtataaacttcaccactcaactggttgttgtatgaagaataccgcacgaacgcaacgggattccgtttaatcgtggtgtcatagatcataaagctactatcgggagcagcaaccgcaatttcagtttcgctgttttcattttgataggctatcatgtacgaccggccatagatagcaacttgtttggcaacttcgctcagcttgtcttggaacgagttgacgttcaaccagtcttgcaagcgttcattggtgctatcatcatctaacgcaatcttaggcggcttgccgatgaaatagcctacatacgtatcaacgacataattagcccagttgctaatgatacggttgtcaggtctaaaagatcgatcatgtggcttacgcagaatatcatgattaccgctatacaagtcgtagtagtggttatacttcgtagaccgttgccgattctcgttaatgaactgcattaagctagtcgtgtccggctcttcaccggcaaacagatatacgccttcttt

SEQ ID NO: 1921 - DNA, 1391 bp, Unknown
  gut microbiota DNA sequence
tggaatccatcacgtggtcgttctctttgacaggctcgccggtcttgtcgtcccagacgtactgatagacttcatctagaaactggtcaacgccttctttgacggcaaagaacttgccttgtttcatgaattcgctgaccttttcgatacccgccattttcgccttgttagcgttgcgggcttgaataccagcttgttgaaacttgctcacgttgtcaggccgtgcactatcgcaccaaaaaaggatattccggccgtacttggcttgaatatcctttgcaatacttttccaatactcgatgaacttgaactgtttcgtgtgctcttcaatcagataaacattcccttgcctatcatcaccaaagaccgtgataacgccggcgtgttcaaaaccccagtcaacaccgcaataataacttaaatcgtctggtaggtcctgcttgtctatcatcatcgttcgtttgtcaaaatcacgatagacaatgccatcaccgctgacccactggcctaaaatacgcctgtcataaaagaccccgctaggcgtagcagcctttaaagcgtccacataatcactcgacaaagtaggattatcatctagcacaaacgagaacgttttaatacgcgcttctggcttatggttatcgatataatctgttttcaaaaaatgctgcgggttgtcggggtttgtgtcgcagataacccgtgcgccttcgactgagcaacggtcaagaatttcttgaaacacttcatgcaccgctaaactagcttcgttgatgtaagctccgtagctagtcataccacgaatgccactcataccccgtatgctgcccgtataagctggcactatatcaacaccaaacaaatgataatgcccgtgcttgtctggcgtcagatcaatgccaaactgtgagcttaacgaactaatgacgttgttataaatcgtgttagaactaaatcctgcaaggataaattggggtttcgggtcatgaagggacgcagcaagttttgcaactcttcgcaattcaagaatgaacaagtagttatcgatataagtcttgccactccgaactgctccagacaagataagatacttccaatcgtcatgcagataggattgcagcaccttaatctgtttgcttgtcagtatgttgctcagcgtcatgttctttgtccgcctctttgattaatttgtccattaacatatcaagctgctcgttgctttcagctcccaggcgttccataacgtccgccttaagtttcttgatacgggtgtcttggataacgttctctttgcgtgccttcgtcatttcgcgttcttcaggtgacaacgtgctatcgttgtacttatcacgccaattgttctttagccaaaaaatcatagcggtggtgtt

SEQ ID NO: 1922 - DNA, 2339 bp, Unknown
  gut microbiota DNA sequence
tggctcccagtcgcctttcaacttggctaaggtagctgcctcgcacttttcaaaatccttgaacactgaaaaagacatatactggaagtccgtatcgtgactgtagtagttacttttcgtcagcttgatcgtcttcgatgtagtcgaagatgtcggtttggccgtctgcctcttggttgtcatcgtgttccgcctcctcttttactggttcttgttctggctcttttgccggtttttcttgctcttgttctggctcttcttggggttcctcagccgtttctttttttctcttcgtctgctcctgttcttgcttaaagccttccacgagcttatctgcggttgattttggtgcttctggcgtcacgtctttgcgttcagaatcgtcctcgtactcgtttgccgtaacactgttgattgagccggtcagcaggtcactatcatcactcgtgttgatgaccatcttggcagcccgattgataaccgtccgtttagccatttcctcaggaaacttgttctgaacgttgtgctgacgcgattgcgaccaactggcttgaatctgtttctgcgtcataaccgtgtagttgacacgaccatcagtcatttggataaaagcaaaaaccgctttgattggcttgtccaggttctcgaacttaggcacgaacttggtgaccttgattcggccaagctcgtcagcgccaatcacgaactcatcgccttgatgtactacctgagcatcgatgtccttaacccccttcagccgcttgagcgccgtgatcgtgccgaagtacgaccgttgcatctgcaactgattaccgtagacgatgaagtagcactggttcttagccgggctaagcccttgctcgaccatatccagcaaagagttagcgattgaggcgggaacgcactgcaaagccggccgaccgtcacgtcctttgacgttttggagcgtaaagaaagccgattttaaagcgttctgccatttgtagtttgccggcaatgccagcccttcgtccgtcaactgatcgattttttccgatactgtgtctgtaatgtccttctgcaggatcgccatttgattagccattgttttgttcctcccgtttcttgattgtctttagtgcatcaatcagtggctcctgtgcgcgttctagccgactgattgctaaatctaaatcaacaactgccacgtggtctcctacgccgttattgccggtggcaaacgcatcttcaatcgattcgattgctttaccgatatgtctaagccctgcgtctaccaatgctttctcgtttggtgataaagccatatgttataatctccctgtaaagttttttgtttatggcattactggcgagtagtgctttttttgatgcttgaaacagtgctttgtattgcaaacaatacgatccagataaccgcgaaccagtttgctttgatgaagtggtcagtcatgtataggtagacaaatcctgcactgagagctgaccagactaacgcccggagcgttcccatagtctcacctcccgttccaacttatcgattcgctgacataacagcgaatgatcaataaccatcaccagcagaatcaaaccgccaatcaccggcgaaaaaatgtcaaattccattagctaacttcatctcctttctgatttgacaacaagatattaataatcagctgctccatgtctggaggtagttttactttttcgaggtcatcaatacgacgcccactggcatcatagttttcgataacatactccattgtgcatttctcctttctgttacaattagttcatctcccaacgaaaggaggtgacagtatggctatagcaactctagtatgttctattatttctgcgttaatagcagtaataaatgtaactattacagtttggtcttctattcttgatatagatatcaaccattccatcagtactaatggcaacaataaatttttgagaatcgaaataacaaataacggtgatatctctactaaaatcaaaagcttagttgttgaaagcagcactggtgtcttaagaacatcctctgatacatctatgttcgttccatttgctcatcctgaaatattaattggtcatcaatctgttaggtacggctatctagttactaacaatgaaataattaagaaaatcagtattgttttctcaaaacgaacatcgttaataagccataaaaaagtcatttttttagattgaaatacagcgtaattagtagactcactaaagttactaattgggaaaatagtatccatgccatcaagacaatcacttccttcaaacattactttacggaactaagttcaaaggtgtaagaactgaga

SEQ ID NO: 1923 - DNA, 582 bp, Unknown
  gut microbiota DNA sequence
tctttgcaggccggtcttttttaaatccaatttgtttcatctgactgcattgctttggcttctggcagtatgtgctttctaaatgccgaaatgctcgtaatcctttcttcatattgcatctcctacagtcctaagtcgtcgtcctgaatctccagtgcgttgtcttggaatacctttagtgcttcagggaagtatcgccaagctccatcgtgatcgcggtagctcatatcggcatcgcgcttaacgcctagcttgttggcccatttgccaatagcaatcggtgatacgccaatgatgttgccaatctcggttgctgaatactctcggcgtgcacctaccggcagtgccgacatggctcgaattgcttcgttgcggaaatcaactgccatatgtggtcgctggtaatcgtcagcaactttgccaagctccagatacagcttgacgtcttgattgcgcagctcgtgtaccttgttgacgttctgcttgcgcctttcaatcagccattctcgcttgtacgcaagcttttcatgctccaggctactgtcaattgcggttgtcttaccgttatgttcagcttcatat

SEQ ID NO: 1924 - DNA, 2383 bp, Unknown
  gut microbiota DNA sequence
cttgttggccacaaactcgcagccctgcttagttaacaagaagcatggcagctctttgttttgtgctgaaatatagcttgattcaatgaagaattgacgtgggctcaattttgagctctcctctaaatcgttgatataactgcgaatgtcacgcattaggttcttgtgagtcttgccaatcatcttggcaacgtcccggctgtcgattactttttgctcggactcaccaacatagcgaatcactgattctgtattcacgttttgcattgccattctcctttactttttaaattagttataaaactcatttttgaagattttaactaattataatagttgaaagcttcaaaaaaaatgtcctctttcgggacaccaaaataatcctctactttctgcatcatcgccggtcttggcgttgcgttgccagtttcccacgacgatatcaccttctggttagtgcctagcgcatcagctaattcttgctgggtaatgcctcgactagttcgcagctcttttaattttgtcaatttatcatcccctagaagccgaatagactaagtacggatagaatgagaatccctactaacagccataattcgactctttctcgtgtttcttttttcattgattcttacaacttgtcaaggtacactaaagcttggggagaatcaactccccttgctttatgtttagagccaaacaattagatgatcgatcagtaagacgataaaggtaatgatttctagccagaaccgaatcgtttcacgtcgctcagctttttgttgggctcttttttgttgcctcgacaaaccgctacgctcctttcttgttaaggtcttaatcaaccttacgagtattatattatactaatataattagtgttgcaacatatttttctatttttattggttaaacgctaattttattggttttaaaaacagtaacacagtattatatacataacaaatactaataaaattggtggtgattatatgttaggaaacaatataaaagaattgcgcaaacaaaaacatctaactcagaaagatctggcaaaattaatgcatgtttctcaacaaaccattggcgcttgggaaaccgaaagagctattcctggatcagatactttagctttactagctagcctattcaacgtctccactgattacctacttggccgcgaccctaaggaagacgatgaaaagcctctgaccagaaatcagaaactgattgcttactctatcgatccagacattagcgatgaagaacgccaagcaatcatcgaaatagttcaggctgccaaaaaattccgccgtcgtatctaggtgccctaccatgtctgacttggagattattgaggatttatatcctgagctgcggttctggtttattgatgtcccaagcccacactatcacggccatatcgaaggaactgacgtctatatcaactgcaatcagagcaacgatgactggatcaagacttctctgcatgaagtcgttcactacagctacgattactgcaatttgtcgaacgcccgcagcgtaaagaccatgcgttccgaaaaatgggccgtctgcgaatcgcagcgtgtatttagaaagctgtttggaaaacatgaataagaggatcaaattaaaaaagccctctccgaagaaaggactgacgtaaattggaagataaggaaaataaaactatatttgttgatatgacggatgatccccaagtaaacaaatttctcaaagcgttacaccaagcatataacgaaagagtcacaaattattatgaggcaaaagagaaagaattgtcacgatttatttggtcagaaaagaagaaagtttttatttatattttagatgttttctctgacaataattcttcatcatccaaaacttctattttgtttgctattccctctaaagaagataacaaaattttttatgctaatttggtaaatgaaactaataattttacttttggaaatatacatgattcagagccaaaagctagaatatcatggttaatttctcaaaagatcttaaaaaaagaatttactgtaaatatttataatccatcgattttctacacattctttgattttacgaaagaatattcacgagaaaacattaaaaatccttggataaaaaaatgggtggatactgaatatagatcttcattaaatgatttaaagaaaagtaactacatagaaccatttccaacattagggaaaaaactattcgtagatcgttatcattttgacgaaatgctaaagacactagatgataaccagttcaatgacgaatttaatcaatgtctttttgcttatgagcatgaaaaatggtttctttgcgctgctggattaggaagttgcttggagcatttaat

SEQ ID NO: 1925 - DNA, 1519 bp, Unknown
  gut microbiota DNA sequence
tgattagaggataagagaagtcgtatctgtccaggtggttaaggattaatcaaagaacccaaagtaatccttagcattattaaatgaaatatcctcaacgatcttgccaagtttgtccaaatcatttggaactcggccttgttcagccagcttgccatagaaattgcacagtacgcgccggaagtattcatgacgtgggtaggaaaggaaactgcgtgaatcagtcagcattccgacaaagtgcggcagcagactttgttgagcaaagatccgtaactgacgatccatgccttctgccgtgtcgttgaaccaccaaccagcacctaattgcaggcgttcaacgccgccatcgccttggaagcatcccatcagcgttgccaattgcatccagtcgttatcgttgagcgagtagaagatcgtctttggtacgtcattgctgtcttgagccttgctataaagcttagcgatgttggcaacaatatcaggctgcgtgccgaccgcatcatagccagtatcaggaccgagctgttcaaacattgggtggttcagatcacgaattgaattaatgtggaactgcatcgtccagttaaattccgtattcagatgcatcaaggcttccaaaagcattgtcagatactggtcaatttcagattgcgtcaaaggttcattgttaatccctttagccacgattgcatccagttcagctggcgttgcttccttaaagtggtaggtcaacagcgagtgatcagacagccgaccgcccatggagctgaagaattcaaagcgttgccgcattgccttgatgatgtcattgaaactatgaatctcaacgcctgctgccgtgcccagttcctttaggtaggcgccgaaaccatcacgatcaatttgaatcagcttatcaggacgcatggctggcaaagtcttaaagccattttccgcttcatcttctttgagcagtttgtgatacttcagatcagaagctggatcatcagtagtgcagaccgccttgacattcatgttcttaatcagattgcgcggcttaaagtcatcagtctgcagcaatgcattggctttttcccaaattttaggcgcattttccagcgtcagttcatcatcaatatggaagaaacgcttcaattcaaggtgcgtccattcatacaatggattgccgtaagcattctgaattgctttggtccattccaggaacttttggtattcatcgccatccccagtaatgtacttctcgtcagtaccgttagcccgcatcaagcgccacttgtaatgatcgccatagtggtcctcattgatccagatccgggtcagattaggatagtttttgttttcatagatttcaaccgggttaaggtgacagtgatagtcaataatcggcattttagccgcgtgttcatgaaacagttttttggccgtttcattgcttaacaagaaatcatcatttaaaagcgtcattctgtatctgctcctttaagggtatcaaaaattattagtattcttttgaaat

SEQ ID NO: 1926 - DNA, 3769 bp, Unknown
  gut microbiota DNA sequence
tcggttccaaggcatccaaggcttcttccttgctcttgtacttgccttgcagcaggtcaatgtgttcagcgatatgaatgttcaggaaacggtcatacagatcctgattcttcttcaaaacatcccagaacttgtcacggaagacatagtgatagttgtgcttcaggttcatcaatgatccgtacatcgtgtgcattacttgacgaccatcatcatcgctgagtacgctcaagacgttttcttcattaatcgattctggcttaggtgccttgccatcagtttgcgcattaaagacgtagaaattcttaacgtcatccagatgttcataagcgtaggtgtacatttcaaccatcagcttaggatccttgtgggcaattactcggcaagcttccagccagttggtccccgctgtctttacgtgccagccattcttagcaactcgaccgataatttcataaaccgaaagcttgtcagaaccagagtgaatgctcagacggtagccaaagtgttccgcaatggcttcatgaacgaccaattcacgttcaaagcgatctttgtcgccaatgtagtcgatggccttttggaattcaccatagaaacgaggagccatggtaactggcgtaatgccacgacgatgcaattcattagcaaagaagtagtggtttggattcgtcgtttgataaggcgtttcatccatcgagatttcaaagtccaggttatatggtacgacatagtcacgataaatcttagctgcaaacaggattgcatcgtagaacgtcaagacggattcttccaagtcatgcttggtaaagtgaacctcagattcgccaaccttaaacgtcttgtccaggtaagtatcattaaagtacttcttttgatcctcatccagttcgttaaagcgcttgtcaagttcttcatcacttaggtttacagcttcattattgataacttccgtgcagtccaaagtaatcattgagcagccaaccttaacggcatagtcaacttcgtattccgtcttaacgtggtcgccatctgcaccccagccatagtcaaaaccttcttcaaatacagcccaggaagcagacaggaacacatccgtatttgtccggtgcatcagcatcagttcccgaatcgattgttgtgccaaaactggtagaatgccacggttcttaaacaagcgcagatgagcattggaggcattgccaagccggtcaccaagtccaaaactgtacttgtagttgcgccgtgaaaccggacgaatccaagcaaagcgtttagccaaagcgacattattcttttcgttcagatcaccaaccaaaagcgttgagtcaacgtcttccattgattcgcgcgcttcaaaatcacctgctgtcagccggttttcataaacgaccagactcttttcaacatagcctttttcattcttatggtgaagaatgaagtaaacgttgcgccggtcaacttgaatcgatggtgcatagatttcttgattgcttaagctgtcaaagccttttccagcatcaacgtcagctaaaatttcatgaacatctgataaaagtgactttaaatccatttttaaatcctccaatgcatacaacttttaatactttttacctatcatcaaaaacgattatttttcgccaatcttgccatgttcccaacggccatgatccaaatcatcggcgattttggcgaagcgacgatcatcaagtttgtacaagagcccaatgataatggcagccagaatcaagcaaactcctggatacaatgtcatggcagccttaataccccgcaaggcacctggcgtctgcttagcattggcaacataaccagtcagtgctaaaacaccggcactaactaaggcagccaacgactgtgcaatcttgcgcgagaagttaaaggcagcgtaggtaatggcttctttccgaatacccgagtgccattccccatagtcgatcgcattggaaaccattgcccaggtaatcccatttggaatcgccaaggccgtgtagccaatcgtaaccaaagcaatgaacgttactacgttatcgggaatgaagaagttcaacagattggcaaccgcaccgatcacaaagctccacatcgccgtcttcttttgaccaaagcgccgcgtcagcgtaggaatcatgaagacaccgacgattgaacagcccatcatgatggcgttgatgattggctgcaaaccaatgttgccaagattgtattcagcgtagaaaaccatcatctggttgttggtattcatcgccgaaatcgtaaacagcgtcatcaaaatcaaagcacctaaaggcccattatggaaaataactcgaatatagtccttaaagccttccttttcatgaacctgacgatcaacatgtacgttttctttagtccccaagaagcagactaagaacatgcagaccccaattaccgcaaagattactgaagcccagaaatagcctaagcgttgatccttaccaccaatcatgaccgtcagcggaatgaaggctaccccagcaataaactgagcaccgaccgaaccaacctgacgacatgttgccataaaactgcggtcttgcggatttcttgacatcaccgaagccaacgatccatatgggtcattggtaaatgaataaaccaacccccagatcatgtaggcagcataggcgtaaatgatcttttgggtcatcgatagtccatccggcatcgtaaacgtaatcaccgtcataatgcccagaataatggcagaaatcatcattaccggacggaatttgccttgtttgccaatgtgcttgcgattatcaattactgaaccagcaattggatccatgaatgcatcaaagatcttggtaaatgcaaagattccagccacaactccagaaccaataccaacaccgtcaatccaaaatttagttagatatgactggcccaagtcaaacatgaacccattcccaaagtccccaaaaccataggcaatctgctgacgcttaggaattcgtttggtagagtcgttcagcttcacatcatcttgcttgtcgactgagtgcgctgcttggcctggtccacttgctttaacatttgtactatccatttcatgcctccgtttttactgcaccctcgcttttatgttcacgtgaatataaaagcggtaaaaaatagagttttcattggatcttggaattccacaacagctagctatccttgaaaacgcttttatcatattgcattttagtaaaattgtaaagcgcttttttgttatttttatgtttgctgatcattgatagattgtactagtccttatcaccactgactttacacgattttatgtgaacgtgaaaaaatattttatttgttaaatcgaacatattttttaaaaatcagctgattcagactaatgtcatcgttaataaaattaatccgcttacacttaaataaagggttttcacatacttgtgtttcaatttgtgcctactataatagtgattgtaagtaagagaaaaaataaatttcacaagagaattgattgaaggagtgaccatcatgcaactatttcgtggcttaattgttatagctatgctaagtagcaacctagcagctgctaatacctcacaaaacctaacccatcaaatttcgcaacaatatgttaacgtgatcaataaaaacaatgaggctttgaatcattagctattttaccagcagcaacaaacaactgctggttttattttattccgtgattcatgatctacaaaaatgctatcacgaatgcaat

SEQ ID NO: 1927 - DNA, 1456 bp, Unknown
  gut microbiota DNA sequence
atggatgtccccttgatcatctcatctgcttttgactttaagtcgtcgataaggtcttcaagccggttgctgtagctatcatgcaacgtattaaggctgacagcttggtcaagcacattaagattgaaatttagtgtggaaatcttctcgccagtctctggtttagttacaacaaaagtacctttcatcgcgcctggattttgaaacatttctgctgcccagatcacagtgaaaaagcctcgtttaaaacggtccgactgtgcaacttcctttgcgcagtttgacatcacaaatgccttgccctgactgtcagttgcttcgacttgaaagccatatcccgtcatgtcgaatggccgcccgtccattttcagcgccaaaggcatcggcgcttggctgtcgccaatacggccttggaaatacggcgtcaagtctacaaccgatccataattggattgtgcatcgcgcaccaagtctaggacaacacgcgtattagtgtctgccataatcagtctcctctcatattatttgcatattgttcgagccgagcaaacagctcaaaagctcgtttaaaatcatcatctaaaaccgtctcaacctcgttaaaagctaatgacttcggcattgctaagtaatacggcggtgttaatggctgaccgtctgcgtcccaatcaatcagactttgagcgttgtacagtgtaaccaagtcgttaatgtcagcagccattttcttcatcactcgaaaaagccattgacgcgcctgccgattgaggacatctgtttgacattcctcaacacgtagtgttggtactgtttgctcatcattagcatcaacttcaatttccagctgatacagttctgcaattttctgatacacctttttaacgttgtcggttacataactaattaaatccattagctatcctccttttggccagaatgttacctgacgccaggctttccagctgttgacccagtgctgccgaatccaaacatcaccagagttaatctggtagatcgtctgaataatcatgtcgccattgtggtatgagtcaaccttcatcacgaaccaatcacccatatcagtaccggtggtcggatgattagtgtagttagacaacgagttaggcatgtagtatttgcctgtagtcgtgtagctattaaggtctccgcttgatacggttgtcgtatcatcggcatcaggtatgcttggcttcccagcaatgttagcccacgtcaggtcggatttgttgaccttgctgttcaacgcggtggcattgctgttggccttgctcagcgcgctgtcagcagtgttttgagcctcagctacattctccacagtagctaagtcaatcggcttgccggaaacattatcccaggtcagatcggttttattggctttgccggctaaaacagcttcattgctattagccttgttcaaagcattattagcaacttc

SEQ ID NO: 1928 - DNA, 754 bp, Unknown
  gut microbiota DNA sequence
atcgcttttagatggacccgcggcgtattaactagttggtggggtaacggcctaccaaggtgatgatacgtagccgaactgagaggttgatcggccacattgggactgagacacggcccaaactcctacgggaggcagcagtagggaatcttccacaatggacgcaagtctgatggagcaacgccgcgtgagtgaagaaggtcttcggatcgtaaaactctgttgttagagaagaacacgagtgagagtaactgttcattcgatgacggtatctaaccagcaagtcacggctaactacgtgccagcagccgcggtaatacgtaggtggcaagcgttgtccggatttattgggcgtaaagggaacgcaggcggtcttttaagtctgatgtgaaagccttcggcttaaccggagtagtgcattggaaactggaagacttgagtgcagaagaggagagtggaactccatgtgtagcggtgaaatgcgtagatatatggaagaacaccagtggcgaaagcggctctctggtctgtaactgacgctgaggttcgaaagcgtgggtagcaaacaggattagataccctggtagtccacgccgtaaacgatgaatgctaggtgttggagggtttccgcccttcagtgccgcagctaacgcaataagcattccgcctggggagtacgaccgcaaggttgaaactcaaaggaattgacgggggcccgcacaagcggtggagcatgtggtttaattcgaagcaa

SEQ ID NO: 1929 - DNA, 435 bp, Unknown
  gut microbiota DNA sequence
gggatgcacttgtcgatgccgattcgctagcactcagagatgcactcgtggaagctgattcacttgtactcagagatgcacttgtcgaggttgattcgctggcactcagggatgcacttgtcgatgccgattcgctagcactcagagatgcactcgtggaagctgattcacttgcactcagagatgcactagttgatacggattcacttgcactcagggaagcactcgtggaggctgattcacttgtactttgagaagcactcgtggaggctgactcactggcgctcagtgaagcgctgcttgatgctgattcactggcactcagcgatgcactcgtcgaagtcgattcacttgcgctcaaggatgcactcgtggaggccgattcactggcactaagtgatgcactcgtcgatgctgattcacttgcactcagag

SEQ ID NO: 1930 - DNA, 11371 bp, Unknown
  gut microbiota DNA sequence
acattatcccaggtcagatcggttttattggctttgccggctaaaacagcttcattgctattagccttgttcaaagcattattagcaacttctgccactgtggccacatctgctttagtcgcaacgtcaggcttcccggtgattgaatcccaagtgaccttacccaataccgactgcaccttgtctttaagcagcagccacatattatcaccgtcagcaatgctgaacataaacaggccatcaggccccagcttcggaatcttatccttgccgttaggcgaggctactagcattactccaccgcgtaaagcagtcgtgctgtaatcaaaaccaacaaaggctcctggcttgattggataatcaccatttggatcagttacgcttgctgctgtcaaacacctgcacctcgctttctgtccatgcattgcctacactttttgcagtgttaattttccactgcaagttggcaatcatctttgcttggtcttgagcttttctttgccgcgcttcatattctgaagcatcaaaaatcctattgccaaacgtaatcgtgtcgctagtacctgactgtttgtctagatagtgcgtgtagctttgaatcttgacattaacatcaagaccataacgatcacgtaaccagccagtattaccgatttcaatattatttttgatctgactattatctgcaaacgttacccaactcattgaatattgaacatctggataatcatgcagcgagctttttaaagctgcctgcagagcgttactgtccgtaattgtgtcactggtataagcgtcttgccaaatagcaccaattcccgacttgccagctagcggactataatagtccacctcgcagctatactgaacattttgattgctagaatcctggtctgaagattgctctagctgcttgccaaacccatgaattgccgtcgcgaatgatgaataatcttcagtccacgaaatatagttagcattgactcgatccacaaacaagaatgaatccttagtaccaatcgtcttagcaatatgaatcgtccggttgtcaaaccaatactcacaagcccaagcctgcgcaaccgctgataaaatgtcatcaccatgcccagcgccaatcgtattctcaccaaaatcatgaggattgaaattcccatcaatttgatacgatagcgtcgttccttggattgctaaatccatacagctattaatggattgaacacctgccaatgtattgcggacataattatcgtgcagatcatggctaatgtgcgtggccgtaatcgtataggttcggtagttgaaatttggtactgggtttgaaatcgtcaagcggtactgctgaccgtctgcaagcgtaaataacgctcgtggccctaaaaggttttcagcgatcttattttgaccagtggcatcaaaagaaaacgtcaatgtcggaaaactgttaattgttttcgtaacactgacgttataggcaagaatcaccgattcattgccatcatagccttgaactgcaattttgatcacttaatcacctccttagtagtaaaacctggtctcaaacttaagcctaaaattgctagcaccatcaacatgcaacttgttttcaccagtcacaaaatccaaatagccatgatcacaatcgttataggcctgctgaccattaatcaacggcataacaccatcaatgattactttatcggaactagaaacaccacgcttaatctgaattgattgctgcgtggtgttattagttatcgtaaagccattcggcgcattaccttgaaaaatcatcttagctggtcgctcatcagctagtagcggtattaatcccagattccaaaatgaaaaatcactttgtgtaaattcgtagctgatttcgtccttgggtatgttaagaccgaatccccattcttcagcattccaattaagcgtggtcgcaactgattcggcatagccatctgcgcagtcaagattgattgcaacatctgctgattgccaaaaattgctttgctgagttggcgtaactgcttcagcacgaaccttccagcgcatgaatggagtaatcgcattaattacataaaaatcctcatctgagcgaaaaatacgccttaattccagcagttgcagattgtagtcggccatgtcgaccgctgtaatcacaatcgttaatggaataaccagatactgactggcaaaagtggtcatcattgaaccatatttgccaacttgctgataattataagaattattattcagtggtacactaaagcttttgacccgaaagcccaacgcgtctaaatcatattcagtgccgtcctgtcgctgaatgataatcgttgccattagtatccacctcctaccggcattgcattcccaacgggaattgcaccaccgttgtttcgaataataatttcttgtgccttcatcatcttgtactttggataagtctggcgtgctaattctgaactatcaacttggaatgtgatagtaacgtcaccacttaaattgacaccattattcacaccgttgttcagcattggcgctggcattgttgaaggcgttgcggctaccaattgatgcccggcctgctgctgactgacgatcattcgatttaacttcgccgcaaatccatttggcgacttagcagctcgtgcccgaattgcttccaagatgtaatgatctgccgtttggcgcgctggattaatcgccagttcgggttcaccttgtacttcaccgaaaatagctggtcgatctgcccagccaccattcatccaaccgtgaccattaccgacgttaccccagccaccttcaccgccatgttccagacagttaatcgcagctagaatctgatcataaccatttagaatttggtgatggccttttacagcccatgagttaaatgttgaaggaacaaactgaagtaggccttgtgccggatggccagctgcggagttaatgtcgctaatctgctgtggaatagtcggattaccgccagattcagtttgaatttgacgaagcagcttattgattttgccttcagtagctgttacatgcagttccttaaaggctttctcaatataagggcgccaacgttcaacacccgaaccgctaggattaggcggtgttaatgcatcttctagcttttgcagctcttttttaaaccattcgacaccagtctttggcagataatcagctgcaccatcaccaactgttttccaaatatcagttgcggtgtttttgcctttatggaataagtcagtcaaaacacccaacgggtctttcaaggcgtcttcaatagcctcaaaggtatcgccagcccagtctttaacattatcccaagcagcggaaagccaaccctttttaccagttacgtaacgatttaggccaaagagctctgccgtcttcttggccggaataacctcatcaccacgattcaagaagactagctgattccgttctttaggaatttcaacttggccatttgtgcgaacaatcgcttcacgataagtgtctccaccttcatcattaactaatgctaactcatcacgatcattagctgacgttccgtgtaccagctttttaagctttggcaccgtatcttttttaccgccaaagaaatgaattactgagttaattccgtcaacaccagtgttgataaagccgataattgcattccaaccagacttggccacgcctttaatgccgtcccagattcccgaaaaagccgaagctaagccattccaaatgtctgaccatttcttgctaattgagtctagaatgtcactcatccagtcacgaataccaccaaaaactttcttgccggttttgctaattccgctccaaatatcaccaacgaaactgctaatcgcattccaggtcgtattccaagtattcgatatgcttttcaaaattggcgaaattaccgactcaacagctttcatacctgctgacacaatttttttaattgtgttccaagcagctgaaaaaagcgactgaatcagctgaagacccgcttgaatcggttttgcaattggcttccaaattgcactagctatcgtaactaatccattccaagcagtttgccaaacctttttaacctgcggccacaatttgctaatcgctgaggtaatccctttaacaagtggtttcatgatggtaattccaatcccgacgggcaatgctaaagcataaacaaacgccatgattgcagctttacctatctttttcaagatactaccgatcttgctaaacgttttcccaatcgtgctaacaatctttgaaatctctttaccaatggctttctcccagcctagttgaccagtaaagaatttgccaataccaataaagaaatcttttgtagctgctaacgccttattaacaccatcacggaatgtttttgagtgcttataggcagttgcaaacgcaacacctaacgctacaactgccgttactacaatccctaccggatttgttgcaaaagcaaatttaagcagtgccagtgctccttgcaaactcttaatgctagtgatgatgttcttaattgctgttaagcccgcaagggcctttttaaaagcattaacaacagttattgcgcctttagcagccattaaccctgtaacgactgaagtgattgcaagtccaagtgccttcaacgccttttgatggcttgcgattcccttcaatgcattgttaagctgcttagcaaaacctgaactgttttttagccctttgagagcatttataacatcttgaataggggcaaccatgccttcaaagactgttttggcaatctctcctaatgtctcaaatgctggtataaatggctttaaccattttcctaagctttcaaaggcttgttccccgttcttcccaaaagaactaaagtgtgacgaaagcttattaatattttcaccaatacttgaacccgttaatgttttaaccatatcgtcaaaaccgcggataactgcttctaaggcaattttagtacggttttttaagttttccattgcggtgccgataccattagtggcattcaatgctgtcttatggaatccatcagcaccgccatctaactcaatgaaacgttgattcaattgtttcattgagatttcgccagaatcaagtttgttatacagctcttgagtcgagccactcgcaatcccgaaagattttgcaactttttgcagagatgccggcatagtttcttcgatcgaccgccagcccatcatatcaaccttgccgttagccaacatttgcttgtattgttctagtccacgagaagcatcagctgtcgacgcattggaagccaagaatgcatcgtttaacgccagagtagctttagctgcttcttttgcattatctgataatggcataaagacttgagtagtctgcgctacttgatcaagcgaagttggcaaaccttgaatcccattcgacaaagtcttaattgctgcgtttgagtctttagcgctagctcccattgactgcatgactttaggaaagttattcagtgtatcataacgactaatcgcacctgaaagctgttcagatacagccgccgatgctttagcagctatctgataaatgcctaaccctgtcacaatatttttaacgctcgatagcatgcttttagagctgctattcacgttatattgcgcccgaccaagcaatccaatatgttgttcagcgcttgaagtatctgcttcgaatttagttgtatgttccgtcggaacatcttcaatcccttttttaattcgcttaatcggctcagaagcattatcgttcagttttacatctgaccgcttttccttaggaatttggcttaaggcatgctgaaaatcaacaattcccttatcttgaaaatcagttaacagtttgactcgttcttctttaggcagaagcttcagaaacttgtcaaattcttcaatgcccgccttattgccaatcgcccgtaattcagtacgcgcttcctttggcaaatggcgaacatcttcagaaatttccttaatctttgctttggcagtttcagcatcaacaccaaatttaattttatgatcggccttaccaatcccattaagaatgtcttttatcttttctgaatcgctctgcacattatcagtcgcaagatcaacttcgatcgtaactttgccgtccgctgccataacctacctcctttctattcggcaaataaagcgtcaagcatggcatcagtccgttgagtctgtgtatcaaccgaagccccgtcagttaagcggtagtactgttgttgttccatgagtgcggctagttcttcaccttctaagccgtcagtcgtccgttgcctaatagtgacgatccggcggaattgcgtatcagggcccagtccatcgagcaaagccttgaacttgtcccaatgtaacttaccctgctctttgattagatcaatcccgtactgctccataaacgatgcgtagatcgctggtgcgtcttgtgtaaagctgaaatatctaatcggtacttgagtactatcactattctttacgtcgttcccatacggactagcgctaacatactcgccaagcagcttaacaacgttcatcaagaactctggatcttctggaattgattcatcaaagaaaatgtgaaatgctgcaataatcttttcggcttcatcaaaatcagcatcatcaagcagctgatagaacctcaacacattatcaaaagtcaaatcaatcggatattcccggcctttgtaagcaattgactgtgtcaattcctctgttagcgaaagcatttaacatcacttcttcttgcggcgctgataacgattcagcttttgattctcacgttgcttctgcagcttttcagcttcaccatttacttcgctaagaacatttgctaactgcgtcgttgaattacctacccgcttatagagttctttacctaacccaggttcgttgaacatttcatcaaagacattttccaaaatgaaacgaacatcattaaacgcagtttccagtttttgcttagcctcttcacgcggcatttttgccaagtctgcattaaaaagtttctctgcttctgcaattcgttgctgagagtccactaagatattagtcagatgcttagaaaggacatcatcaagtcttgcagaaaccgtcttaaagccaaaatcaacttccagcgttggtgctttatatttattaagatcaagaactaatgccatgttattttcctccaaaacttaaccgccccaactggtactgtgtatttcgcaggcgatttaatacgtattaattaatgattttcaccagtgggtacagatgatgctggcgtcgtcacaccagttgtggcgttgccagtcgatgcggttgcattaagcgtaataccgtcaatctttggtgaaattgtatcgttttcatcagctaccgttaccggaatcggcgttctaagcttatacagtttgccttgaatattaaccgtgaatgttaatgttgctccagcatttgagttaccaccattgggtaccaaagcagaaattgcagcaaccccaatcatctgattaccatctgggtcaacaatcaagaatcgggtttctagatccgtccctagcttgttttgcaagccaattacatattcttgggctggatcgttagccatcttgaccccagtaaaggcaaatgaaaaacgtttaccaacaacgtctgtcgagccaaagccttcatcatctagatacgtgttgttgatcgttgtttcattaccagaaaaggttgtcccagtaaagcctgcccccaagcgggcaaatttagcattcgtcagatcagttaaatcagtaccgccagtcgtatcaataaaatatttgtaccgactagcaagcacaattccgctagtttttactgccattgcaatacttcctttctaaatttaattaaatgtttctacttgaaccgtaaagtccaagatataattaagcgcattgcttaaatcagcacctgtcagcgttggaaatgacgctacttgcgcttgatcaaacacaaaagagccatcagtgctttctaaataaaagtcctcattaccaatcagattagcaatctgccaaagcgtattattaattaacgcttcatcagtaccgcgtataacgacttcataaataaattccacaactttgttgcctaccaaatcttcagaaatcacttgcgaattaggcagaaccagcaaaccgatttctggatcttcttttcctgtcaaagctgtggaatatacggtcactggtagatcaagcaaattaattttttcaactaagcgttccgtcaaatccatctcagccctccatcagactctttttagcaatattagcccacttgcgagagtacaaagccttagctcttaaatcccaacgtttagaagcttgcgggtgtggcgtacgagtatagttgcggaccggcgatccattaacaatcccgtaaaattgagctcgagcatatggcgtcgtatacgtaatttcagaaccattcgcattaatatgtgcagattggcttaatttgccatttttaaacggtacgaattggtccatgtctgacatcatctgattagccatgacataacgcgccttatcaagctttgcttgtgaaaaacgcttatctaaatttaatttgacgttaactttaaccattagagcacctccaattcgtaggaatatacttcgttgctgaatggttcgcgattgtcaacgatctttgtaatcgtatagtcgcgtccctcaaacaataaatgccagcctacacaatcaggtgttagctctggcagcggttcggcaactttcgcgaataaaaaaacgaccgcgttagccgtgatcgttcgatcgttatttgaaccggtataaatcgtttgcggttgaaccaatgcatgattgataacctgttgtgttgtagtctggcgacgataggcatctcgcttgccgttcggaattagcagtgtaatcgtatgaccacacatttttttaggaatacgaggcaacatgaccttcacttcctctcccgcgatatagcaaacccgcatgtgccagcaaagaataagcctcatagcatactccattgaccagtttgtcactaacgtgtgtttgaggcgtcattgacaatctgccaatcgaaattaccttaaaatcatcaccattagcatatgatgaatcgttaccagttgccgaaatataatcgacttgctcgcagattgcaactttatacgaatctacccgtcttgccgatttatcttcagtaatttcatgatcatcatagtaataacccgttagggctgaaatggcacgctgtgcttgacgttccaacttagcaaaatcttcagcggccacatcagaataaccaagatcctgatattctgcataagtcaattgcggctgcatgtaatcacctctaaactaaattaagcagatcagccttagccatattagctgtatagctaatatgatgtgcatctaggtaggccttgatctgatcaactgtttgcgcattggttggttttacacttccattcgggtcaaactccccactagattgtggggttaggcttttggggaagctgctacataaattgacttcttagcgttgtcaaagactagaatgtcgtaataagacaaacctttaatcgtcgtccggtaaccagaacgatcagttgaagcgtccagcacgtcgaccgtgtcatacttaacgatcggtgctactgcatagagtggcaccgccataaagttgacattatcagcaatcgttaagccttgcagacgcgccttgggaactgtcaagattggtaccccaccgtctaattgaccaacacggcgatcaataccattaatctgctgcgtgttcgtcgagaagtttttgctgacaccgttagcattcttcaaagctcggtagaaattagacgacgcaaagattacataaccaccaggaatttcattgtcagtcatgtattgttccagatcatcataagctgccaatgcattcttgctgtcgatagcatcagtaaccagcttcccgccatttttagccgtgtcatacagcttctgtgcggcaaacttgtctcggtgcggcaccgtaatcaagcgctggtgttcgcgaacaacgttcgctacttggtaagccccattttcgtccatatcaagacgatccaggtcataaccaatccagtcttcttgcgtcaattcaaacgattctttttcaacgttaacattgtgccgtgtattgtcgccattacggtgataagcttccgcttctacaaagcccgacatcttgttaacacgtaccgtatgaacaccggtaaaatctgccgccgtaattgatttagcgccaccagtcaatggctgccaaatcttagaatcaaccgcgaattctttatcaatcgtgttcagatctttttggtccattgcaattgtcattaattattccctctttctttattctgcctttgcaaaacgttcagcaattcgagaagcgacatcatctttaacctgaggagtgtcgtcattaccaaatttaccgccaatattaattcgacctggttgctccgtttgctcaaacaaatagccatcagactgtttcagggcatcaagctgatcagttaaaccttcaagtgtaccgtctttaccaacactgatttgttcagtatcaagcaaagaaatgacagctttaacgttcttagccttcgcgtctcgcaaagcactttcaatcttgaagcctttttctttagccgcaagatcatttttgtacttagcttcagcggctttgttgtcgtcttgaagttgcttaatggtagcctttagctcgtcattttcacccgcattcttgcgcagatcgtccagttgaccgtcacggtcaactacttgctgctgtaaactatcgcgctcactagtcaaactattaatctgttctttaagcgggttaagttccttaccataggccatcattaccgactcaatctgaccatcagtcaagcccattgtctttaagtcctcacgcttcattgcgatctctccttcacattagttgttaacgcggatacgagccgcgagaattgattgcataataaaaaagcagtttaacgacatgcctaggtcgtagcattaaattctttatatatcacttaccttttcacgagtataatcacgtaccaaaatcggtatttcctcgcctgcattagtctctttaatgaattcacgtagtttggcctgacgagcccgtattaacgttttagcttgattgatcttattctcatcaccaagcttttctgcagctttcaaacgccgtttggcgtccctaatggctcgttctcttgctcgctgttgttgtacaagtttcccatttttaattgcttcttctgggtcata

SEQ ID NO: 1931 - DNA, 1045 bp, Unknown
  gut microbiota DNA sequence
gaacagcccggtttacccaaccgatgctgaccgcaacaacttggtcaaggatgctacccaaacgattcactacgttggtgccggcgacaagaagccaggtgacaatattgtgacgcaaaaggatgccttcacgcggaccgttacgattgacaaggtaactggtaaggtgctctcaacgagtgactgggaaggtaccaagacgtttaacacggttgacacgccattcgttgacgggtaccatgccgacaagaagactgccggtggtctgacggcaacgcctgataatctagacgttgaagaaacggtaacctacgcaccaaacggtaagattgttccggttgatccaaacggtacgccaattccaggtgcggacacgccaacttacccaacggaccctaacgatccaacgaaggtcgtgccaaacgaaccaattccagacgtgccaggctacacgccagttgacccaagtccggtgacgccaactgatcctggtaaggacatgccggtaccatatgttcaagtagttactggtacgatcaagtacgttgatgacacgaccggcaagacgttaagctcatccgatttgccaaatggcaaggttggttcaaagatcaactacaccacggccgacaagatcaagagctacgaagaccaaggatacgaattggtttctaataattttgtcgatggtacgcagacttatgctaaggaaggcaacgattttgtagtgcacctgaagcacaagacgcaaacgatcacgcctaacgatccaatgccggtaacgccaggccagccaatcaatcctaatgatcctgacagcccggtttacccaactgatgctgaccgcaacaacttagtcaaggatgccacccaaacgattcattacgttggcgccggcgacaagacgccaactgacaaggttcaaactcaaaaggacgccttcacgcggaccgttacgattgacaaggtaactggtgaagttatctccatgagtgattgggaaggcaccaagacattcggtatggaagatacaccagtcattgat

SEQ ID NO: 1932 - DNA, 7846 bp, Unknown
  gut microbiota DNA sequence
acctacctacttctggctcaaaaacagcgaatagtaggtaatcgcaaagccttcaactggtcaaagcctgattttcttcactaagttagcctttttgcgatgctcgctaacccattttcagtattcccaggcaaaccaccactatcccaaattgcccccggacttctcccccatttccgaccactaccctaataatctcactttccaagacttaaaccggttaaattaaccatcaactggcagtacggtaaaagcctcgttctcattcataaaaaatcgcacgccctgcctttgacagctagagcgtgcgattaagcatttaaagataaattcagttattttccagtattgattactggctgcgtgccgcgttcactaataattgccaccattatattgttaatgacctgcaagcgctgttcatcagttagatttaaatccgtttccttggccagccgctccatagcatcttctgtgatcgaaacggcgccttcaacgataatcttacgtgctgacagaatcgccgcggattgttgtctttgcagcatcgcactggcaatttccgtggcatatgccaagtgcgtcagccgcgtttccaaaatctgcacgccagccacgttaagccgttcctgcagttcttgtgtcaagcggtcagaaacttcagtcggattcccacgcagcgtcagcttatcctgctcatcaaatgtgtcgtacggatattcactggcaacgtgacgcacggcagactcgctttgaatctcaacgaattcctcatagtcatcaacattgaacagagcctgcgccgtatcaacgactttaaagactactacggccgcgatttcaaccgggttcccttttgagtcattaaccttcaagatctcagaattaaaattgcgtactcgcagggaaatgctttccttgtccgttaacggcaccgtcataaacaggccggcatcgcgaatcgtgccaatatagttgccaaaaaaagccagcaccttagcttcattaggctgtacgatcgtcaatgctgaagcgcacagtgcagccagcaagatcaaaacgaccccgactgccagttctccatgctgctgaccagcgtaaccacgatagcccagccatactcctaaacccgcgaccgcaatggcaacgatcaatcccagatagccattgacgtgaaatgcttttttctcttgcatcgtcatcccttctttcagatcgattctagaactattataacctagaaaggatttccgacaaaatgccagccacgtccaacgctagatcattgcctggcatgacgattcactgaacaactcgctgctattcttaactaaataacgattcaatcagatgatctttaccaaatcaatttgagaaagtttaccaaaaatcgagccagttagcagctgactctactatggtataatgtttttgtccaagaacattggcagtgcttcgcttttcgaagggagcgatgccaatgaaggagttgaaaaaacgtgcgacgcttcccatcattatgaaagggatccataagtgtcaaaccgacatcaagatggcgccgacttaaaaggtcttgccgctgttctgcacgaactgcatggcttaccaattggcgttcagtacgcagccttggccacggtcgtaatcattgtgattgcttccctcattgccggctgctacatggtcagtcatttctgaccaaaaagaaaaaaccatcttagagctgcaactcgtaaagatggtgtgaaactttaatcaatttgaagtgtaagcactgtcgattttcaaggacattcgggctaacgtgttaccagcgcgttagcctttttgtttacgccataattatagctgatttcaatcggcattgcaatttgaaaacgccttgccagaacagacaaggcgttttgccaattattattttgccgctaagcataatcaatgtgccgccgttcaagcaaatcactgccccaaagcgtagcattcttcctagggcgccgctgaatcattcctaggacggcagttgacccatacccaatgctttattctcgtgtggaactaaggtcatgcgggatgtcagcgaacacagcttaacgctttattctccgtggctgaagaactgagcagctttaattgctcgctgccagccttggtaaagctgttcggcatcttcacgcttcatcaccggcataaactcatcgcccagtttggaaagttccttgagctcctcttgatcattccaaaagccaactgccaaaccagccaggaaagctgcgcccagtgccgtagtttcttccatttgtgctcgttcaatcggcgtttgcagaatatcagcctggaactgcatcaaaaagtcattgcgacaagccccgccgttgaccgtcagcgcctttaacggcaagtcggtgtctttgaccatcgtatcaacgacatcccgcgtctggtaggcgatcgattccaacgtagcccgcgtaatgctttggcgattggatccccgcgtcaagccaaatatcgcgccacgcacttcttgatcccagtatggtgcacccagcccggtaaatgacggtaccacataaacgccaccagttgaaccggcttcaacggccattttttctgactcgctggccttggtaaagaactgcagcccatcgcgcagccattgaattgccgatcccgctacaaagatcgagccttccaaagcatagttcaattgtccgttcagctcataggcaatcgtcgtcagcagaccatttttcgacagcgtggcctcggtaccagtattcatcacgataaaggcgccagtaccgtaagtattcttgacggatcccttttcataggcagcctgaccaaacaaagccgcctgctgatcaccagccatccccgcaatcggaatctcgaccccaaagaagtggtaatcgcccgtatagccgtatacttctgaattggagcgcacggccggcagcatttggcttggaatgtccagcaactgtaaaatatcttgatcccattgacgcgtgtgaatgttaaacagcatcgtccgactggcattggtaacgtccgtggcatgcacgcggccgcccgtcagattccacagcagccaagtatcaatcgtcccaaacagcagatcgccattagctgctttttcccgcgcgcccggtacgtgatccaaaatccacttgatcttagtcgcggagaagtaagagtcgactaccagaccggttttttcgtgaatcagatctttatagccatccttgatcagctgttcggcaatgtcgctggtctgcttggactgccaaacgatcgcatggtagattggcttaccggtgtggcgatcccagatgaccgtcgtttcccgctggttggtaatcccaatcgcggcaatgcggtacggtttgatctgtgatttgatcatgacatcagaaattactgattgaacgctatcccagatttccatggcatcatgttcaacccagcctggattagggaagtattgcggaaactcctgctgagccattgcaatttcatgtccttggtgatcaaagatgattgcccgcgagctggtcgttccttgatcaattgccattatatattgttcgtcactcatgaatttcaatcctttccgttatgagcattgcgcggcttgcctgggtaccgcccattcgtaagcttccccagcatgccagccattcccaagcgttcgccaaatcactaagctggccagcctgtctggatatgctggttggaaaactccccaactcaatttcagcacgcttgaggacgcaaaaaaaccgctggcgacccgaggccattcagcggctaatcgtttacttatcgctgaccatcttgccagccacactgtagcgatccttgcgcatttcgtttaaaacgatgtggattcgttcttcaggaacattggcatccttagaaatagctgccgtaacgtccttaaccagggcctttaattgttcttcagtgcgaccttccaacagatcaatgtgtaccaatggcatgaaaaatctctcctttaatccaataacttggggcaatcataccacaattaacactgatttggcaacgctttacatagtcttaaaaactacttaattaattttcaaaactattctttaataacgcaactgctggccgtcaacaatttgtcagctggcgttcaatcagatgtcgttgattgttctgcttaaaaggccctgctaccgtttttctcaacattctaaaaagatccgcagaacgcaaaaaccgctcaatcagcctcggccagttgaacggttcttctatttaatgcttcctgatcaatagccatgccgccccggctgccagcatgacgccagccattttgtgaaggtccgtcttaacgcctttaaccaggggctttttgctttccagaactacttgaaaatgttcgccgtcatataatgtctttttcatgatcgacacttcctttttcaattggcttttgatttatgctttgtctttattttactccgcatcgcaagccatgacgagcaacaattgcgtcaaactttcttattgataggccaaatgacacaatcttccatcttcaaatatgcacttatcgctgatcttttcgggtaaactttttgattagctgagctaaagcaccgattaatcaaacgtttatgatcggttccgcgctgaatgccatcgtgagcttgcttatgccattctcgatcattgatgcaaccaagcccatcactgtatttattggtcgctgataattttggtcgcgccagtcgcatttcagcagcccctgcatccgctctaaaatcatcattatgtcaatacattcacacttggcgattcgttagataaataaaaatatatttaatttattaaatcactcatttgtttagtttagccaacaaacgttgatatattggcatttgtaagctatgacaaaattatcatatctaattataaataattgattaccactgcttgcgacaatgcgaatcgtttctataaaagtaattttctccttgacctagttatcacatgaatgatactttttatcaaacgtaaggggatgattacaccatgcttagtaaaaacaatcacaatctgaaaatcaaacaagccagcgatcgccaattgcggttttcactgcgcaaattcggtaccgggatcgcctcggtagccatcgccagcctgttctttatcggcagcagtgccatgacagtccacgccgataccagtgatggatccacgacaactgtcttaacagccaattcaacagatcaatcaactgctgttgccgacgctttgactcagtcagcagtcgcctctgattccgctgctcagtcaaccactgctgacaatgccaaggatcaggcatcaaccgcgactgattctgccaacaccgcaacaagcacgaacagttcgactgctcaaagcactgaggctgatcaaacgattatcaactccaagcaaaacagtacccaggcgcctgcaacggataacattcaacacggcatcaacattacggccaacaaccagacgactggatacaacggcagctcgattttaaatgccaatcaatccgatggtactttcgatgtcaacacggttgttaccaacaacaattctgacagccgcaaagttgaagaaatcgtcctgctgccaacgtttaccgccaacaattcaaccgacgtcaacatgatcaagccggttatcgatgctgacaagatcggcagcggtatccaattcacctcctctaccggctccatgccaaccgatttggaggtctactatgccatcacggccggcgactttgaaacgctgaatgtattaatgcagaatgctgatttctcctgggatcaagtcgttgagattcaattcgttgctactctgcaggctggtcaatcgctgacggccaccgttccaatgaagattgccaacctggaacaaatgaaaaaacagctggcagcactggcggatggtactgccgacaaagcgctcgagcaagacttggccgcacgcaatatgacgtttgatgaatatttctactactgggatacggacggcaatttctattctgatgacattcattcgctaaacatgcggctggccgtaccagcaaccgatacgatcagcgccatccaaaacatcaatggcagctaccacgccgttattaagaatgccaacggtcgctatcaagacgcgccagctgagatccaagcggccatgcctaacgtttcaccaagcgatgttaccgtaaccaactttaccaatggcagcgcggaagatactctgtttaccgatggctactttagaatcaatgccgttaatatctttaacgcggtcaaggatcttggctacacgaccaatattgctcccaacggccacgatctttggcagacttacaattacttttctttcggcacgactcatccggatggttccgcaaccaagctgtatgtagaagtgcagccagtcttcttgctgcaggatgttaccttgacaagcggcagcagctggaatcaagcgctgaacctgcagcagaatccaagcgtcaagttcaccaatcaatcctcaatgaccgttaccgagcaaaaggaactgacctacagcacgactggtggcgccggaacctaccaagtcgacacgtccaacctgccgctggatgctgatggcaacttaaccacgccaggtatctacaatgttacctacatctaccaaatcaatgatcaagataccgtaacggcaaccgcgcaagttatcgtgcaggccgtcaaaacgattacgcggacgattcattacgtcgatggcgacaacaacaatcaagccgtcgcaggtgatgtcgtgcaatcactgacctactacggaacgccaactgatgccgcgggaactgaatttacctggcaagcagctgccggtaatgaatttgccagcgttgactctcccgtggttgccaacatgacaccggatctggccacggtagctgccgcagcgactgacgaaaacagtaccaatgccgaaatcaccgtcgtctaccaccatgacctgacgactgaaaacgttgaaaagaccgtacagcggacgattcactttgttgatgaacaaggtaatcaagttgccgacgatgtaactcaaaccgtcaccttgaccggcactaagtcaactgacctggttaccggcaacagcacgacggtttggaatcaaggacagtttgccagtgtggatgcgccatcagtagccaacatgacgcctgagattgccgttattgctgctgaaacggttgatgaaaacagcgcggattctgaaatcactgttgtctatcatgcaacgccggctgttgatccagttgacccaacgacgcctgacaccccggcaccatcaactcctgatcagccgacgacgcctaacaccccagcagcaacgtctgaaacgccagcatctgctttgaatacgccggttgttacagtcacgacttcgccaatgaacaaccgccaaagcactgccaagaccagccaaaagacgctgccgcaaactggtaatgaacagactggtttactggctgctttaggacttggcttatctagtctggcactttccttaacgggagctttcaaaaaacgtcataactaatctgcctgcttgttggtccacactgcttaaacctcatcgcggaaatgctccgtggtgaggtttttgatttgattgatgcaatcgttcttgaaagccttaagaaatgctgcttggatcacgtttgcaacaacgagcggccatttttgaactgcttagtcggggctgttatgcaaaaaatcctgcataaaacatatgacaaaatcgaatatataactacctactt

SEQ ID NO: 1933 - DNA, 220 bp, Unknown
  gut microbiota DNA sequence
cttgccgctgttctgcacgaactgcatggcttaccaattggcgttcagtacgcagccttggccacggtcgtaatcattgtgattgcttcccttattgccggctgctacatggtcagtcatttctgactaaaaagaaaaaaccatcttagagctgcaactcgtaaagatggtgtgaaactttaatcaatttgaagtgtaagcactgtcgattttcaaggac

SEQ ID NO: 1934 - DNA, 579 bp, Unknown
  gut microbiota DNA sequence
gatgccaagttcgtcaaggggctggcaaccgatctgggcggccggaccagccacgcggcaatcatggcgcggacattgcggatcccagccgtagtcggtgccgaagacgttacgagcacgatcaagaacggcgatatggtcattgtagatgggctgcacggtgacatcatcgttgatccaagccaggctcagatcgatgagtatcaagccaaggcggactcatttgaaaaagagcgagctgaatgggccaaactggtggacgcgccatctgtttccaaggacggccagcactttgagattgcggccaatatcggcacgcccgatgacgtggcggatgccctcaagcagggggctgatggcgtcggcctgtttaggtctgaattcctgtacatgagcagcgatcacctgccaaccgaagacgagcagtttgaagcctacaaaaaagcagtcgtgggcatgcagggcaagccggtcgtcgtgcggacgctggacattggtggcgacaagccgttgaactacctgccgctgcccgaagagatgaacccgttcttgggctaccgggcaattcgaatctgcctg

SEQ ID NO: 1935 - DNA, 919 bp, Unknown
  gut microbiota DNA sequence
gtgggttctttggatatggttttacatcaccaatcggcacttcttgaatctgctccataatcacacctcacaactccattctcggcggtttaatgctatacctgacctttttatcaatctctgtcttaacgggctcgtgtcgctcattctcggccttgtgtcgtgctctgcatatctggtcagcataagccaacatgatatactcagaccggctactgactagcccgtacttttttgtaataaacattcgttcgctctcctgaccaaataaaaaagacgggccgaaacccgtcaattgaaactgatgcgtaagcagcacgtcaacgaccactgtcaacgtacacgctaaaactatttatttgtgtaactcaacgaaaaatagttttatttttgcccgtaggcaacgtatcccgcaggaatcgaacccacatcttccgcgtaggcggctgctcgcccattgagctaaagacacacaacccgccggcgttgataaggaacaccagtgccggaaggataatatatgcaaaggattatgcaacccgtttcaaattatgccatctctggcaaaggataggtagtggactcgcaccactttttgcatgctgctaacgccggtagatcgttcaagtaacgttaacaacaagcccacctgggaccttccaactactcgtcgtgtctttcgagtagtaacaccgtaagacggaattgcaccgcctcgcaaacgatcaatattggagcgattaagtttaaggtttacggaagtgatcatttgccatcttatacggtatgaaaaagcaagtttccttgcttagtaggtataaagtcgctttgcaatcgcgaatattttttcttgcgcatgcaagtctagaaaatcaaagtatgactaaagtcaaccaccatcggctaaagtcgatggctt

SEQ ID NO: 1936 - DNA, 6423 bp, Unknown
  gut microbiota DNA sequence
cttcaacgagtagctcgacatcaaccagtgcatctggatcaaccagcacgtcgttgagtgaaagcgaggagtctgcttcgaccagcacttcagcttccgagtcagcatcgacttcaacgtcggcggccaactcagcgagtgaatctgaagttgcttcaacgagtagttcgacatcagccagtgcatctggatcaaccagcacgtcgttaagtgaaagtgcagaatctgcttcaatcagcagctcaaactctgcctcgacgtcgattatggaatcaacgagcacgtccgcatccacatcagcagcggtttcaggctcaacaagcacctcagcttcaaccagtacctcaatgtcaacaagcatcgctaattctatcagtagctcgacatcaaccgtgacggctgccaattcagcaagccagtcaacgtctgctagcgcttccgctagtgctgctgcagcaacgaccagcaccacggcccagaatcgagttatgacacggttgactgccgtatcgacggcaacttcatcgacttcagccaacaccaacaatacgtccagctcaattcagaattcacaaagcgcgtcaacggctgcttcgctaagcatgatgcagtcggcttcgcggagtcaggcagtctatgagagtctgcttgcctcacgttcaaacagctcctccaatgtaatcagcaattcaacttcgcttaacagcctcctttcggcatccaagagcaattttgaatcgttgagtgcttcaaattcaatgagcttggaggtttcggctactgaaagtcagacgctttatgaaagtatgtttgcctcacgttcaaatagctcatcaaatgcaatcagcaattcgacttcgcttaacagtctgctttcagcatctaagagcaacctggacacaggcagcaactcaattaatggcacgactcagcagagcaccgtggagacactggcagttgccgattcgatgagtgatacgcaggctcagcagctttccgatacaacgaactcgctttccgtcagtgcagcatcaagtcaaactcagcagcgtaattctggacttttaaacactttaaagacgatgctaggttttggtaaacgtcaataatttggctagaaagtgcaggaaagagatttgcaaagaaaaaaattaaatgttgcgacaaaaggattcctaaaaaaagcgctttttacggtgatggcaattgttgtctattcattgggcaatcagataccgattccattggttaagatgacagttgaatatcaaactatgattcgtcattaccatatgagtatgcttagtatcttgaccggcgctaatctgccggatttatcgctgttttcgctaggatttagtccttatatggccgcgatgatgattattcagctgctggtaatgatgaaatggtcgatcgttgaggaaatatcacagcgtcaattgatgtatctgcaaaactttttgtcgctgctttttgccttgattgaagcagccattattgccaatggttttagtctggcggccggcagcgaccatttattgaagattttgatgattatcgtaaccttgacggccggcgtgatgttcgttcaatggctaggcaacgtgactacgatttacggcattggcggcatggtggttctgatcgtcggcaatatgctgcattccaatatgaatcgcttggttctgccttgtcgtcagctgttgaaaatgaaaaatggcatctggctgttggcagcgctgatcattggcagcctgttgattgcctggctgacgatcattttccatgcggctcactatgaaaccaaacagatccaaatctcattaccaagtcagattgagccgactgtgtttccgattggctttaatttaggaacgatgatgacttttatgctggggatgtcttttctggttattccttcactagtggcatcgttgtttaaaatgccggccttttggagcagtcctaaatttcagattggctttgcgattgtaatgacgttttttaatcgactatttctttgcgtttgtcatgcttagtccacgtcaaatcgctaaggggatgcggcatagcggtaattacctgcttggtgtagaaattggtaagccaacgcggcgtttcatcagacggcgactggttttgtttaactttttcagtgctttggttttgggattgctggttggcctgcagatcgcgggtagtctattagcccctaagatctggcagccgctatacgcactgccgatttcaatcgtaatgatggtactgtttatggaatccttggttgaaatgcttaatgagctgacaattcctaaacggtatcagaagcttaaagaagggatcttaaaaagcgtatgaagtattttgttccgtcttggcatcttgatattggcgactgggcctccactcagcaaattattacttttgatgatgcaattggcaatatgcgcatcatgaatcacgctgatgaaaattatggcttgatcattggggactataagccacaattgattacccagctgaatgcagaaggggttgcaccgactgatacgctggcggcctttgattggattcaggatactgctttgcaagacaacaaccgaatcgtggatatccaggacttcaactggcctaagggaacctattttgagtatggaccgttcagtgtagacgccatttgcaatgatgaacatatcgcacgccttttattcaataatattggtcagattttgcggattgagcggtggcaaaacggctaccatcaagaagatatcattatggatacgcgtggctttgtctcaagcatccaaacgtttgataagcagaaacaactgcaaaaaacgatcttctttaatctgcatggtgattggcgcgtaattgaggatgccaaaaccggtcgctgccatatcaattcacagtatcaaggcgattttacccagtcagattatgccagccgtcatgatttgattaatgaagcaattgccagtttgattcaaaaacgacttgataaagacagcgaccagatcgtcttaacggctgatgaccagcaaataattgacttaaaacagtttaatggttttaaaacaattattcaggcgagtcaatggcatgctaatgatcgcttttgggagccgatgaatggacggactgatttaacgatcgtcacggattcagaggctgcggatcgccatgtacataaaatcatgggcgatcaaattgagaccaatctgctgccaacgtttgcatcacagtttagtcttggccatagcgacgaatatactacccagacaattctgctgtttgtcagtgagcagacgacgatgttgaatttgagaaaaggcttagctcagcttatggaaatggttgatcaaaatcaaaacagcgagcggctgcagattgcggcctacgatgggcggctgttgaatcaggctcgccaaatcgctcaagaaattgctcaagaccatccccggcttttgatcgatccagaagaagagcagatgatgtccaatccggatttagttgataaagatattgaccctcggatgggaaaacagcagcattggcagccaatcccgatctacaccaaaagaatcgtgcagacgaccgacttgctgcagctgctggatcaagtccgagtagtcgtggatctgggcaacaacccggattcatacgttcagatggcttcaatcagcgttggtctgccacagatcaatctgattaaaaccgacttggtaagagatcatgaaaatggcttgctgcttgccaatgttgctgatctaaccgcagctctgcagttttatttgggcagcatggagaactggaatcgagcgcgggttgatgcggttcagcagatcaacaactattcagggaaacggattttgcataattggcaattgctttggaagaggtgtgtgcgttttgaagcttaacgttttacagcttggaaaaaataattggcagacggcctatcagattccagctgctttaaactggcattttaacgatctaagttgtttaaaagatcctaaagcccggctgcagctgatagtcatttcagaatctgtcaccttggcaccgaccgactggcaacttttacagcagcgtactgatccatataacgtcatccagactgcggatttggcgattgaagacgatcatctagcgtcctttctgcaaaaaatggcggcgcggcagctgactataccgattcaagagtttatcaacaatattgagcattactattttgttggtcagcaggggatcggtctgacaccagcggcattgatgtttgagagtaaattttgcgatgtgatccattatgaggattcatcttgcgtggaggttcaggttcatacgcctgattggcagccactggccagttcacgtaagaatatctacgttgatccgggtcgtcaattggaggtttggccccggtttcaaaaagatgccgatgtggagctgaaatatcgatttgccgttgtttatggtgaggagcggcgcgtttttgaatttaccgaagagcagctcaaaagtccgcagatcgttaacaccaagatttccaatggtcatcaatacatcacgatggccgtctatgtccgtggctatggtcaattaagtctgggcaacgtagagtatcggtggacacgctatggcttggggacctatctgaatggggggcagagcttagtcgatcccaagacgagagaagaactggcctactactttaatcctggcgatcttaaaccgccgctatgcgtatactttgctggctatcactccaaaaaaagcttcgaaggatatttcatgatgcgtcgcttaaatgcgccatatctgctgattaccgattcccggctggaaggtggccagttttatacaggcgagtattttaatcaggccatccctaaagtaatcgatcagtatctgcaaaaactgggctttactcgtcagcagctgattctatcgggaatctcaatgggaacgtatggtgcgcttaagtttggcgctttgatgggcgtgcatgaggtgattgcggctaagccattggtgcatctggattcaattgctacgcgcagtcgtctggcccgtcccgatgaatttgagacggcatttgatatcaagcgcgccattgaagcagatggccaagttgttgatgatgagatgcttttgcggctgatggatcagcaagacctggccaaaaccaatttcagcattgcctatatggaaaacgatgattatgatcccacggcttttgctgatttaagccgccatttgctgactcgggccaatcgcttaaatagctatagtctgcctggacgtcacaatgatgacagcgcgggaatgctgcaatggtttttgatgcgctatcgtcagattctgcagcatgattttgggaggtgagctgatgcgaattatcaactatatctattggctgccgcaaaatgacaccacctatcgttatggctcacggatcgatgcctacgacaatcaagtgatccattttgaaaacgagtggatggcaccaggacgggcaatgattacttggtattcaacggttaactatcaagccagccgttttgtgccccagctgccgattctgcgtggcggggttgagtatcgtatcaaggccaagtatattgccaaaccggctgattcggtaatgctgcgaatcattttttatgacattcaaggcgagatcatcgaccagaaaatcacgcatggctaccagctcaactttacctatccgtacgcggcgacccgctatgaggtgcagctgattaatggtggctgtcgttcaattaccttttggcgactggaactgacgcatgcctttactgaacagaccggcaatctgatgttttatacgcctaaaaaaatcgatgccgaacagccagtcaacattatgctgctgcgttcgcttagaacggcaatgattccaagtgaagagatcgataagagtcatgacgtaccgaacctttcgctgataatggttgcctggcaggagatcgatcaggttgacagtgagctgctgacttattttgaaaatctaaaagaacgtcgcataaactttatcagtacggctcaccggttaaatccggtcgtacgcaaattggttaagaaaagtccttattggcgaggctggctgattgacgcgaatgtcgtgctgactgactatcgactgagcaattatgaaatgaccggcaatgaggggcatttctttaagcacttggaattagtaccaattcaagagacgctggatcagatcaaagatgaattaaagaggtgagaacgacggcattttcatttgaactgcggcgcgccaggcatattttaaccaaagtcaatgccttggcgccaacaatgcgggcaatgagtgatgaagagctgcaggcccagacgccaaggatgcgcaagatgctcaga

SEQ ID NO: 1937 - DNA, 1202 bp, Unknown
  gut microbiota DNA sequence
cgaccgcgcgtgaggcagccaggcgcgtcttggggatgtatccttatgacgtacaggtgatcggggccatcgttcttcatcatggctggattgccgagatgaagaccggggaaggcaagacgctgaccgcggtgctgcctctttatttaaacggtttgactggtaaaggagcaatcttggttacgcccagtcgctatctggctcagcgcgatcaagaagaattaagcgtcctgtatgaatggttgggattgacctgcagcctgggttttgatcccgatgatgagtcgggtaatcaggccaccgttgccgacaagcgaaaatggtatcaagccgatattctgtacacgaccggcagtacgctggcgtttgactatctgttcaataatctggcttcacggcccgaagatcaatatctgcgaccttacaactacgcaatcgttgatgaggccgacgtggtgtttttagatggagctaattcgccaatggtggttgccagcaagccggaactgcagtcaaatctttatcgcttgactgacgaattcgtgcgcagcttggaatcaggaaccgattatcgccgcagccggaaccataaatcagcctggctgacgcatcaaggcgttttaaaggcacagcaatggttcagaattgacgatctgttcaatgagcagcatcgtgaattgtatcggcatatcagcttggctctgcaggcgcatttcgttcaacagcgtgggcacgactatctggttgaggatggcgaggtggtcttgctggatgaggcgaatggccgcctaatgcgcggaatgaaagtcaatactgggattcagcaggccgttgaacaaaaagagggcgtcaagatttcagaaaatcggcaggccgtcgcttcaattacctaccaaggtctgtttcggctgtttaacaacgttgctggaatgacaggaacggctcggattgctgccgatgagtttattgatgtctataagatgaaagtcgtccagattccgcgacaccgcaaaaatattcgtaaagaccatcagccgcgcgtctatcttacaaccagcgaaaaactgattgaagcgattaagctggccgaaaagctgcatcaaaaaggtcggccgattttgctgattgccggttcggttgaaaactcggaaatcgtttctgagattctgctcaaccgtgggattccgcataacctgctgaat

SEQ ID NO: 1938 - DNA, 2989 bp, Unknown
  gut microbiota DNA sequence
agccgcaattattaaaaacgctggacaaaaaatgccgtaaccgtgtcaaccaacatggcggggcgcggtaccgacattaagcttggcccaggcgttgccaaattgggtggtctggccgtaattggtactgaaatgcttgatccgcgcgttgctgagcagctgcaggggcgagccggccgccaaggagatcctggtgacagctggtttttcatttctctggaagataatttcgtctcacaaaacagcagtccggcaattcgcaaatactatcggcgtcatatcaagcattttaacccgcaaaccaggccacagcgtctgcacaaccctcgtattttgctgtctttgatgcttttacgcgataaggtcatggttaatcagcgccagacccgtgtgcgaatgtacagctatgagaacagtatgcgattggagcgaatggctttttatgaaattcgcgagggcatcatgaacgctgatgattatcgcaagaccgcgcttaattggatggaacacggttttgatgtgattttaaatactcggtcaaactgggattatagtcatctaaaagcaatggtcaatcactggataacctatgatgatgctcagattcctgctgatttgaactatcaggatatagcagcagtcaaagattatctgatgcagcggaccaatgagattttagatcagattgaagattcaattgctgattccaaacagattgaacaattttatcgttctgcgctgcttaaggcaatggatgactgctgggttgatcaggtggcctatcttggctatctaaaaacgctggttcagccttggacgctgctgcagcgtaatccaatggcggtttatcatgaaaaagcgtatgatcgttttaaacagatgattgatgcggttgctcaagaagcaattcgcaacctgttgttaagcacggtggctttgaatgaaaatggtgaggttgttgtatattttgtttagactatcatctgaaaattgaaatgattagggagctgattttagatggcaacacgcagaatcaatcaccatgggtccgacgattcacttgacaatgtcgtcgagcagcatgccaacaagcggctcaaaaaaattcaagaagaacaggcgaaggcttatgaaagaggtcatcaccattcaggcttgccgcgcttctttatgaatctggtcgtgatcattgccgtcgtgctgatgattatgatgatgttttggaggtagctgtatggctgatcagcttggcgattttaatcaaaaccattaaaaaattaaaaaactacttgcaaaaaactaagaatggattaaaataaaaaacaatcaaacagttttgaaaaaccatgagaaagacgagtagctgttttcattcgtaaagtgagccgaggataatgggaacttggccgaccctgatacagcgaaaaacacttccccgcgttgctgacccaaatggatgcgtccaaagtaggctcagacgttttcgacacgttacagtcgatggagcatgtttgtgctctgatcaaagcggtctggatatctctggacaacttgggtggcaccgcggaataaagcctttcgtcccatgaaactacggggacaaaaggctttttattttgtcctcaagtctaagtttcaaggagattttttattatgagtctgattattccagaacactacgatccaaagctgtcagtccgtgagaccgaagccgctattcgctacattcgtgaaaccttccaagatgagattggtcgtgaattgaacctgcagcggatgagtgcgccaatgtttgtcgaaaagaaaactggtttgaacgataacctaaacggggtagaacagccagtttcattcacgatgaaggaactgccaggcgaaacgattgaagtcgtgcactcgctggctaagtggaaacgctatgctttaaagaagtacggctttgggatgcatgaaggcctctacaccaacatgaacgccatccgcaaagatgaagatctggacaacttccactccatttacgttgaccaatgggactgggaaaaggtgatcgctaaagaagaacggactgaagaaaccttaaaggccacggttaaaaaaatctttaaggttatcaagcacatggaacatgaagtctggtataagttcccgcaagccgttcatcatctgccagacgagatccacttcgttacgacgcaggaattggaggatcgctggccagatctgacgccaatggaacgtgaagatcggattgccaaagaactcggctgtgtctttgttatgaagatcggtgacaagctgcgtcgttccggcaagcctcatgatggccgcgcccctgactatgatgactggtctttgaacggcgacattatcttctggtatgaaccgcttgactgcaagttggaagtatccagcatggggattcgggttgatgaagatgcaatgcgctaccagcttaaggaagccggcgaagaagctcgtgccgaactgccattccacaagatgctgttgaaccatgaactgccatacacgattggtggcgggattggtcagtcacggctgtgcatgctgctgttaggtaaggcacacgttggcgaggttcaggcaagcatctggccagaagatatgcgggaaaagtgcgaaaaagctggcattcaactgctgtaatcaagcggcggcgtgctgaatctagtttttcaactgctatcaataagcggtttggcattgtgggcagcagattggtgattgcgacatttgcattctgattggatcagtcttatttgcgggcgaacttcctaacctcagtatcactttctcagagtcagcagaacaggactgagctaatttgaaatgtaaaatgccaatgatcaatgtgtgaaatggcgaaaccgtaaaaccgagatacagaagggatgatcctgactgtatctcggttttttgtttggcgtcaaacggctcgcaccgagaaagaaaaggaatagtaggtagtttc

SEQ ID NO: 1939 - DNA, 6160 bp, Unknown
  gut microbiota DNA sequence
tcagctcatttttccatgggtatttggctaatgctccccgtgatgcactattaaatcaataaatggtttggcttttattgatttgagttatgtcatttgacacaccctgaatcctcgggtggttgatgtcattatgagatatttcgagaaacttttttggctaagatacgattaatcatctaatcatcgcgactggatcgtcagctggaagaggcggcttaacttttatgacagcagttggtggttgaaatgatttaaccgaaactggcttcatgcggtgataataatcattccaggtatcaaaaatgttaggcagataatgattcgcattaaatttagtaggcagtcaacggctaataatggtgtcaatatcattaaatggattgggattaattttgacctttactgctaatcataattgatgtgaattcatgaacaaataatcatttaattaaaaataaaaattaaaacttataaaaatccctatatatcaatgctttcaaaccaatcagagccatgatatcaatacaaaatttgatgaaactatcgctaatacgtgacatttttaattttatgactaaaatagagtcgtaaacgatttcagagccagacgcataatcgtttatcaagttcaatgctgctaaagaaaggggtattttcaataatggcttatcaatcaatctacccatatacgggcgaattgaaaaagacttatgaaaatcagagtgatgaatacgtggaagacaagctgcaaaaagccgatgctctgtaccacgaatggcgcaatcaaccactcgacggccgagccgagatccttcacgcagttgcggacaatttgatgaagcatcaagatgaactggcaaaagcaatggttcaagacatgggaaagctttttggcgaggcgaaagctgaagttgctctgtcagcaatgattgccaactggtatgccgacaatgccaaggatctgctgcggccacagcgcgtctacacgatcatgggtgacgcacattacgaataccattcaacgggggtcatcatggcggttgagccttggaacttcccatattaccaagtcatgcgtgtgtttgcgcctaactttatgctgggcaacccagttatgttcaagcaggccagttccgttccgaccacggcttcattgctggaaaagtataccttagaagctggcgcgccagaaggatctctggttaacctgttcgttacctatgatcagattgaaaaaatcattgccgatccacgagtcagcggggttgccttaactggttctgaacgagcgggacaaaagattgctgctgaagccggtaagtatttgaagaagagcacgatggagctgggcggctcggatccgtttattgttttggaggatgctgacctggatgatatcaagaagatcctctacatggcacggctgttcaatgctggtcaagaatgcacctcggctaagcggtttatcgttacggaaaagaactacgaccggttcctggaaatgctgaaagaagaattcagcaaggctaagatgggcgatccgatgaaccctaagacgaccttggcaccgctaagttctaagagcgcggctgatgatctgcaccagcaggttaaggacgccatcgcacatggggcaacgctggcttatggtaatcttgacgcgccgacgccaacgccaaacggtttctggatgccggctgtgatcttgaccgacgttacccgtgacaatccggcctactatcaagaattctttggtccagtcggggttgtctacaaggtggcggatgaagaggaagccatcaagctggccaacgactctcattatggcttgggtggacaagtctttgccggccattccaagcatgcagccgaagtggcatccaagattgagactggtgccgtttactgcaacaacttccggggctcaattcctgaattgcagtttggcggggtcaagaattccggctatggtcgtgaactaggtcgggccggaattctggcgtttgccaatgaacagatgattatgcgcaatccatacgacaagatcgatcttaaccatacgattggcggttttgtctaggatttaatctagctggtcattaaatcaaaaaatggcagattgcaagaatcctccaatatatataggcatcaagtcatcttgacctggtgctctcaataaaaaactgctgagctgattatcaactcggcagttttcttcatatttattatgcttttggtccgtgaccaggctgccatttgagaccgatacctgaaaaaccgctcaagattgagaagagtggcgataacagactaaacagggtgaatggcaggaattccaataccgggacacccagggcagaggcaacgaatgaaccggccacgccccaaggaatcaggtaattgatgacgctgccgccatcttccagcgttcgactcaatgccaacggggaaagaccaatgcgcttaaaggctggcttgaaggcattcccaggcaggatgacggaaaggtactgctcgccgacgaacaggttgacgccgattcccgcaaagatcgttgccgtaatcaggcggcctggcttgttcaatttagctactaaaggtttcatggcgctttcaatgattcccatgtgcatcaagatcccaccaagtgccagggtcatgataatcagagaaacagtccccatcatgctggagatgccgccccgggtcagcagcgcgtcgacggccttgttgccagtcttggagacaaagccgctttcaatcaacgtggcaaatttagcgacgcccaactgtggattgttgataaagatcatcatggttgaaacgataatatttaaaaacagggtggggatggctggcagttttttccaggcacagacaaacattaaaataattggcagtgctgcccaccaggaaacggcaaagtgcttagtcagagtcgaacttactgaagcgatgctggcaagcgaggttcccttgttgctttgacccaagaagaaaaagacgatcagggaaaccaagaaagcggggatggtggaccacatcatattgttaatgtgatcaaataagtcgtcttcagcaacagctgaggccaggttggtcgaatccgaaagcggcgacatcttatcaccaaaaacggcaccggagataatggcccccgccgttaaagctgggttaacgcctaaggttgatcccatcccaaacagggcgattcctacggttgagatggtggtgaagccagagccaatggccagtccgaccagcgagcagacaatgaagaccgatggcacaaagaaacgagcactgattaaatgaaagcccaggaccatcagtgaaggaataattccggcttgaatccaaacggcaatcaaagtcccaatcaaaataaagataaagatgggaatgatggcagtggagatccctttggtaattccggtcataatgtcatcccaagatacgtggcgcagggccagccagaagaccagaaatgcaatcacggtcaaaaccggtacctgtggcgaaagaccgaagccaattacgccactgcccaagatgaccaacataatcaataggattgcaacagattctttaaagttaatttttttagtcatattatcgacacctcatgtttttaagctaatttgtttaacggcatttggattgcagataatgacgataatatcgtttcataattttctccccctcgagcaaataaaaaaggcgctccgattagattaaatctaatcgggacgcctaaacgtggtaccacccaactgaaaagagtcaatgacagcttttcactcttgccagttgctaacggtaccggcccaatccgtacgggcttattttgtcgggtatttcgcaacagacaccctgtccggttcgcatcgaccaccggttttctgaacgctgaggtgcagctctacttgacgaccactcgtaaatttcattggcattaatatatcacttaaaaaaatgaatggcaagcaaaattctgatgattttttaattttattttaatcaaaacgctttcacgatgaagattaaaaagtcgctggatccaattattggcgcgctttataatgaaactaatctatgcaaaaaggaattagcaaatatgaccaaaaaaatatatgttgtgggagctgccattttaaatgagcagcaccagattttagcaagtaaacgcagtgatgatcgtattttaggcgcattgtgggagttccctgggggcaagattgagccgggcgagaatcccaaggcagccttaaaacgcgaactaagagaagaattcaacgatcaaatcgaagtcggcagccaggccgcgccaaccgccatcaaacaatatgattttggcgagattcatctgacggtttactatgccaaactggatacgcatcattttgatctgattgctcatagtcaagttaagtggtgcgatcaagcagagctgatgcagctgcactgggccgatgcagacttgccgattgccaaagctattgcccaggctgatctgggaaaggcggcgttttaacaatggctggcgttgactacggtaagattttaaaacgcttgcagaaaggcgataatgatcagctggtagaagagattcatggctcattattgaatggttatgttgatcaagatgaatttgccacggttggcgatctcggccctaagctgctgaccaatcaagcgggtaaccagatctggaatcagctgcgtcacgaattgcagacttgccgcagttatattttcgcggtggcttttgtgacggacgcaatgatttcatgcttaaagccggtcttcaaacaactggctgatcatggtgtccagggccgcttattgacttctgactatctgtactttaatcaacccaaggcctttaatgagttgctcaagattccaggcttgacggttaaaattgctaaggtggatggatttcatcaaaaaggctatatttttcaacatgacggctaccagacgatcatcatcggcagcgccaatctgacagagaatgccttgatgcgcaactatgagtggagtctgcaggtcaactcgctgaacaatggtgacatcacgcggcaagtcagtgaaaatatcgaggatgaatggcgaaacgcgcagccattgaccgaccaatggattgcgcaatatcagctgatctatcaaaagaatcatcaagtgggtcatgcggtggccaaagtggttaagaacggccaaccggtaattgatggtgaactaattgagcctaatcagatgcaaaaagacgccttggcacagattgcacagctgcggcaggcggggcatgatcggggcttggtgatttcagcaacggggacggggaagacctacttgggtgcgttcgatgttcgcaatgccaagccaaagcggatgctgtttttagcccatcgtgaagaaattctgcgcaaatcagcccgcagctttcaaaaagtcattggcggtcctaaggaaaattatggcctgtatacgggaaacgtacatgaaaaagatgccaagtatttatttgctacagtgcagaccttacaagatgatgcgcatttacaagcattttcgccaactgaatttgactacatcctggttgatgaggttcatcatgctggggccagctcatatcaaaaaatcatgcagtattttaagcctaaattttatttagggatgacggcaactccagagcggaatgacgatttcagcatttttgagctgttcgactatcatgttgcctacgaaatcagactgcagcaggctcttgaagctgatatgctttgtccgtttcattatgtgggcatcagtgactatcagtttgccgatgccaaggtcaatgatgagattgccagctatcaaaatgccgccagccatcataaaaaagaggttcaggcaatcgagcatctgaccagtgcggaacgggtgcactatattttgcagcagacggaatactatggctattcgggtcccaaactgcatggcttgatcttttgtgcgacggtgcaggaggccaatcagctggcagcggaactaaccagacagcatcacccagctaaggcactggccggcgcggactcaatgagcgttcggcagcaggtggtcaaggaactggaaagcggtcagatcgagtatatcgtcacggtcgatcttt

SEQ ID NO: 1940 - DNA, 9883 bp, Unknown
  gut microbiota DNA sequence
ttccagcatcgtctacgttcagcagctcggtcggggtctgcgcaaagcccaaaacaaagactatgttgaggtgttggattttatcggcaactataagaacagctacatgatcccaattgccttgacgggggatgcctcatactccaaagacagcgcgcgggaaaccgttgagattgagccgacgattggtctgtcaacgattgcgtttgatgagattgccaaggagcggatctaccagtcactgcgccaggttaagctggatgacatgcgcaagttgcggatggtttaccaaaatatgaagcagcgagtaggacgcgtgccgctgctggctgactttatggctgccgattcaattgatcctgagattttagccaataaaaagaagaattacgcgcagtttttgattggcgaaaaagaaccggttgtgatcagtgactatgaaaatcgcctgctgaccttcctggacgcagaactattaaatggcaagcggcgtcacgagctgatcttgttggatgatttgctgagtcagacgacagttgcggaagaagagcttatgcagcagctaaaagcggccggctgtctggttgatgaggcaacgctggcttcgatgcggcgcgttttggatctaaccttttacaacaagaatgcggcgccgtctcgtgctgattatggcggccgcccaattgtaatttttgatcaggcagcgcggaactatcggctaaatgatgagctgcgcgattcgctaaaaaacgatgcgtggttcagccgcctttggcaagatggcatcaagaccgggcttttgcgggccaaacgctaccaagcagatcagcggtttacgctgggcgagaagtacacgcgcaaagacgtcatgcgcctgatcaacaatgtggtcaacacgaccgcgcaaaatattggcggctacttttttaatgagcatgatggcgtgatttttgtcacctaccataaggctaaaaacatcagccgctcgattcagtatgaggatcaattcttaaatgatcacgtcatgcactacttttctaaaggcaatcggcgcctggacagtcctgatgtcaagaagtttatggatggcaagcggcagttggcactctttgtcaaaaaatcagatgctgatgacgacaagaccttttactatttaggcacgtgtcgttacatgccgggatcggcccgacaagagcagcatgatggcaagccgatcgtttcgatgaatctagagcttgatcagccagtttcttacacgcgctatcattcgttgattgactaaaataaattaaaatcgcactgctcaattaatgaagcggtgcgatttttgggtgtaattagataatagaatcagtcgtcaagcacagccaattgggcaagcaagtgattaagctgcgatcattcaggctggtgggcgtctaggtagtcgtttagttcggcgttttgaatatctgtaataaacatgtgccctggcgcgtgagtgattactaaaggcagcttggcgttttcgattgctgcctgcggagtaacgccgcatggccaaaagactggcacttcgcctggcttgatcgtgtcagcatcgccataatcgggatgatcaaggtcagagatgccaattgcagctggatcaccaatttggatcggcgccccatgaacgttaggcatctgggccgtaatctggcgggccagctgagctttagccggcgacattggccgcatggaaaccaccgttgggcctttaaagcggccaactgggctggtcataatattggttttatacatgggaacgttgtgcttttcagtcagatgacgaatctcaatgccggctttgagcagggcttcttcaaatgaaaaagagcagccaatcagaaagccaaccatatccgcctgccaatacggagtggcatcggtaacctctttagtaaaatggccgttttcatagagacggtaacgcggaatatccgtgcagatgttggcgtgccgcgcgatcgtcttggtcaagggtgtttgtttgacggtttccaacagtggacaggcttgcggattttgccgaatccattcacgaaagtcatgcgcatacatttgcggcaagattaccagattagcctgtgcatagcccgctgccatgccggctgtaggaaaatcaatgatgcccgtgcgaatcctttgtcgaacctgggcgggcgcttgttggatatagggttgaatatcaaaagcaggcatgcatttcacctcttagattatataatgatgtgaagattagatttacattaaataatagctgttgaatgatcatttgcaaacctattttgctgataaactggctaaattaagcgatcagggcttgaaacttaactcagtcggctcttggtaaacgtgataattaaaaataacacgcagcggttttggacaagccatggttattgaccattcaatcgaccagctgcaactgctgaaaaatcaagtaatggaataaaaaagagtcggcagaaactgccggctctttttaatcaggatttttgggcagctgccgattcgatctgggtgatctgcggctgcgcgtagtcgaaacgatggtcggtacggtggtcatgccatttcacgatcccgatcagaatcaagataatgacgatcgtatatagcagggccgaacgactggaaggatgatcgaccatggccgcgctgcgataccaacgaaacagccaggccagcatgctatagaccagaattccacagaccacggcaaaaataacggcccacatgaacgtcgtggccatcgtcattacgattcccgcggcgattaaaaataaaaccatcaaaacgatgaacaggcacatttaaaaatcctccttgttgttcgaccagctgggcaacgggacgtcaattacgcgcggcgactgatttaaaagacacataatagcttgaccgattcccagtccgctgacggtggcagtcagttgcgaatccaggttaagactcccgacttcttcggggctggccagatgatgaactaatagattaggaaactgagagcgcagtttagctggcaggtccaaaggtgattgcgtggttaagatcacgttcagcccaaccttgcgaccttcacgcagcacttgaaagatcccgttttcgctcagcacgtcttgattggttggcaggtaacgatgagcttcgtcgataataatattgacggaaaaagccgcattatgctgcagacggtgctccagaatccgtttcattaaaagtgagatgacggcccgttgaccaattgcaagtgtctttagcgcggaaaggtcgattaccagcgtcttgtgagcgctgcgctgatttaaaaacatctgcagtacgaaattaagctcggttttgactttttgcggctgatgaatagtgccaaacagttcgcggattgccggactggccaatatttctcttaattgaatgatttttggccatacggatgcaatcaattgacgattatattcctgaccaagcaaatgatagttggcccgctgatcagcatatggaattaccaattcttcaactaattggtcgggcagcagttgaatggcatacgattttgaccagcgtccaagcttggccagtgcctgctggtggtcggaaactggctgattgatgcgctgatagcagccaggatgattaagcagattattttgaatccgcaaatcattaattgctgaagtgaccgcggcaattagctgttcattgaattgcagtcctaacgcctccaccagttgtgcagctgaaaattcgccgggctctagataagcgttctcacccaagcggtaaacgatggcatttggcagctgcgtgtattcaccggtagggtcgaggacaatgtttgcttgaccgctgttttgcaattgatccagtaaggttaaagtcgaggtcgttttgccgctgccggtctgtccaacaatcagtaggtgtctgtttgtcagctcgttcaatgcattcatccccaatcattataatattctaattataaataagaagggcttaaattgttacaaaaatattgttattatttttggatccttagttgagcaatttgatgaaaacggcttcaagtgcagtgatataatattatggtaagaaaatattagtgtgataaataaataataagttgacgaaataaaggtgatttgctgaacagtaacccaacttattatttagagtagcttaaaatgggggaatttcaatgaataaactacagcgattaggaagggagacggaaactgaccgcacttgccgcgtcaaaatgtacaaagcaggcaagaactggcttacatcatgccaggtttgccattattttttaaatcgcgcggctttaaaacgcgtggcgatttctgccggagcagtagcgatggggatgagtctggctgctcatagcgtcaaagccgatacgactgatgtaccagtcagcagcaatgccccaatgcttaccggcccgttgactcaaaccgagatggcagctgagattgccatcacgaatgaaaacagtgaagcttccgtaagcgtcgcgtcagccagtactgcaacgcctcctaaaaaaagcgtcagcagggaatcatcagtcagcttagattcagccaagacaagaagcgactcagcagctgatgccagtcaaaaaaaaaccagctgcagcagccaatgactcgacagctgccagtcaaaatggttcaaccacctcaacagcatcaaatcaaagcgccggttctatcgctgattcggcagtaaatgaaaataatggtctgaattcaagcagcagtcagactaaatcagccagttcagctgccaacacggatcggttaaagacggcagctgctgcttcagcaaatgagctggcagtctcgactaccgattatcaggccttaaccaaggactggcaggttgatgccaagggaaacgtgacctatatcggtaaaagtacggatctgactacgattacggttcctaataactacgatttttatcaggctggcaagattcaggctggtcagagcgtgacgatcgcggccagtgtgattcacaacctgctcaagcagaaccgtcagttaagcgagctgatcatttcatcagatggggacggcaagctgatcgccaaaggtaactggaaagcggctttcagcggctatgacgataactatatgaatcagtatacttgtcgcgtcaagtcgtttgatttaggcgggctggatgtttcgcaggttaccagtatggcgcggatgtttgacagtgatcgcgatctggtgcggatcacgggactcggcaattggaacactggcaaagtaacagatatgtcctatatgtttaatggcacgtcgaagctgagtaccttggacagtattgaaaaatgggacgtccagcaagtctccaatatggactatatgttttcccaggcgtttgataatgcttgcgaatggccgctgacgctggatctgtcaagctggaacaccaagtcgctgaccaagcttagtcatttattctattacgctggaattaccaatctgaacatctcaaactggaacctgactaaaatgactaaacagtcgcgggcgcagtatctttttgccaacgcgggcacgctgcagaagagcaaggccgacaatgaagacatggcctcgtttggcttcgtcctgacgatgaatcaggtcaagctgccgcagacggccaattataagctacaggctaacgatttttatgcaacgcgcagtggcgacatcccgctgctggtctttaccgatctgacggatgccaatctgttgaacatccttaattctgaactgaccagcttcaactatatgactggtaaagatgagccttcgcggcggcatgcgttcagcgtcaagctggcggatggcacgaccaagaccatttcaattggccgagtctacaaaaatgaacaggaagaaatcgcaaccattcaagccgcgattgcgcaggcgattgccaaacctggctacataacgttgactacgccgacggtcagcagtctgacgccagcccagcgcatttcaaatacatatgcgatcagctatgttgcccaaccacagactacccatattatctttgaagatgagaatggcaatctgattcattcatcaaccatcaacggtaaaaccgatgagaccgttaatgttgacgttaaggtgccgaatggctgggagatcgtttccggcaccttgccaactcagattacgtttgcgggaacccaaacgccagacatcatcatcaagatcaagcatatcatcacctcaacggcagtcgaaaaaaccgttactcgaaccattcagtttaccaatcctgatcagaccaagcagacgattcagcaaaaggtcagctttatgcggacagcgacaacggatgaaacgacgggtgagacgacttatactgcctggcaggtcgttgccggtaccgtagctgcctttgccaaacttgatcttggcagctatcagcaaaaaggctatacgatgctgattgatgggcagaccggaacccagattgcccagttttcccccaatgccgaatctgaagacatcagcgttgccgttacgttttcgccaaatcagcatacaatgcacatcaactatgtcaacagccagggcaatatcatcaagtcacaggaagttacgggtcatactggcgagaccaaaatcgttgagttaagcgcgccagcagaatggctgatcaccgatggcagcacgaaaaaggcggttgtctttggagcagacggcgctcaagacatcacgatcaatattgagtatgcgcgcatctatgttgagccgaccgatcccaaaacggttaccgatccgttgcctgacaatccggctaagttttatccagctggcgttggctatgatgatttgaacaaagccgtcacccgcacgattacgattgttgatcccaaagccagcagtcaaaaaatcattactcagatcgtacgctttacgcggcgcgcgattgtcgatgaggtcgttgggacgctggttggctatacaaactggcagacgaccaatgcggtttgggatggcatcgatgtcgacagtctttatcccggctatacgcccagcagtcaagtagcagccaagacagtcacggtcaacgacgctgatcagacacagacgattacgtttaccgctaatgatgccgttcagaccgtacgttttatggatggcaatacgcaagtcggttcggattactttttacgcggcaagaccgatcagctggttgaattgccagcactgccggatggctggcagttggcgcttgggcagacactgccaaaaaacgttcagctggctgctaatgacgtgccgatcaagattcagatcatcgccggcttgtgcacgattaccacggcgacggcagccggaacgctgatcccaggaactaaaaaccagtacctgcaaaaagcaattgctgatgacgacttgaatcggcaggttacgcagacggtcgtcatcatcaatccgctcgatcatacgtcaactacccagcagcagatcgttcgctttacgcgcagtgccgtgatcaacatgaccaatggcgagctggatcattataccgcttggcagtcagtagggctggattcgttcaatgaggtcaccctgcctgtttttgccggctacacgcctcaagccttgaatgatcatcagcaggcaatcgcattaacgatggatggcgatctgccagcggttaatcaagtagcggccacccaggcagacagcgtgattacggtcagctatcaagccaatccggttgacgtggcagtgatctttaaagacgcggcgggcagccagattggttcgattgttacgattcatggtcaaaccgatgaagtactgcagctgatttttgatcaagccacccagcagctgaaagtcaatactggtcttgcgcatcccgacaatccagccacgatcacgctgccaaccaattgggaactagatgatggcaacgacttgagcccagtcaaaatggcaagcggccaaacgattgccttgcgggtgcggcatcaaacaagcgatgtttccgccacggacgcgtcagctaaagaagagtttacgcggaccatcaatatttttgacccatatcaaggacagttgcagccaattacgcaaacggcagtctttcatcgcagtgccattaaagatctggtgaccggcatcgtgacctatggcagctgggtaccggcccaaggaatttttgtcaaggtggatattccaagcgtagccggctataccccggatcgacaggttaatgaagagaaagttgatccgctcaatggcaaaaacgaaacgattgacgtgcactatcaagccaatgacggcaatattcaagaaattgactacgttgaccaagatggcaatgtaatcaaccatttgaatctcagcggcaagactgatgcagttgccaagatcagctatcaggctcccaacaactggcagatcgtatctggacagactttgcctggcgaggtacggtttaaggtttataatccggtaatcaaggtgatcgtcgaacatcaaaccaaagacgttacgggactggatcaacagctgagaattcaaaccagcaaaacggtcacgcgtcagatcactgttaccacgccaactgggcaggtcaatgagatcaagcagttcgctcggttccaacgctcagcagttcaggatctggtgacgggtgcgatcagttttggcgagtggcagtggcaggctggcgatcagatttttgaaaagttcacgccggcctcgatcgcgggctatacgccaaactaccagttgattgaggagcttacgccaactgcccaaacgaatgattcagtttatcaagtcagctaccaggccaatcctggtcagcagacgatctcatatcgggatgcatatgataatatcgtattgacgcagatcattcctggggtaaccgatcagattgttgacgtgccaacggttttgccatccggctgggaactggcggctggacaggccatgccggcaacggtgacgatcaagccgactgatacgccaatcattatctatgttcagcaccagttaaaagacgtaacggccgaatattcaaacaccactcaggataccgtcaaacgaatcataaacgtgcagctgccaaatggacagatagttacgacaacgcagacggtcaattttaagcgaaccgcgacaatggatctggtaaccaatctgattgaatatggtcaatggcaggcagacggcagctttgccaaagtcgtgattgatccaattgccggctaccaggctacgcagaccgaggtgccagcaatgacgccaacggcaatggctgatgacattactattgaggtcagctatatcgcgcaaaaagccatgcagctgatccaatacgttgaccaaaacaatccggctggcagtccgattggtgagcaatccattcctgggctggttgatcatgacgtggccgtgacgccatcaatcccagccaattgggaactggtaccaaatgaaacgattccaggcagcgtcacgattaagccggatgccgcgccaatcagggttctgattcaacatcagcaccaagacgtttcgcaaacggatgcgggggcgactaaaaaggttacccgcacgatcagatttaacaaccccgatggtaccagtcaaacgatcgaacaaaccataacgtttacgcgctcggcagtcaaggacctggttgacgatacgattgcctatggtgcctggcagggcggtggcgtttttgtcggcatggaagtcccacaaattgcgggctactatgccagccaagacgtcatctacagtgtgcagccaacgccggatatgcttgatcaaatgattgagattacctattcgccaaa

SEQ ID NO: 1941 - DNA, 1082 bp, Unknown
  gut microbiota DNA sequence
ttagcattcctgctctccatatccttcgcttccttagaaaggaggtgatccagccgcaggttctcctacggctaccttgttacgacttcaccccagtcatctgccctgccttagacggctccttcccgaaggttaggccaccggctttgggcattgcagactcccatggtgtgacgggcggtgtgtacaaggcccgggaacgtattcaccgcggcgtgctgatccgcgattactagcgattccagcttcgtgcagtcgagttgcagactgcagtccgaactgagaacagctttcagagattcgcttgccttcgcaggctcgcttctcgttgtactgcccattgtagcacgtgtgtagcccaggtcataaggggcatgatgacttgacgtcatccccaccttcctccggtttgtcaccggcagtctcattagagtgcccaacttaatgctggcaactaataacaagggttgcgctcgttgcgggacttaacccaacatctcacgacacgagctgacgacagccatgcaccacctgtcttagcgtccccgaagggaactttgtatctctacaaatggcactagatgtcaagacctggtaaggttcttcgcgttgcttcgaattaaaccacatgctccaccgcttgtgcgggcccccgtcaattcctttgagtttcaaccttgcggtcgtactccccaggcggagtgcttaatgcgttagctgcagcactgagaggcggaaacctcccaacacttagcactcatcgtttacggcatggactaccagggtatctaatcctgttcgctacccatgctttcgagcctcagcgtcagttgcagaccagagagccgccttcgccactggtgttcttccatatatctacgcattccaccgctacacatggagttccactctcctcttctgcactcaagaaaaacagtttccgatgcagttcctcggttaagccgagggctttcacatcagacttattcttccgcctgcgctcgctttacgcccaataaatccggacaacgcttgccacctacgtattaccgcggctgctggcacgtagttagccgtgactt

SEQ ID NO: 1942 - DNA, 809 bp, Unknown
  gut microbiota DNA sequence
caaaccagtaaagcaatcactccagaaattacaccacaaacacttgctacttcgtcccaatcaacatgcacatatttgcctccttccttatcgaaatctgcgcaaacaaaaagcgccctatcagtatccaaaccgatgagcgctggcgagtgtgctacctgagcagtcgcttaattaattttttaacgtgcttactaggcacgatgatgattagaaggaaccaatgtcccataggagtcacctcctaatgcacacaggcttaagtgggagctacccgctcggtgcgcaataaacattgtatcataaatagaatgtgatataatacaggtatgatgattagaaggccggtgcgcaaaacggtattgaggtagcttctcacgtaccgaaccggttgaggacgcttaataggcgtcctttttattagctcacagtatcatgctgtgggcttttttgtttgatcttaagattggctgatagtcgtattagctgattgagcagcattggcaggccaagaatcagatgcagtagcagaggatgcagttacatagtccttgccagtgatttgcttgtattgttctgctgtgatcgtgttgtactgtacgtagcactcaatcgggaatccccaagagtagatagtctttacaaaatcaaagtcagtcatcatagtctctcactccttagttagtcgtcttggattgtgccttaagctgagcaaccgtttgaccaagcacggataccatctgcttaagctgcgcgttgtcctgcttgatctgtgcattttcggcgttgacatgagccgcctgttggcc

SEQ ID NO: 1943 - DNA, 335 bp, Unknown
  gut microbiota DNA sequence
cataccccggccctcactatcgtatggcacgactaacgtttcgttagttttcaattccgagcctttgggaataatcgctaccgtatcaaaatagcccttttcgtcataatgataggcattcattaattcatttacccactcatgaccattaaaaaaccgtgctccatcacttggaaccacagtcgtttgattattcttcaatccaatattctcatcaatttgcactgccgctaaaaatgggtacattcgacttgtagtatcgaattcatatactgtaattttgttactcatttcatttctcctatctaaccgattaagcatcaagatgaatccac

SEQ ID NO: 1944 - DNA, 493 bp, Unknown
  gut microbiota DNA sequence
gtaaaattgtttgtgtaaatttctaaattaagatgagcgaatttaaagaaattcgccaatctgaatcacttgaagaaacaaaacaagctttagataacttcattttgaaatggaaaagcaaatatagcaaccagatgcgaaaattgggtaagttaagtaacttattcaccttctacgaatttccgccaagcattcgggcatcaatttactcaacaaatttgattgaagctttcaacaaaaagttgaagaagaaaattcgccagaaggagcagtttccaaatgaggatgcccttcaacgattcgtgacaactcaaattctagaatacaatgacaagttcgaagaacgagcacatcgtggatttcgaggaagcaaggataccttggattccatgtttatttaagtaagcatttcatacaaagaaggattttcaaaagtacacaaaattattgacactctcaccaaatcacctgaatgtctttaaatatttagaga

SEQ ID NO: 1945 - DNA, 412 bp, Unknown
  gut microbiota DNA sequence
tccgcctggggagtacgaccgcaaggttgaaactcaaaggaattgacgggggcccgcacaagcggtggagcatgtggtttaattcgaagcaacgcgaagaaccttaccaggtcttgacatcctttgaccacctaagagattaggctttcccttcggggacaaagtgacaggtggtgcatggctgtcgtcagctcgtgtcgtgagatgttgggttaagtcccgcaacgagcgcaacccttgttgtcagttgccagcattaagttgggcactctggcgagactgccggtgacaaaccggaggaaggtggggacgacgtcaagtcatcatgccccttatgacctgggctacacacgtgctacaatggacggtacaacgagtcgcgagaccgcgaggtttagctaatctcttaaag

SEQ ID NO: 1946 - DNA, 664 bp, Unknown
  gut microbiota DNA sequence
gtttgctttccggcacttcatcgattcgatgcgtcagataaaccgtaaacagctggtctgattgatcatcactatcaaaatcagccggtttcattgcaagatcgtcaatatcttgattgtctggtgtcaaaatatagccagctgccagataagcggttaattcagcgttaatcttagcaaaattaattggttcgccggataagccctgcagcttttcttcagtcaatggcttgccagctgttaggtcaataatccgtacgctggcagtctgttcatgaccttggtagtagatatcgacagtcttatcaacactcgttccatcaactgtttcagcagcaattacggcttggcttggtgagtatcctgcacgctctggtacctgaaccgcttgccaagcagccagtgaccattgcccgtaaactttggtgccaattgcctgatcaacctggactggccgactgatcgtaactgactgcgcaacggtcttaacggtgccatcgggcagatgatagttgattgtccttacgatggttcgatcttccttaacatcttgccagacatgcgttaagtgaaccacatagttttgcaccccatttactgcatgatacttggcctctttaaaggcagtccgcgcgtcatttaaagcttcgttgtcgcttaaagc

SEQ ID NO: 1947 - DNA, 364 bp, Unknown
  gut microbiota DNA sequence
ggaagggtgggattccaaagcgtgctgaacgtccatttcttggtataccttttcggtagttacttgctcagaatcccgattgatttttttaacacttcgatcgctccttcagcgtcacgaagttgacgctttagtcgtgcaatctccttgtccttatcgctagcaaaattaccagagccacggccaaactccccagtctcagtaagctgcttaacccatttatgtaatgtactagccccaatacctagattcttacttatttcattcatggccatgtgatccttgttatctaagtaatactgaacggcctgttccttaaattccttgtcataactgtgcttcgtcattatttgatccgccaatt

SEQ ID NO: 1948 - DNA, 529 bp, Unknown
  gut microbiota DNA sequence
aagcccgactttcgtccctgctcgacttgtaggtctcgcagtcaagctcctttatgcctttacactctgcgaatgatttccaaccattctgaaggaacctttgggcgcctccgttaccttttaggaggcgaccgccccagtcaaactgcccacctgacactgtctcccgccgtgattgccggcgagggttagagtgttcatacaacgagggtagtatcccaccaatgcctccatcgaaactagcgttccgacttctacggctcctacctatcctgtacaagttgtacaaacacccaatatcaagctacagtaaagctccatggggtctttccgtcctgtcgcgggtaacccgcatcttcacgggtattataatttcaccgagtctctcgttgagacagtgcccagatcgttacgcctttcgtgcgggtcggaacttacccgacaaggaatttcgctaccttaggaccgttatagttacggccgccgtttactggggcttcaattctgagctttgcttacgctaacccat

SEQ ID NO: 1949 - DNA, 364 bp, Unknown
  gut microbiota DNA sequence
ggaagggtgggattccaaagcgtgctgaacgtccatttcttggtataccttttcggtagttacttgctcagaatcccgattgatttttttaatacttcgatcgctccttcagcgtcacgaagttgacgctttagtcgtgcaatctccttgtccttatcgctggcaaaattaccagagccacggccaaactccccagtctcagtaaacagcttaatccatttatgtaatgtactagccccaatacctagattcttacttatttcattcatggtcatgtgatccttgttatctaagtaatactgaacggcctgttccttaaattccttgtcataactgtgcttcgtcattatttgatccgccaatt

SEQ ID NO: 1950 - DNA, 413 bp, Unknown
  gut microbiota DNA sequence
cgttctttaaacgtccgcacgatcgtcttgcccgtgttgccttcgtagtcttcttcgatttcttctttggtcagagcatcggcggctggcacatcggtatagaaagtatcggcatgcgtcgtgtttaaggctggaacatccatattagctgccgcaaacgaaacagcccatggtgaatgggtgtggacgattccaccaatctttggaaaatgattgtacagataagtgtgcgtcggcgtgtcagaagatgggttcatgtccccttctacgacttcgcctttcaagttgacaacgaccatgtcttctggcttcagctcatcatatggcactccggatggcttgatgacgtacaggcccttttcacgatcgatccctgaaacgttgccccacgtaaacgaaaccagtcccagctt

SEQ ID NO: 1951 - DNA, 2874 bp, Unknown
  gut microbiota DNA sequence
gttccctagtttgccagcagtgggaataatgctattagtatgatcaatgcttactgttgttgcgttagcgaaatcttttaacttttcaaagttggcttggatagcttcaggccctttatccatgccgctaaaaactttagtaaggtccatttttttacctctcatttaaaataaatagccttgacgccatcgaatacgccaaagctaccatcatctaatcttcgcattagttggttgtcggaaaagttgctaaatttactcgtgatttctaacgtgctaacgccattagatacactgacaactttaactggcaacgtttgtcgattgccaccaccaaagaaaccgctaggctcagtgccgattggtacgataccgagtggatactccagataggttacgttggcggttgaaccgactgttaatgtcgtaggaacacgaatgcgaatgcccctgtcagtacgctaatacttttcgattcgctttctcgtaagccattataagccgttacgcttaaggtgtacgcagtgttaggcgataaacccgttaccgtgtagttcttactacctgtcgttgcaattaaagcggtgccgttgcgtactcgatactgcatgacatcacctactttttaagtccagcttaaatcaacgctgttagtcgttacatcgcttgacgtaaggttagatacgtcgaccagtgcttcatagaccgtgattgttaccacgtttgacgtcttagtgccaatcgttgccttaatcgtggttgtaccaggcgcaatcgccttgacattgccagactgatcaaccgttgcgaccgttggcgtggtactggtcagcttgtagtccccgtccgtttcgttcgcaggcgttaccgttacgctggccttagccgtaccaccgacttcaagcgcagtcttatcaatcgcaatcgtgatagattgtactggaatttcactcgtagttaccgttacgatgtttgacttggcactttcatgcagaccgttatagctgcttacggcaaaacgataggtagtttttgctcgcaagcccgtaaccgtgtaggttttctggtcagtaacttccgcaatcttagtcagctctccgtcagtgcctaagccttgatagatgtaatacttcaacttaactatacccccttagtttagttgcgccattctagccgttgcgtgtgttcatcaatatagatagctcgcagatcactaggacttgtaggcttgctgaaatagcccgaaccgcctgcaagggcgctcttgcctttgccttctccagtcagtgccagttgtgcgttaacgttgcccagactgactttgattgtcttgtatccgtcgcgaacataccatgcaccagcgcttgactcaaagttaggagcatcgcctaaatagaagttacgcggcaaccgcaccttaatcgtgttagcatctggatacgtagccatgcatggaactagctttgtgttagtttgcccaaaaccgcttgggccactccctagcccgttaggttcagtaccaattgcatactcgtagtacataacttttggttctggataatcagcttgattgtgtacgattgtgatttcgtagccgtaaagcaaatcttccagactatcagccgtaaccatgcttgcgttacgctcagcaaccatgccgttagctaactcaatgatgttagtaccgtctggggtttcgtccttgtgtttaacgcgaatctgccaaacagcgccatgcccgtcatcgtagttgtcccaacctttcgtgattgcaaggtcgttcgcagctaacgcagcatagctttgcattgtcggaacatcactaaattgccatgctcgatcatggaactgggcttgtttcagcgtttcttgaatttgttgcgtcatgagcagcagtgagttataccgtgtgaacaaaccgtccttagggtcgttcactgctgccattgcgtcgcttaatgactgcttgtacttggtcagccaatcgttaaattcctgactgtacgtttcgccggcatcatcaagtttgtccttaatcgtgttacctttgtcggttacttgcttaaggatttgctcaaactcttcgatataatcacggccagcattgcccacgtgagcgaaaaactggtcatcaataacatcaaagtccatgtcaacggttgataccgtttgatcatctcggccaatgaaacgaacaaagaattgttgccagtgtccaggaacgttgaaagtgcgttcgtcaaagtgcagcgttacccgtcccaatgcgatttgatcgttgcgatcattagcctctactggatagatatgcttatgcacgtacccttgactgtcaacaccgccgtattcgtactgccaaccccgcatatcaacgggcaaactattgctagtgatatatacaggcaaatagtcgtccgtgtcgcctacacggcctttgaaataaccgctaatatcaaggatttggtcttgatagcgggttagatcaagcgttagccgtgccttttctcgtaatgccattcattcaccttctttcatcgttcgttcaaagtgtcttcgtcaaggccatatgaatccagaaagccatcgactttgtcctgctttgcagctaacagttcaaagccttttgcgatagcttcccgaacatctttgccatactgagccttacgaatcgtttcagcaatgcttttcatatcatcagtggttgccattagcttgcccctttcagcttatcaacttcggctttcagtttgttaaagtccgcttgcgatacatagccagccggtatcttatcgttaatgattttttgcagttgttgcatgtcgaatttcagctgcgttacgtcttcgctgcttgcgccgctctggacaatcttag

SEQ ID NO: 1952 - DNA, 817 bp, Unknown
  gut microbiota DNA sequence
gtcttgcgctcgacggctcgtttccaactgatagtcggtcagccctaacgacttatcgccgatagtcagcgttgacttgtgtggttgcagtagatcaacttctttttgcaccactcgcagcagttgcgtttgtgctacatacggattgacaaacatataccggtcggcaactttgaaatggtcaaagttaggtaagttcagctcaaccgcgctgacttcccaactctcgggcactcgttgtgcgtcaatccatgctttcgcttggttcatcaggtcgttagcatcggttacttcgttaaactcgattgtaccgttgataataccgaactctttttgtagctccggtatatcgatataatctcgcccttcgttgacgctagtaatcgttagctttggcctagcagcgtttgagttgctgacctcttctttcttgctttcgtcttcggactgtgaaccatcaccgccgtttttgatcagtgcttgtgggtctagccacgtgccatcgttcgtgaatgacttcttgacggcatcgtagaaatcagctttggtaacgccaacatgcaagtgatcagtgtttcgccaaccgataatatcgccggttttgaccttatcaccaatattgacgcgaatctgaccggcactgctgaatgcttcttgatagacgatattaaaaccgtctgtactgtgcgttacaacgtagttgccaagaccgcccatgtagcccttgaaaacaaccgtgccaccatggattgcatgaacttcactgcccgggtggtcaaccgaaccaaaatccaagccatcatgaaaactgttagta

SEQ ID NO: 1953 - DNA, 599 bp, Unknown
  gut microbiota DNA sequence
gtgatcataataaaaatcttgacccgtacccccaaagttggaaacacaactttgggggtatttttatgaccaaaatcagcatagagactaagattaaggcaattgaagaatactgtacaaccgcaagctctctgcggggtaccgctcgcaaatatgggattgcgcagcttgactttcaaatctgcgtgggtatttatgcacgtttcggcaaggaaaaactattgaatccaccaatcgcaactggggatttccgcttaaatctggtaaagtggaagcaacaaaaactagtttccattccagagacctgtatccactttggcttttgttcgccaggctttgtctatcgatgggagtgtcagtacaacaagcatggagcacaggccctcttaaaactacgaccaggaaggagatcaaaacatgagctcatcaagtcgcgagaaagagattcaacgtttaaaggcgcagaatcagcttctccaaaaagagaacttatccttaaagattcaactcgacgcctcaaaaaaattagcaaccttgagaaagcatccaaaaaagaacttgcccaagtaatttatgacctcgggcctagaataaaaagt

SEQ ID NO: 1954 - DNA, 462 bp, Unknown
  gut microbiota DNA sequence
ggaagtaaattggaggaccaaataatgacgaagcacagttatgacaaggaatttaaggaacaagcagttcagtattacttagataacaaggatcacatgaccgtgaatgagatgagcaagaatctaggtatcggagctagtacattgcataaatggattaagctgtttactgggactggggaatttggccgtggctctggtaattttgccagcgataaggacaaggagattgcacgactaaagcgtcaacttcgtgacgctgaaggggcgatcgaagtgttaaaaaaaatcaatcgggattctgagcaagtaactaccgaaaaggtataccgagaaatggacgttcagcacgcttcggaatcccacccttctatcaatggtatgtgtaattatgttggaatctcaagaagcggttactatcaacgagaaatacgtcgtaatcaccaattgtcgatggcagtc

SEQ ID NO: 1955 - DNA, 1631 bp, Unknown
  gut microbiota DNA sequence
tttgcattgtaagttattcaactattgaaaagcttaaattacttcatgattatcagaaatcagattatggtttaacggtgtactccgattaccatggtgtccgaccagcaaacatgagtaagtggattaagcaattcctgctcgctggattggcgggattaattaggcctaagcataatcagaagtactcattagagactaagttaactgctgtaaaagcttatctttctggcaagtatactaatcaagcaattccccagcagtatcaaattagaaatatttctcaactacatcaatgggttatcagttacaataatgacaaactccgagttaatcagacaacgagaaagcgagtcagaaaaatgggacgaaaagtaacctttgatgaaaagaggcagattgtccgatggacaattgaacataacaataactataaagcggctgcagagaagtatgatattagttaccaacgagtttattcttgggtacggaagtaccgagtaaatagcgactgggaagtactaaaagataaccgtgggcgtaataaaggaaaagagcccactaatgaactagaaagactaaggaaacgagttcgtgagctagaagctcgtgaccgtgaacgggagctgcaaatcacttttgcaaaaaaattagtcgaaatacgcaatcgggaggtgaaacgaccggacgatatcaagcgattcaagaaatgaacaatgaaggttattctattagtgaattgaccaaggtcgctggaattactagacaggcttactacaaatgactgaaacatgaaccgactaaatatgagattgaagaatcggagattctccaattgattaaacagttagaaaatgaacacaagcaaagcgttggctatgacaaaatgactaggttaatcaagttaagtcatcagattccttataccgtcaataagaaacgagtcattcgcattatgaaagaccatagtatcaaagctgactatcgtcagccaacccataaacgtattcaagcccagcaaacttacgaagctgaaaatattcttaaccgacaatttgaccaaaccgcagctaaccaagtttgggttacggatacgacggaactaaattacggaatccggcttaataaagttcgtctacatgtagtattagatttatatggtcaatattcagtaagctggttaattacacctacagaaaccgctaaaggagtagttcaagtgttcgagcaagcacggatgaaggaaggagcactagctccgttaattcatactgatcgtggtgcggcgtatacttccaaagcatttaatcagtatttagtagttaatgatgcccaacacagttattcagcaccagggacaccggctgacaatgccgtaatagaacattggtgggcagattttaaggctatttggatcgcacacctgcctaaagcacaaacattattagaactagaaggacaagttagagaaggaattacctatttcactgaaaaatttatctcagcgaagagaaatgaccttaccgcagcggaataccgttttggcaaggccaactaatttttattatttaatgtgtaaacttacttgacagggcacagtaccactcttggcgcatctgtttttcatttac

SEQ ID NO: 1956 - DNA, 1075 bp, Unknown
  gut microbiota DNA sequence
ccaggtaagccaaggtcatggcctcgctagagtggttcagcagcttcatgaccagaccaatgttgtagttggactggacgtacacgcggtaagccccagtcttgcgcattgtatgcgtgcccaggtagttgatgtccaacagatccccgactttggccatcacgttgtagaactggcgctcatcaatatgcttctgcggccgcgtggtagaaggaaacagccattccgtcgtaccctcatagccgttgcgcttaagccactgctgatacatcaccaggtccatcatcaccggcttgaggtagagagtgttccgcttgccggtcttcttgtccttgatgaacgcgtgctgcttgatggcgccatagtcatcgaaaacgtccgcttgcttcagccgcagcacgtcactgacccgcagcagcgttgccttgccgacttgaaagatggtgtagttgcgccggccagacttgaagttgttcaacagcgtgtcctgtacctgcttgagtacctcatcatccttaattggcagtacaatctgtcgcatttaatcacccctgctttcccgttaagcggaaactttcatcgatcagtctcattacgtcatcgtcgcccagctgatcgtcaagtacgactgaaatccagtacttatggttcatatggtaggccgggaaaacggactgaccatcaactggcagcgtgtcgcttttcagattgatgatatcaacgttctgttcatcatcatctttagtaacgagttcccgtcggccattaatgatcaggccaaaccatttacttgaatccagatgccggaaaacgccattatctttgttattcttggacctccaaggaaaatccggcgcgaagttatactgattataaatcctgtccgcgattcgattggcttgtggggatgcgaatggcatggtcagacagcagtgatcgacaatctgccctaagatgtccagatagccggctcggacagaactgacgaacttgccccgcattaccagcacgtcaatctggtaatattcatccccggttgagcagtcaatgacctggccatcttgtcactccactc

SEQ ID NO: 1957 - DNA, 1221 bp, Unknown
  gut microbiota DNA sequence
acattatcccaggtcagatcggttttattggctttgccggctaaaacagcttcattgctattagccttgttcaaagcattattagcaacttccgccactgtggccacatctgctttagtcgcaacgtcaggcttcccggtgattgaatcccaagtgaccttacccaataccgactgcaccttgtctttaagcagcagccacatattatcaccgtcagcaatgttaaaaataaattgaccgtcaggccccaactttggcagcttatccttgccgttaggcgaggctactagcattactccaccgcgtaaagcagtcgtactataatcaaagccaacgaatgccccggccttgactggatactcaccatttggatcagttacgcttgctgctgtcaaatgcctgcacctcactttccgtccatgcattacctacactttttgcggtgttaattttccactgcaaattggcaatcatctttgcttgatcctgggcttttctttgccgcgattcgtattctgaagcatcgaaaatcttattgccaaacgtaattgtgtcgctattgcctgactgtttgtctagatagtgcgtgtagctttgaatcttgacattgacatcaagaccatagcgatcacgtagccagccagtattaccgatttcaatattatttttgatctgactattatctgcaaacgttacccaactcattgaatattgaacatctggataatcatgcagcgagctttttaaagctgcctgcagagcgttactgtccgtaattgtgtcactggtataagcgtcttgccaaatagcaccaattcccgacttgccagctagcgaactataatagtccgcctcgcagctatactgaatagtttgattgctagaatcctgatctgaagattgctctagctgcttgccaaacccatgaattgccgtcgcgaatgatgagtaatcttcagtccacgaaatatagttagcattgactcgatctacaaataagaatgagtctttagtgccaatcgttttagcaatgtgaatcgtccggttgtcaaaccaatactcacaaccccaagcctgcgcaactgctgataagatatcatcaccatgcccagcaccaatcgtattttcgccaaaatcatgaggattgaaattcccatcaatttgatacgatagcgtcgttccttggattgctaaatccatacagctattaatggattgaac

SEQ ID NO: 1958 - DNA, 1261 bp, Unknown
  gut microbiota DNA sequence
ccatgcgctcctaagacccgcgatacatagggggttgtgattaaaggagctaacattaacagaatttggtagcccgcattatacagatagtttttgataaccttcatgatctacttgtcaaactcctcagccacggtcgttaaggccgccttgattacttgatccatgttgtagtacttgtactgacccagacgaccaccaaaaataacgtttggcgccttttgtccggccaattccgtgtattgttggtaaagagcattattacgctgattgttaactggatagtatggttcatcgcctcgtttccagtcagctggatattcacgcgtaatgatagtcttgccttcatcgcccttgccgaattcaaagtgcttgtgctcaataatccgcgtgtacggcgtttcggcatcggtataattaaccacggcgttgccttgatagttgtcttcattaagctcttcagtctcaaagtgtaagctgcggtattccaactcacccaattcatagttgaagaattgatcgatcatcccagtaaagacgatcttagggaagtttgccagatattcatcttgttgatcaaagaagtcaacccccagttcaacatcgatcaaatcgctggccagcatcttttcaacaatctgtgtgtagccgcccatcggaatgccttggtacagatcattgaagtagttgttgtcgtaagtcaatcgaactggcagacgccgaatgataaaggccggcagctcagttgccttttgaccccactgcttttcggtatagcccttgatcagcttttcatagatatcgcgaccgattagagaaatagcctgttcttctaggttctgaggctctttgccatccatttcagctcgctgctcattgatcttagccattgcttctttaggcgttcgaacgccccacatcttattaaaggtgttcatgttgaatggcaggttatacatttcccctttgtagttggccactggagaatttgtgtagcggttgaattccgcaaactgattaacgtattcccagattgccttatccgaagtatggaaaatatgagcaccatattcatgtacctggatgccatcaactttcttagtgtagatgttgccagcaatatggctgcgcttttcaattaccttaacgcgcttgccacgcttagctgcttcgtaggcaaaagtggctccaaataagccggcacctactactaaataatcatagttattcatttttatcctcttttctcagagtttaattt

SEQ ID NO: 1959 - DNA, 1030 bp, Unknown
  gut microbiota DNA sequence
cgaaagtgataagcctggttggttcacaattgcttccgtaccagaacgaagcaacaagactgatcgtgaagtgctgcgtgatattaacagtcagctgtacgagtatttcgacgagcaattcgaaacaaaatattatatcaggctactaaacaccgactatggctatctgacacgggtagaaggcacggattcgtggagcgtaacatcactcaagattgccaaaatgagcaatcaaaaagccacgtttacggctgacgaaatcaatgaaatcgcacaaagtgatctatgcgcctgcttaaaccctatggatttatggcgcgctgctgaagaagtcgaggaggattaagcatggtatcgagctacaaagggactgaaaacaacgaacagccaaagcggttgattttgaccgcaaaccaaaccacgactagctattcgaaatactatatcaatggtgtttttcggaacgagtgtgcaaagatcgattatgcacggcgaaacggaacgctatatcgagcagatggaatttacggcgaactgattgcgattgcaccagaacagattatcgacatcatagaggggcaagaagatgaagatcaagattgacgatagctattacatcactagcgacagttacaatcctgccattttagttaagtttggcattaacaaggaaaatggcgaagtcgttgagctgcggcgttggtactgtgggcgcaaactaagtgctgcgttcgatgagtatatcaagcagacggcaaacaacgatgatgaaatcaagacaatgcaagcatatgctgcactggttgatagcactgaaaagcgaatcgcgaaaatgctaaaggaagggactatctaaatgacaaaacgggcacgggaacatgcggggcttgtgcttgcgttaaaagcattcaagcgctgctatcgtgccaacgggccaggtgtttctggtccacgttggcgggcatatcgaacggagcgagaaaaggaaatgagacgttggcgatgaagaacaaactagctgttttgatgg

SEQ ID NO: 1960 - DNA, 414 bp, Unknown
  gut microbiota DNA sequence
ccaggttgaaggtgcggtaaaacgcactggaggaccgaacccgtgtatgttgaaaaatgctgggatgaggtgtgggtagaggtgaaattccaaacgaacttggagatagctggttctctccgaaatagctttagggctagcctcggagttaagaatcgtggaggtagagcactgtttggactaggggcccgtcttgggttactgaattcagataaactccgaatgccacagatttatatccgggagtcagactgcgagtgataagatccgtagtcgaaagggaaacagcccagaccaccgattaaggtcccaaaatatgtgataagtggaaaaggatgtggaattgcatagacaactaggatgttggcttagaagcagccaccatttaaagagtgcgtaatagctcactagtcg

SEQ ID NO: 1961 - DNA, 1045 bp, Unknown
  gut microbiota DNA sequence
gcctttattttgagagctttaaagttcccacgtgtaaggaaatctatgaaatgatcgcagacaagagattattgttgaagcttttgaatcttgcgcagttcatcatactgtttcgtcatccaagaaacgtaattctctcccttaggttctgattcagttacattgagaaccggaaccccattcttcttagcaagcttaaccaggttctcaaccgttgagctgctttcttgagtattgtttacaaaaaagtcaatgcggtggttcttaatatcatcttgaatccctttaatgtctttaggagaaggatctgtatcgtcttcaactgccttttcaaaatgggtatcgttaatctggtatcccaagttagtcaaggcataatcgaaaacaggctcactgacatctactcgatgattgccttcaaccttggctgcattaattttgtcattcagcttggccagctttttcttatagttgcgtgcgtttcttacataatcgcgtctgtgggctggatcaagtttggaatatttcttggcaagcagatcagcaagctttcccatcgtgtctggctgataccagacatgctcattatcgccatcctgtttgtgtgccgcttgcgttccaacgttaatcaaagccttggtgttatcgtttgctttagctgtcttttccatccaatgatcatagccaagaccattttctataactacgtttgctttagctacctgcattgcctgttttgttgttggctggaactcatgcggattggttgctgaactattaataaaagaagttacctgcccgtggctgccggcgacctctttggctacctcaccataaaagttcaagctggcaactactcgaatcggcttgtcagttgtcgatttcttattgcctggctgccaattagtcagcattaaaagcaaaattacaagcagtgctgaaaccagccccaagattccccaatgtattcttttcaaaaaaaattcctcctgttgattgctaaatcgtaatgattactatttacgaatttataagttaatctttt

SEQ ID NO: 1962 - DNA, 8805 bp, Unknown
  gut microbiota DNA sequence
cgcttgattccttgtttgttaaagaattgcgactattactttttaagccggccaatgttataattaatatcctgtcttagttattgttattttaatcaaggggagattttaagatgactagcaaaaccatttatttttgcgctggctggtttactgataagcaaaaccaagcctatcaagcagccatgacggcaatcaagcagaatccaaccattgacgttgaaaacagctacgttcctctgcagcatcagtacaagaacattcgcgtcgatgagcacccagaatacctgcacgacaaggaatgggccacggctacctttaagggcgactgcctgggcgttaccacgaccgacgttacgctggccgtctacattccggatgaagaagacgtcggcatgggaactgagattgcctgggctaaggcgcatggcaagtacgtactgctggtaattccagatgaagaatggggcaagccgatcaacctgatgtcatggggctttgcggacaacgccatcaagatgagtgaactggccagccttaattttaaccagccttcgttcaacttctacgaaggggccgtctactaaaatcattcatataaacggcaacagcgtcaaattcggcttacaaagcacgaatctgacgctgtttttttagtctaagtcaatgttttatttgcggtagtttgccagcagttcatcaaacggctgatattctggctgccagtgcattgccgcaacggcctgctctgcactgagatcagtctgggccaggccttgatcaatcgctgactgggccacggcgatcgcgacttgcttggaaaaagcagtcaattggctgaccggcggcagaaccggtgccccaggagccttgacgtcaaccaggccgccaagtgcatgcgcggcagcagccagcatctcatcattgataatccgtgcgttaacggccagcgcgccaaacccgactcccggatagattaaggcattgttggcctggccaatctggtagtcgatgccttgatatgcaaccgtagcactcggaatccccgttgccaccaacgccttgccattggtccatttaatcaggtcagctggtatggcctcgatcttttcagttgggttggaaattgggaaaatgattgggcgatcagcatgtttggccatctctttaatggcagcttcggtaaaggcattgtgaaccgttgacgtaccaatcattaccgtcggctgaacggccttgatgattgccggcagatccgtaagctcgcccgcgtcagcaaactcatctcgcgaacggacaaatgcctgttgtttaggcgtcagtcccggcgtattctcaaagagcagtccttgacgatccaccagatagaaatgctgcttggcttctttgggactcattccctgcttgatgagctcgttgtacagcatcttgacgattcccatcccggcagtaccggcaccaaatgtcaagaaacgctgctcagcaatcgactgtccagaaatgttaagcgcgcccagaacaccagccagcgcgatgacgccagttccttgaatgtcatcgttaaacgtcaaaatccgatcctgatacttgtccagaatctgggcagccgtaccgcgaccaaagtcctcaaaatgcagcaggctcttgggaaacagtttttcaactgcggcaacgaatcgatcaatatacgcaaagtaagcctcaccgctcagacgctggtgccgcatccccagatattcatcatcggccaacagctgctgattgtccgtccccgcgtcaattacgaccggcaatacctgctgcggatcaataccggccgctgccgtataaaccatcagcttgccaaccgcgatgtccacgccgttaacgccccagtcgccgatccccaaaatgccttctgcgtcagtaaccacgatcagacgaatatcccgctgatcagccgcattctgcagacgctgttcaatcgtatctgggtcgtcaaccgtcagataagcggcatcttgcggctgcatgaaccgttcattatagcgttcgatcgcctcggcaattactggatcatagacgatcggcatgaattcatcaatgtgccgaaccatcagattgaaaaacagcgtccggttatgattaaagatctccattaaaaaatgacgcttttcaatcagtgatcccttgctttggtacagtgcatacatttcggcagcctgctcatcaatcgttttgacacggggcggcaagaggccaatcaagccatatttacgccgctcatcttcagtaaaagcagtaccgcgatttaaaaacggatcattaagtatttgaaatccacgcattagactccatcttctttcaacaaaattcatctttatctcttatctcgcaaccgattataaaaactggccaactgcatagtcaaatatacccaaatccataaatttttttgatatgataaatgtgaatcctatcaggacggtgtttatcgatgaatattaaagaattatattattatcatgatttggttaggaccaaaaatttttcccaggtcgcatcagatttcaacatcagtcagccaaccgtcaccatggctatcaaacgacttgaagaaagctttggaacgacttttttcatgcgtgatcgctcgcatcatcaattgacggttaccagtaccggccttcagtttgaccaacacgttcagcgtataattgaagaacttgagattgcccaaaaggaactggcccgtgccaagcaggaatgcatcagctttggcctgccgccaatcatcggcagctggtactttccccgcttcaccccggcgctgctgcaggcaggactgctcaatcagctggaagtcgttgatcatggttcggcctcactgctgcagctgctggcaaaaggcgagcttgatctggcgctgttaggatcactgcagccatttcaacagccaagtctgcgagcccgtgtgattgataaggcaccgattagaattattgtggctaaggatcaccctttggcagcttttgaagatggcgtatcatttgctcaagccgcacagtatccgtttattacgcttgatgacgaatacattcacgctcaagctttctgccaggctgctcatctggctcgtgtgcgtcccaaaatcgtttttaaaaccagcgatgtgcagattttaaaagcgttggtcgccaatcattccggaatctcttttttgacggatctggcgctggatgacaatgatgggctggtggccttgcccttgacggatggcagtcagcccgagtttatcatttcgctggcggcccgtgccaatcgactgctgacgcctaacgctcaaagactatggtcgattctggagacgccgctttataaatgactaatatagcaatctgaaaggaaatgtttagatgaatctactgacgttaccggcttatcgcttggcagaaatgatccgccagcaccagcttaccagtcacgaactggttgaaatggcactaaataagattcaagcagaaaatcctaccctcaatgccgttgttcatttaagagcagcagcagccctaaaagaagccgaccagctaaaagatcacggtcagccgtttttaggcgtccccttgctgttaaagggactcggtcagcgaatgaaaggcgagcctgatactaacggcagccgactgtttcgcaatcaactggctgctgaaaccgataattttgtcaaagcacttcaaaatgccggctttatcattattggtcagacaaattttcctgaatttggctataagaacattaccgatgccaaactttttggtccagcccgcaatccctggaatccgcagttcacgcccggcggctcatcaggtggtgccggcgcggccgtggcagctggctgggtaccaatcgctgcgggcaatgatggcggcggctcgatcagaattccggccagctggtgtggcgtcattggcttgaaaccaactcgtggccgcatgccggttggtcctggcaattggcggtcatggcaaggcgcgtcgatcaatttcgcgttgacgcggtcggttaaagataccgcgcttttgctggagaccctgcaaaccgtccagtcccctgccgtctttcaaaccccgctactcaatacgaatgtcttgaaaccaaacgattactcacgtctaaggatcggctggaccactacctcgccagtaaaaaccccggttacagaagatgccgtgcaagccgtcaaaaacgcggtcgcctttcttcaggacctgagctatgactgtcagccctatgaagatccgattgacggccggcagctgattgatagttattatttgatgaatgaaggtgaaaccgcagccatgttcgccagcattgaacaatcaatcaagcgtcccgtcaaacaaaatgagattgagctggttacctgggcactttggcaagccggcaaaaacgttactgccgccgaatacatcaatgcattgaacgtttgggatcaggctagtactctccacgctaagctgcacgaacgatttgacgtactcttgactccgacaacggctggcagcccctatcgcattgatgagccgcagcatgccgctgtctttgatgaacgtctgcaaagaatcaatcagctgacagcacaagaacaacgccaactgatatatgatcaatggcttgattcgctaagccgcacgccatttacgcaggctgccaacctaacaggcgagcctgcgatctcattacccactcacattgctaaagacggcctgccgcagggaattcaattaactgccaataaaggtcgcgaagatgttctgctgcagctggctaaattatttgaggaccacgggatgcttaaaacgctcagctgattcatcgctataaaaatacaacagccctcaaaacaccttaaacatcaggtgccttgagggctgtttgatatctaacccagtcgcaagaatcgaacttgcatcgtttggcaactgctcttcctttgagctagactggcattcagacttgcgcattggtttgcgtggcgtgaagttaatagttgattaggcaacgtgctcgacaaggcttagccaagacccatcgatcatgacctcttgtcgcttaaacaaggcacgggctgggatcggtacccaccagcttttggtcagcataagcattcatcaagtattgattggatgccgccgtttgaccgactcggaccgacctcgatgcttatagctgcatcactgcagcatcacggcgaacgtttttagtgacgttccactttgggccttaggttgtcaggtctaattgactgtggatgggatattgcaaacgcgcatcggatcgtgccttaacttattaacctcttacctgactgactgggaacacggcttttttttcaccgcaatcaagactcactacaagccttgatgctaggaatcaaacagctatcgttgcctgacgccttggttcattgataagccagccagctgggcgactctgccaaagcctcatgcaccagtttcaagtcaatcctcaaaataaattgagaaattagtataggctacagctgataatccattatgtcaataaaaaagatcatctatcgaaagcagatgaccttccataaatattttgatttgagaactaaaagtccagctgcagcttttccagttcgctccaggcagcgttcttggtttcgtcagtcggtacggcctcgccatcaactgagatgtcggcccgccgcaacaagaccttaccatcattcaagactttttgaatcaggtaggcttgagcacagcgccagtcgttgatgcgaaccaatactgcatcattcatggcttttacgacttctttctttgtcatgatatcaattcctctctctgatgatcaacgatatcccgatgacgatcatcaagtcattgcctcaacaccagttttttcagttgtcaagacgttttgagatatcggaattaaattattccatctttgctgctgaaagtcaaattaaagttgtaaacgtagccgattcttaagctggtttatgaatagctaaagccggtggtgtcttattttgtttttgtagtttagttaaggtaaattactactagtttattaaatggaaattgatttcaatttctcactcccctgctcacaattgagactataataaaagcaagtatttgattaaagggggatccattatgcgctatgactatgatggtaaaaacgttatcgtaaccggcgcgactggcggaatcggtaaggaagtcgctaaaggcatcattgctggcggcggctcagttgccttgattggcctaacgcttgatgaagcaaataaagtcgctgctgagcttggcgagcacgcccatccttatgccatggatcaaagcaatcgcgatgccgttgatgcagcctttcagcagatcttaaatgactttggccgcattgatgtcttgatcaacgtagccggcatcatcagcgccaaatcgtttgatgaattatcgccagctgaatgggatcggacgctggccgtcaatctaactggccctttcaataccgttcatgctatctgggaacacttcaagaataatggcggcggccgaatcgtcaacgtttcttccgtagccggtaaaattgggggcggcttgttgggaacgacggcctatgcatcgtccaaagctggtttaaacggctttaccaaggcaattgctaaagaaggcgctaagtatggcatctacgccaacgcggtctgtccttcctttacccacactggcatgacggccgcattggaagctgatccccaaaaacggcaacgggtcttaagtatgattccgcttggccgtggcgcggcaccagctgaaattgctcaaatgatcctgttctttggctgtgacgcggccagctttattaccggcgagatcggcgactgtgatggcgggatcgtgatggacggctagtcttgatcaactaaaaggcactaaaaagaggcactcggctgctttgagcagaatgcctcttttatttatttgatgcgccatcttaaagtcctgcaactattgggttcgcccatcatcgttacggtgctgccgtttccagttcttgatctgagccaggcgccgtttaaagcgaatctcattgccctgctcggttgggtaataatactgatgccccacgagattagccggcatcgtttccatcgcagtcattttagccgccgtatcatgcgcgtactgataatctttgccatagcccagttctttcatgagtttggtggttccattgcgaatctgcagcggtactggctcattggccgttttttcaacgtcttcttggactttttgcgtggcagcatagaccgcgttggatttaggcgtagtcgccagatagattacgcattccgtcaagtgaacgttgcattccggcattcccagaaactgacaggcctggtagacattgaccgcgacgtttaacgcattggtatcggccaggccaatgtcttcactggcaaagcgtaccaaacgccgcgcaatatataatgggtcttcgccaccatccagcatgcgcgtcagccagtagatggccgcgtcaacatcagagttacgcatggatttatgcagtgccgagattagattatagtgctgctcgccttttttatcatatttaagcgttttatgaccaagcagctgctccaacagattgtccgctgccgtaagccgaccgttttcatcaaccttaccattatcaaccagcatttccagtgtgttgagagctgtacgggcatcgccatccgcaaaaatcgccacttgtctcaataaacgatcatcaatctgaatcggacgcgcaaagccagtctgagccgcgcgctgcagcatcttttgcagatcatccgttgacagcggctgcagcacaaagacacggcagcgcgaaagcagagcagaattgatctcaaacgatggattctcagtcgtcgcgccaatcaacacgatgctgccattctcaacgtaaggcaaaaatgcatcctgctgtgccttgttgaagcgatgaatctcatcgacaaatacgatcgttcgctgaccataagccgcgttttgctgcgcttgggccataagctctttgatttctttaatgccgctggtaacggcactgaacgagatgaattccgacttggtatgccgtgcgattacccgtgccaaagtcgtcttgcccacgccaggcggcccccaaagaatcattgagggcacgcgatcagcatcaatcaagcgacgcagcatctggttaggtgccaaaagatgctgctggccaacgatctgatccaaggtctggggacgcatacgactagccagtggttcgtgcgttgcctgttcaaaaagcgattcttgatgcatttgatcacctcttaaaaaagccttccgcatgacgttatgcaaaaggccattcatatttgattaattatagataggactgcagaacatgcaaaacggcatcatgattgttgtcttcatcagccgtaaaatcagctgcctgtttgaccgttgcactggcattccgcattgcccagccgactctggccattttaagcatggtcacgtcattgccgccatcaccaaacgccaccagatcatcagccgtcagttgccattgagtaagcatcttttgcagcgcttgagccttatcaacaccaggaatcgttaaatcaaccgaaccgttgccgcttggcgtgatctttaaccgcttgccaaaccggctgcgcaaggtctgcagctggcctttcagtttgtctggctcaacaacaaacgatatctgatagaaacgatcggctggcagctg

SEQ ID NO: 1963 - DNA, 1700 bp, Unknown
  gut microbiota DNA sequence
atgacctgaaagcgacggcaccagatccattttctcgaccataaacggaatcagttcgtcaactaccgtaggatccatggtctgcaccatcagctccctgtcatgatcaataacgtgcgcgccgttttcactgataaaggtcagctgttcatgccgagttggaaagtatttcaacagacactcatactgatcaccgctagccacgatgacatgtacgtcttgggccaatagtcgatccaacagctggctgaacagtttgcgatcaaaagtcttgtcatcacgcagaaacgtgccatccatatcaaaggccaccgctttaaaaggaaatgccattttcttctccttcaaattatcgtttatgtcaattatgacacaaaaaagctacttatccaaatgagccgtgtcaaacagatagccaaagccacgtgccgtcttgatccattcagggcgatgcggatctttttcgattttatcgcgcaggtgactaatgtgaatgtcaaccatgcgggaagtgcctaaaatatcgtagttccagacgccgttcaacaattgttcgcggctgatgacctgattgcgattatcataaaggtatttaagcagcttaaactctttcggggttaaaattactttttgatcattgacataaacacagcgatgatcaaaatccagtcttaaattaccaatcgtaacgtcatcgcggtgagggcgtcgtggcttgttgttagatgattcttctgagtttaattgactatagacccataagcgctgtctgatcagtggtaccagcagttcagcatcattgagcgatcttggcaggcagtcatcggcatgaaaacgaaacagcttgcgtcgcaccttaggcttatacgcctcgcccatgatgatgatcgggccattcatcatctgacgcatgacgtccagcgttgctaaaatcgtgtccaatggcgtagcagcaaaatcccataaaatcccactgtatgagtgcttttggattttggcaaccccttctaccgcggtagtcgtctggtgcagcagccatccctcatccgcaaacgcggcggcaattgctccgtataaagccatgtctttgctaatgagcagaaagtgtcgctgctccatgattctccatccccttttctcttccaagtctaatcaagtctaattaaaacgcaatatttacgaaatttcgataaaatccgataattttacctcagatttacatattttttacattagacaagtatagtaatgaaagaaaaatgccccataaaggagagagatcatatgaacgagatttttaacgacgagctaaaaaaactgcgtggccgttttatggaaatggggatcaacacctccgaacagatttataaggcaaccaaggcgttcattgatcgcgacgtggtactagccaaagaagtcggtgaaaacgaccgcttgatcaatgatggcgaaacctatctggaaaagcacgcctttaaactgatgaatattcaaaaaccaaaagaaagcgagttccgttcaatcatgagcatcctcaaggccagctcggatttggaacgaatggctgatcatgcctctcatatcgccagagacgccatccgcatcaaagatatggaccaacactggccagatattgaaaatgacatcgctcaaatggctgaaaccgtgcgtcacatgttggaaaaagcccttgatgccta

SEQ ID NO: 1964 - DNA, 851 bp, Unknown
  gut microbiota DNA sequence
atttttgaaattgtccactgcttggcagacaacacggttcaatatggtgtgcttacaatgttactttgtttatacttctgtttttttcattaaagagatttcgtttctcactttctctggccattttccaaagaaatagtcctctataacattccaaaagtctcgcgtatagttaataacaacttgttgctcaccatttcctcgacgtggaatggtaaacagatatttaaacatctcaactgaaatataatgttttcgtattacatcatttaaaatcaagttttgatacttgtctcgattcatcaaagctttttcaatagagtacatactattaatcctaatataaatctgtggactatcactacttacaacttcataagtacaaaatccaaaactttctagaagtcccagcgtaactacttctgaatttactcctttagttttgctattggtaaaaattcgtggacgataaagtgtagtagtagtattttcagattctcccaaccccttatttttacacttaaataacaaattaagcgcattgctttttagtccatcaagtaattgattgtagtttggcaggacgcgataattaatcgtacctccacgttttttttcttcaatacctttaatttgttcagtatcttgatattgtagtagcgtattaactattgcatcactaatagacttagattttatttcattatatttttttctttttgaaagtattttgataaatcattaccattgaaaaacttacattttacttggcgctgcatcaaaaattcatctaaaacttttaggatatttttaaaatccgcaaatgtttgttttgcattactcttaagttg

SEQ ID NO: 1965 - DNA, 3731 bp, Unknown
  gut microbiota DNA sequence
atatttaaattgtgggtatgatatgtctttgtaatggtcttcccaaaagcgcgttaagtcaattgaataaacagtgtcataattagtctccttagttatagcatcccattttgaaaaatatctattataatgatacttactccaaagatttcgctgctcattattgccaaatactaattcttttccaaatacttgcttgggacgagcataaaaagcagaataaccatacttacgttcaaaatctttttcaatcattaacaacactatcttcaatcgattatctatacttgagtcttcctcactagtcgtattctgcaaaaggtatcgaaattcatcagcattcattactaaattgcgagtattcttagagtaataaatttccttaatcttttccattacatctaggatctgcgtttttcgaatagctgacataccatgtaggcgttgaatttcgttaaaatcattcctgaagtaatctacccaagcatatcctataatttttggatctcgcgcaacacgccctatttcttgaatatagtccaatacatcaccggtcggcgcataatgatatacattttgaatatcaggaatatctactcccattccaaatgctttagtagccagcataaatattttatctcctgtacgaaagtctctatatgctcgatttttttcttctttatcaaggggaccatagtagactccagtctggttatatatttctggatactgtttcaaaaaattatacattctttgtaaggttttaactgtcggaaaataaattagtgtcttcattcctttttctttaaaatcgcgtagatgtgcaagaatcagattaaacttagctgacaaataatcttcgccatttaaatcttctcgagacctatcaaagatttccatgtaggtatcgtcacgctttaccttaccgaaatatgtaatggggcgaatcatattcaaactgttgcaagtatcgatatacatattttctggaccatcataaatagccgtggcagtaaacgttaccaatggaaaattatatttcttacgtaatttttgtagataaattcccatataccagtagtcagccctaaaagactttccccaagtagtaacaatgtgggcttcgtctacaataaacatcccaatttttcgttcaccaattaagtctttaatattagagtgattctgtaatgtttcagtagataagtaaagaatatcaatatctccagcctgaatcttatcaataattttatttttatcaacaattgacaaattagaattaatggtacctactttattatattttttcttcttcatacctgcgacttgatcttgcattaacgaaattagcggcgagataactatcgttagtggacgaacctttggataattttctgccatgtaaattgcaggaatttgaaacattagcgatttaccagcaccagttggagaggtaacaaaaacatcttgatagctactaccattaatagccttctcagcttgagtcacaatactatcaataattcgctcttgggagatttttacaatatttctgcctctgtggatgtcctcatacatctctaaatctcgaaattcttgatatccccagtattcagacataattttatgatactgtaacgaatgaacaattggcttttgctgatctttaataaccgtaaaagcaatactagttccattgggcagcaattcttttaaaatgcttagtcgatagggaatttcattaggtaaataactcacatctaatgattcagaaaataactgtatatgcttcttttccctgccttcgataatctttatacttaggtctagtaactcctcttcagaattaatctctatatgatcagctgtttcatcaatttcttcactttgaccatcaaataagatatctggaaatatttttataatttgtttttcttctggttcaatctgataagctacaaaataatgattatctaaagttttaataacaccaccatagaatttattaaacaaatccaatttattttttgttatttcatcatcaacttcttcgccataatttgtataggcaagttcagcaaggtctaaattttgttgcaatggaaaaaagttataaaacaaattattctttaaaaaacgaacatcaaagaacccgtcaattaattccctacattgactatactgttcatagcttagccacatccatgaatagttgctatcttcgaatcctttaacaatatcctgttgaatcgattcttctgcgtatttacaaatttcaaataaagaagctttttgagaaagtctagaaaggttattttttgaatatttcatgcttaggtcaacacccaatggtataaaaagaagctttctattactaggtattgattttaaattagcaattactgtatcaattctcaactgtagttcttcttcgtaattactcatagtcttactcccatttataagtcctcaattttctcattgccttgttctggatttgacgaatacgctcacgagataccccaagtatctgtccaattttttctagggtcatttgttcttgaccatcaaaaccgaatctcattttcaaaacttttacttctcgtggctttaatttttcatgaaagattctctctatttcttcattcctatccttctctaaaacaatatcctcaggtgtttgctccccttcatcactcataaagtcattatcatagctaagaattttttcaagcgttgttccaccatcttcattattatctacactaagagaaatagatactacatttctaaaagctaaagccatgcctctcaaacgattcagagtttcaaaatcagtcagactcattgcttttattatttctgcatcaggaattttttttgcttctaattttcttaatttaataattctctcttgcacatgcactggtattctgactataaagccttcatttttggtttgtctatcaatactttgctcaatccaataagtcgcatatgttgaaaattcgtttcctaaactaggatcgaatctttttattgctttatctaatccaataaaaccttcctcaattaaatcctctaaggttaatgatccagttcggtgcctatgaaaataatcatttgcaatttttttgactagctttctattagctaacaaaatggtctgacgaattttatctttttcctcaagtgtttgtttttccgaaagatacttttcaaataactctggattatcatgaaaatcataatccattttactgttttctacttgagctttaaactcatcacttgttatatcaatattgcctttatcaccaaaaagaatagggccggctagtgaagatgacataacagtagcgctatcatcacatctattattaactgcatcatcttcttcataatcaatatcaatgttatggtctgccaaaatattgacaatatcatagccttgccttcttgaaaaatgcgataatactttctcttctaattcatagccgttaactcttccattgtgtaaatacggccgaaccatttccataattgtaacttcattcattttttcaccacactaaagtaaaaaactccatccatagtatagtaataaagtcgaacaaaaataaagctttattaggcaatacatcattaatatccgattagctaagcaagcgcttactttagcgcctattgaataaccccctataaataaatttttaatttaataggaggtt

SEQ ID NO: 1966 - DNA, 639 bp, Unknown
  gut microbiota DNA sequence
tgataatgtctttaaatcttttggtgggttaaagatggttgcgattgcagctattattgcaattgttgctgcattagtctatttcttcactcaaactgaaaaaggacgccaaatgtggcaatcttttgtttcgtggctatcaaatgcatggcaaacactatcgacaatcgctacatctgtttggggggaaattagtgatgttgttagcgttgcttgtaacacggtaaaaaatgtattgggtggtgttagccaaactattcaaggctttataaccaaaatgggcggcattggcggtattgcttccatgattgttagcaccttaaccaaaataggattagctgcattagggatttctggcccttgggggcttgctgcgggggctgtcattagttttgtaacagcttggctgcaaactggacaactaaatgccgatggtattactcaagttttcgatcagttaagcaacactatcacaaatgtaactaacgctattgttgcaaatattccgctgattgttggaatgataactaatgtcattgtaggtatcgccaacagcatttctgagaaccttccacaaatcattgcgattggtacacaaatcattacgtcattaacaacggcgattgtggcagcattgcc

SEQ ID NO: 1967 - DNA, 324 bp, Unknown
  gut microbiota DNA sequence
acggctgggatccgcaatgtccgcgccatgattgccgcgtggctggtccggccgcccagatcggttgccagccccttgacgaacttggcatccatctgcgaggtatcggatggcgtgatctccttggcaatgattacgactggctcactgatggaggcgatgtctggcagctgcttgcccagcagatggctcagcgcccgcttggcaacgtctttaacgtcagcggcccgctcctgcatatacttgttgtcggtcatggcggccagaacattggcaaaattggtcgttacgtccgtcatggcttcttcggcggaaacgtgctgg

SEQ ID NO: 1968 - DNA, 1243 bp, Unknown
  gut microbiota DNA sequence
taattcatcgataaacgcttttggattaataacctttggatctctaactaccggcagaccttcgacatagccaatctgtttgatcagactatgtaaatcagggtccttgacttcagcagcaatcgagttaaagcccaacactgaaccataaattgccaaagccgtgtgcagagggttcaagcagaccgttaccttcatctcatcagctaagttaaccgtgtcccgatctgtcatgattacgccagctgcttcaaattctggtcgaccattaggaaacttgtcttcaactaccaaataatgtgcctcttcagtattggcaaaagcggcaatattggtgtgtttcttggtatgaacaatgtcgatgccctcaatccccaatttcttcaagtctttttcgaccgtttcggatgggttcggcgtaattcgatcaatcatggacaacgggaaagagaccttagcatcatctgagagccaatcgataaaaccttgatctgcaaagccatttcccagccaaccattggcaatcgttaaaatgctttcttttaaccggtcaccattttgcgagaagttatcagtgctcagcatggcaattggcttggcaccattttgataacggctcagcagcatgctggcaatcatcgacatcgtattttccggctttgctgggccattttccagatcacgtgcaactgccggcaggtattgaccatcaggatttttaacggcatagcccttttcagtaatagaaaaagaaacaacttgcaaactaggtttggtaaagatctgttttatttcattgagaccgcttggatcctcagtagctcgacctgaaaagacagcctttgctactgaagcaaacaattcaagatctttggttccatctgctttggtaactacccgcagaattcgattattgtacggacgatagacgccgttaatcgtaccgtcatcataggcatccgaaacgataatgccggaatccattttgccttgatcaattaaatgactggcaattgctgcatgaaaggctcggaataaattgccgccgccaaagtgaacccaacgcggattggtcaacgtattttgagcaatttttttatcatcgtagtttggcaccttaatgccgacttcagtaaattcatctttgtttttcaaataatcatctgtgatattaaccattaggaaaacctccaagctttcttagcaagctgatatattagtaattcctgaacacggtttcatt

SEQ ID NO: 1969 - DNA, 9269 bp, Unknown
  gut microbiota DNA sequence
tcgcaaatgtttttgcatcaatcgtaatgatcgatgaccctgcacatttgtgttcgtcgaaactgtattcagttttcaaaggtctaccatgtaaccgattcaatcgatcagttacaacatttattattttaacacttgttagttatttgtcaataactttttcaattcttttttcaaacgttttaaacaagcgactagaataatatatcatgaagtcatgtagctgtcaacaacatttttaaagtcgttaataactgttagaagcaaatccaattgtcatcagcgtctgcctcatcgacaacgataactactataccgatattctgagctttcgtcaacgctatttccatattttttaaacgttttttcaaaacacaaactttaaagctccaatactataaaataattctcaaattacgatcgatatgatccaaaacaagtattattgtctatgttataaaaagggacattactgaatgatttaaaattgtttacgtttttgtttaatttgacgattattcttcaaaaaggccctaattgctgttaaaatcttagcgataattgaatataagaaaaataaaaggagttttatatgtcgactttaatcgattttatccttcacattgacacccatctgattcagattgttaatcaatttggcgatgccagctacctaatcctgtttctgattatttttattgaaaccggtgcggtaattttgccatttctgcctggtgactcgctactatttgccgccagtgcactagctgccaacgcaagctaccacttaaatatctggatttttgcatttggcttcttaatttcatgtcttttaggcgattcaattaacttcctgatcggtcaaaaaatcggcaagagcctatcaaatcactcatggttcggaaaattgatcgataaacagagtcttgaaaaagcagaagcattctttgaaaaacatggtgctcctgcgatcatcctggctcgatatatgccaatcattcgtacttttgctccttttgctgcagctggatccggtttcccatatcggcgttttatccgctacagtatcgttggatgtgtaagctgggttgccatctgttgctcgtgcggctatttctttggtaatctgccttttgtccaggcccatttctcggcaatcattctggcaatcatcgtggttaccctgatgcctgccgtaatcagctttattaaatcaaagctctcaaataagtctgctcaagtaacggttgattcgccattgaatcaaactcaagagcaggatggtgaatagccaccagattccaaacagcatcgcgaaaaaatcatcgggaaacaaattaataattggattgctggtcggtgaaaacacccaattcatattagaaaaagctagataatggaatttgataaaaaagtcatcaaaatctacgataatcatcatcccgacgactatcaacaatgccaatagattcttcaatggacctgacagtttccaaagctgccaggtctttttttcatactgtatgattccatatgcgccaaacaatgccaatccagttatagcaagtgccgttatgatcaaatgtctgacatcgctaaaatgctcaacggcaccttcagtcattggaatcccggctaagtgcaaagatggctgtggccaaggctgaacaagatacattaataaatgacgataatcttttaaaaccactgcatttgaaagattcaaaaagtgcgatggaatccttaaaatcaacggcgagatcatcaagactaaaaaaagggcaagcccagccgccgcgacagttatcaacagcaacgcaaggattgtcccaatggcttcaactatttgttttctaaacgttccattcatcaagcgtcttcaccgtataagttggtttaatttccacatgttcaatatcggctggctttgaaagaccggtatagacaaggagcgtgtcaactccagtattaataccggcttggacatcggtctgatagttatcaccgaccatcagcacctctgattttttcagtccactagcctttaaagccatctcaacaatggttttttgcggcttgccgatcatgattggttcttgctgtgtagcatagcgaaccagttcaaccaaagcaccagcactcggaatcatcccttcttcgcttggcagattggtatcgccattcgtaccgataaaaacagcaccagctcgaatacaaagcgttgcaatcttaaaccgctcataagtcacgttacgatccaagccaacaacgacatagtcaggatcttgatcagtcaattgcatgcccttatttaacaaagcatcttttagtcctcgttccccgattacgtacactcggcgcttttggccagcatgctgtaccaaataatcagcggttgccattgcagaggtatatacattagccgccgttacgttaatatcatgatttgttcttagattggcagcaacttcttttggactgcgggtactattgttggtaacaaacagaatctctcgctgatgctcctgcaagcgcttgataaaacgtgcagcagctgggattctttccttaccgcgatagaccgtaccatctaaatcgataaaatagccttgatattgtttcatgctttctctcgcttattattcttattttttactatcagtttttgacgatgcttaccggtttttacgcgacgcacttcctggttcttacgttcttttaaaggcggctgcttgagcgattgtcgaacctctttgacagctgcgcccgactgatgttttttactgttcccagaaactttgcgccgatttgaaaaccgtctgccagaccgccgattctttcttggcagctgcacctcttgattatggatgatgaaataggcacagccaaagttgcagtcttcatacagatagtcttgaatcgtctgcatcccctgctcaggattatactgtggattatcagggccatagaagccacgcaaccgcagctgtccatatccccaatcaccaactatatagtcatacttacccagaatggaactaaaacgatcagcaagtgcctcagaattaaaagcgtttttgtagtcagcaaccagcgtgtaaggatgattgttgatcaaaaaatgctgctgatcttgctgcagaacccgaaaaacgccttgccgctgcatctggcgacgttcaatgtattcttcaactttactgcgattgatatcagccactcctttcttgttttaataaatatccaaaccattatacgcactgctatgatctaatgtcgagtcagcttttctgcctttatccgggcaatcgtctcaacttctgccagtgtcaagggctcaccaaatgccggccgtttttttagatattccagttctggggaatcaatcccgacattaacgttttcttttactggaacggcatagtgatgaatatgaccatgcagatttataatccgtggtgcaatccctagcatcattggataatgcgtcagatagtactgacaatgattatacttaatcaaagccccaacatcatgaaaactgaatttaggctgaccatttaagtcataattatgagcagctagatatttaaacagttctctgcgatcatggttgcctttgatcagcaccaggtgaccatgcagcgcatttaaaatctcaaaaatcgcttcatcggctcgcttggctggcttggcaaaatatacggcaatatcgcctaaatgatatacaatgtcattttcggcaaccttagcattccagtgttcaataatctgctcatccatctgttcggtatcagcaaacggccgtggcgcaaaatcgtcgactcctaacagatgctgatccaaaaagtgggtatcagaagtcacaaaacgcatcattatcactcctaaacacaaaaatgggacgctcgccagcgtcccattttgattttaacagcaactacttgctggcttttttaagtcgttcgatatcatgaacgatcattaattcttcgttagttggaatcagcagcgtcttaatcttagcatcatcagtcgacagatcacgctctacgccacgaatgttgttcttttctgggtcaattgcaataccaaagtagcccagcttatcagctacggcctgacgaacggtgatgctgttttcaccaacgcccgcagtaaagacaatggcatctgctccacccagttcagcaatgtaggcgccgatgtagcgaacgatccggttgacatagatgtcccaagccaactgtgcgcgctcgttgccttcgtttttggccttttcaacatcgcgcatgtcgctggaaactccagaaattcccagcagaccggatttgtggttaagcatgtcaaccatttcatcgctagaaacgcccagcttcttttggacgaaagcaaccagcgatggatcaacatccccagagcgagtggccatcgtaaccccggctaatggcgaaaagcccatcgaagtgtcaaaggacttgccacccttaatagcagtaatcgaagccccagcaccaatgtggcaggtaatcagctttagttcttccaatggtcgaccaagcatttcagctgcccgggccgctacgtaacggtgactggtaccatgagcaccatacttgcgggcaccgtacttctcgtaccattcataaggaacactataaagggcattcatttttggcatattggcatgaaaagcagtgtcaaaaacggcaactgcaaatgcatccggcaagacttccttaaaagccttaataccttgtaattcagctgggtcatgcaatggtgcatattcagccagcgcatcgatcttattcataacgtcttcatcgatgacaaccgaatccttaaagtattcaccaccagcaacaatccggtgaccaacagccgtaatttcatcatagctggcaacgatcttcaaatccagcagctgcttgagcagatattgaactgcagcttcgtggtcagcaaatggcttatcttctttcagcttttgaccgtcaccatacttgatttcggcatggccaacttccagaccgatacgttcaatctggccttctgctactacttcttcgcttggcatgtcaaacagcttgaacttgacggtcgaactgccggcattaacagcaatcgtttttgacattggcgtaatctctccttttactaactctcaacttttaagatttgcagctacccatgcatcaatctgattcataaaggctacaaattcagcacgcttcttgactgacggaaaactgcccaacaaaacctgtttggcttgatgactgccaccaccttgacgctgcaaaagaagaatcgatttttgagcagcttgattcttaaaaagatcagctggcagattgatcaatccttggaaatgcgctaccgagtggatccacttaacaaagcccatcgtctcttcagtctggaagagattcgacggtaccaaaaatacgccaaagccgcctggtttaaggtaattcattgattgtttgatcaacagatgatgaacgtatgaatgtcctttttcagcacgggtctgataattttttgtattttcatcaagcgggtagtatccaactggcagatctgaaaccgccaaatcactttgcggaatcgtcaaaggctcaatggcatcttggtgaaacagctcaaccggctctctttgtaatgagacgctgacgctggcaactgccagcagctcatcatcattatcgatcccgtatccctgtactggctgatcaatggcctcttgcaggtggttcatgaccgttgttagcagattagccgtgcctactgccggatcaaaaatcgtatatggatgatcgcgatcaatgattttttcaatcaaataggccatcatgattcccaaagtatcgggcgtcatttgatgattggcttgaatcgtatccttacgaatcacttttaacagatccagctgtagaagacgtcgtactgtctcgcggtcggtatgcaaaagatccagctgctgatatagcttgtttaactcagcaaccgtctctggcttaggcaaaccatcctcgacacgaaccttgccattatcaaccagattttcagcattttcgagaaatgcatcaagataagagctgttcaaatctgcctgtaacagttccgttgcgcgatcaaatggtacaaatagttgttctggtgttgccagttttggtcactcccatcctcattcgtcgtacgaaattagtttacctatttttaccgacaaattcaaggaagcgcctcgtcttcttgaaacttaaaagatgatccgtcattgagacagacgattgtcagcctgtcctcgtgcttgacgattcctttattaaagtccgcattatctttgccatcagtcaaatttagcattgtctgtgcaatgaattggtcgctaagacgatgaatcagttttgcttggccagcctgatatcgatactgagccaaaacggctgctgtcgtaatactcagcatgatcatcgccgccagcagcgtactgcttttgcgacggtgccagacagataaccgctgtttgccgatatccattgcttcttttcacctcaatttctaaccgctgcctgccaagctgtttaaatgttgccgcttgaacctgataaagcattggcaaataaccaccaccatgctgcagccgtaggaatattcgaccattttcagccgtcagctcataatacttcttggtggcagatccatacagcaccgcatgctgttcatcctgacatcgataaagactgaaatgccgatccgataattccagctcggttacgaataaataccaatccgtcggcatatccaaagcacgctgattgacttgatcaacaatcttgatagtctgccccaacgccaaaactgtcaccatactgatcagtagcgccaccatgctttctgccagcgtaaatgctgatcgtctcaagccattaccgcctttccagttttagaatgcactttcccgatcgttcaacgactaccctactatgatcagcggttgccactagctgagctcgaacgatcctgacgcggccttggtggcttttgagagcatcactggcctctttagccagtcgacttgctgccagctgttcatcagccagttttctttgatgattcaattcatttaggccagtcattaaacaagcgatactgagcgcggcaatcgccaatgccgttacactctcacccagcatgactgcccgatgcctttttttgcgttgcatgtacatgataactcccccatgccaactgaattctgatttgataatccgtattgtccaaggttgaaacaaactcctctgtctgtggactgacatagcccgtttttttcatctcgatatcattgaaccgtctgaccgacaacgtacttggcacatttatatgctcggtgccgcttgcccaggaaaagacaacctgactatggctctttaggtaaaaaacatgggttgactcgttactggtctttgatcgtacctgagctgcctgccatgcttgacgaaaggtctgccaaaactgacgctcttcgtttttctgaatggttcgctgcattgaggaccagccaatcagcatcgtcaacgcagcaattcccaagacaattatcatttcaatcaagctctctaaaattatttatgggtaataaaaaagccttcctagcaaatctgataggaaggctttagagttagatgtagaaagttttggatcaactagatccatataattcgcaaggctattatacaatatttgcttgaattgtcaatactaaatttgtagtgtttggccaacataaattacatttggatctgcaatactgtttttctgtgccagtgttttccaagtagttccaaacttagccgcaatactagacaacgtatcgccagcatggaccgtgtaggcattggattgtccttgcgtagcctcaccaacataaatcttttgaccaacgtagatgacattcggattactgatgtggttaaggctgaccaggtttgaaacagttgtcccaaacttatttgcgattgcggacagtgtatctcctgcttgaacataatacgttgattcttggctagctgtaccagtgactttaagcacttgacccggccagatctggttaggatcaccaataccattgactgctgccaaaatctggtacgttgtgccatacttagccgcaatcgccgataaagtatcgcctggctgaaccgtataaataccagtagctgggtgaccaacatgttctactggttgtggtgctggaattgatacttctggcactgagccagtgcttgaactagcaatcgtaaaggcgccatcaaagtcatacgatgtatcaatactcatgccgagaccattgtcagtccattgccatgcggcggcgttgtcaatgcctaagtcagtaataccataaccggcttcccaaatcttagcgtcgccaaaaccatgactattcagaatgccaccagtaaagaatgacttcattgagtacagaccaacgctagcatagcccaatgccttaacttcattcaaaaaggctgcggttgcggaattgtagtctgctgccgaatgcacttcagcatcatcaatcatcagcgtatcgcttgtcataccgtactgcttagcaattttaacgaagaatcgcgcttcgttttgagcatctgcatcactcgtataacgcgcaaagtggtaacagctaacccgcaatcctactgcaagcgaattgcgaatctgtgctgcagcacgaggatttacataagcagaaccgtcttctgaaccttcggtcagcttaacaacgacccccataactccttggtccttagcgcgttggaagtactcaacactgtcttcttgatagctagaaacatcaataaacaaattacgcattactttacccccttaggattaattgccgctactgagccttgtgctggtttaatatcattgcctggtacaaccgttggcgtcagtgaactctgttcataagcagattgcaccgcattttctgctgccgcttgattaacttcaaacccattgctttgcattgcttgctgaacattcttaactgccaagttaaacttatccttgccagtcatattctgactaaccaacgctgcaactgaagtgtcagctacttgttctagcaacccccaagctactttagcctgctcggtttgggcgtgggtctgcttagcatctagccacggcttaacatatttccaggcaaaagaaaagagcgcaacgagcgctcccgactggatcaaccattc

SEQ ID NO: 1970 - DNA, 308 bp, Unknown
  gut microbiota DNA sequence
tagccggcgtaaccctgtttttgatcgggatcgtcgacaacgcctggatgattgggatcatctactgtgtttgcatgttcggcttgaacatgatgctggcaccagtcatcgccaccctgtctgaccgggtgccagacgacatgcgggctacgatgtcggcgttcaactcggccgggacgacggtcggctcttcattagggacgctgattggggccaagttcattacgattcagattcccggttttgcgacggccggcattctgatgggcctggccggaattgccacaatcgttgtctggccgcgggaa

SEQ ID NO: 1971 - DNA, 22132 bp, Unknown
  gut microbiota DNA sequence
aatcaaacatccacttttattgataaaaataagcatgattctgaccatcatcagaatcatgcttctactgctattttaatcaaaaatcgtcttgagaccagcccgttcaaccgcctttaaaagcgttaagacgatcaatgcctcaattggccatgagataacctctttgggcagtcgtaccatcaatagtgccataaaagacattgcactgctgccctgccctattcccatcaaatagagccaaagcgtcgtagaaaagacattggtaatcagaatctggcaaaattcataaatcaagattcgccgccagttgatctgctgctgatataagaacatcccggcaattattcctgaaatcgcggctgatagagtgaaaccaggaaaaaacatggccccagagctcaacagcgtattactgatcaagtcgttgataatcattgacagcgcgccgatccatggtcccagtaagaagccaatcagtgccgtggcaataaagcctaaaccaatctttaagactgccggatcaccaatcgacagcttctccaaaataatctgcagcgcaatcagcattgctgccagcgccattctcttagtatcaaacttgggaccgtgcagtgacaatattttcataatcaacatctccctaaattttttgttagggatcaacattgaccatggtctccggtggtgaatgcggaaaatacaagcagccgcagcttccttccggtttccacattccgctccaccggacaataactcatattttcctaccccaacgcttgatattgtacgacttaagcctttatttttcaacattcgatctaatatcattcgtattttaattcagatgataatttagtccttagtgaatagaattatccatacttctcttctttaaatcaatggcaatttgatcaactgttttttggtcaagcttgtagaaaagcaataaaatcgtacttatcaaggtaactgctgctggaactaagttaacaattgcattaataccggtttgcgttgcaacagattgtgcttgattggccacgtaaccagttgcttgcaacaacaaggcaccaattgaaccagtaacagcagtggcgatagaaactgcaaccgtaatcatagaaacagacaacccaatattccgtacgccatatttccaatcaccatattcaatactgtcagacatcataccaaaagtaatattggcacttgagtttgtaaatccaataattgcatttaagatgaagacaactacaatatctttgaagaagaacaatcctactaatgacaaaatttggattacatttaaaccaatcatatatcctttcttaccaaatgtctttgtcccccatggtagcaaagcagaaccgattaactgggcaatagttagggttgtcataattggtgcaactaaagtataagatccaacaacataaattacataataaaccaacatcatcatccgtagcatagtactagcagcaccaaagaaggttgaaccaacagtaacatctaattgactatttttaactaatgcttttagtgaagtccaaatagaaattttttcaacagacgaagacgaagcctgacttggtgtgctagattcctttacggtttccttacatttcaatccacaaataacaacaaatggaatcatagctactgaacaaactaccgtggcccaaaaataacctgtgccatttgccttagtactatgaccgaagaacagaatcattggcatagcaactgcagaaagaatcatttgaataattgatgaaccaactgaccgtgcagctgataaattcatccgtacttgagaatcacttgataccacattaaccaatgcactatatgcgttactgatagccgtataaagcaagccaacgatgatataacatatacaacataaaaatatttgtgcaacaccagttaccggaaaaacggtaaaagttagaatattgaaaatagccataaacggtgctaaaaacattaaccatggacgaaactttccccacttgctgtttgtacggtcttgaatagcaccccaaaccggactggcaatcccttgcacgattcgagcaattaacataatgattgaaattgctcctgctgctaatcccaatacatccgtgtaaaaaaccattaaataggtattaatcatgtaccaacttaactgatctccaatttcaccaaaactataatatactgctaatgctttgctagtcttttcatgctgtggagcacttgctttactttccatttctattccacctcttaatctttgttttcataattaaaaatcaatgaatatgaatctgatttctgatatctctgcttgcttcagcaaatagcccaatccttaatagattaaattccaccatgtcctatactttgctaaatttaaatgataactttttctacgccagataataaaaacgataatctcgctcgctagtatgaccatataacatgctgatttttctatttcaaaattaaaatcggttaattactttttacataagtatctcgcccgccataatggcaaaacctaaaaaatattgcatatcagtaaccagcagtagtatcaaacaaattagcatattcaatattagtaagttgccttgtgctgaccaggatgttgatccgttaaaactagattaataagatcaccttatataccattcaaaaagagttttacctctagctgcttttcctaaataaatttcttccacactgcttgttaaataatagaattggctttggtcatcttttgtatgggacttattgttttaaagatataattatcggaaccattactcttagtcatcgcattctcaatctattcttaaacagatcatcactatcagaaacagaaatcctgggagtcagtttagagccgggacgtcataaaatgatccttaccatacatattggatagacccctgaaataattgggttattgactctcgtcataatcaaacacctctttaaacacaacagaataaatattcaagatatatctttctatttgattgtaaacgctgccaccgacaccatcaatcttaacattttgctatatttatagatatattgcaaatcaagagataaacaaacttttttgctactttcaacaataaaaaagtcatccaagatacgattttctcggatgacaaattacttatatatttattcaatcaaaatttgtagagatttaaacggtaatttccaagagtatcaccaaaactaatgctcatcttttcatcaccattaagaactcgtgtggtcttccattgaccattctcaattataccttcatccaattcaagaatatctacttgagtattctcatcttgttttggcataaacgttaatttacacatcgttccaattgccaagaactgattatcatctaattcaataataattccagcacccaaaggcttaccactttcacgtgggtcatatgctatttgaagatcgtagttcttgaaacgcaagaacgttccataatcgttttcaccgtgacgaacaaaactttgccaatggttggttccacgatacttgagcagtaatggctcaagttcatgcattaaatgataagtagctgccaaacgctccttactaccagcaatatcaaaggcagatggatcaatatttaaagcaatcataacttccattggtggacgatcaacgctgttaggatcgccacctagttcttcaataccaaatggtgaaaagccaatggcattcttggccgcaaatgcatacagacaatacgaaacggcaactgcatctttacgaatttccggaataaataatggattatcgtctgaagcatagtcatccataacatctgcgcaatatggaacataaatatctggagcaaaggcggccagcgatggtgctgcaattttccaagttgcttgaacatcaggaactggcccccccattggataagaaccgggataccaaggatattgttttaaccaagagttagcatagcaaggtaaagaatattctttttgacctgcttctgtaattttttcaaccgctttagcaaaataccatgccataaattgttcatctgcatcatagccaaatgcttcactccatgtttgttgtggatttaagtttaatccatcagccaactctcttggcaatgtctgtgcaaaagcttcattagcagttgcacaaaaatcacgtgcagaacccataacaccaatttcgttttctacttgcatcataatgacagtgctttcctcttcatcataagtcttcaaatgactcatcaattctgcaaatgcatgtgcatcacggttaacagcagcttgacagaatggtgaaatagttttcgttggcttaccatttacatcattaacccgataataattcttcgtatcttgcttcatccaagcaggaacatacattgattccgcgttcttccataaaccgaaccataaaagaattaagcgcatattattttgtcgagcttgatcaattaatccatctactaatgaaaaattaaactgatctggctgtggttctaatgattcccaataaacaggcaccacaaccgaattcatatttaattcttgaagcttaggccaaatttcctttttcatatagtcaagactactagcagctgagttatgcacttctccggcataggcaaagaaaggtttgccatctacatataacgttttaattccatgactatcatgtttaattttcgctgtcataaattttcctcctcgtatccgtttatgcaaatttcgagaatgattttgatatctttttaaattttaattagcaagtatccgtatatccttgcaaaaatccctaccatctcgtttaattcgccttaaagacatttgatttatatcttttaagctcattgtaagcggtaccttgattttcatcaatattaatattatgctatttctataaaaatattaaggagattgattatttatgtttatacaggtccatgattctctgcaaatgaggcagaattatccattagcaatttactactttggttatcatcatcatcaagaacacgtcattcgaatgcatggacttgatgtttatcaattattctattgtgagagtggtcgtggcgaaattttaactcagaataaaaaatttttaattggtaaaggcgaagtattcatcctttcacctaaaacctattgcgaatactattcaattagtgatgaaccatggattgtagatattattggcttccgcggttctttagcagatgcaattgttaatcgtttgaatcttgcccaaccaagtatttttactttaagcagaaactttgattttccggaattcgtaaaaaatttaatcgatattgccaaaaagcccaattcccagattgaattatcaacatattgctataaattgcttctcctcttaaccaataccctgacacccgtgttaccaattacagagaataattcggatattatcacggaaaaagtcatcccatacattcaaaagaactatttaaaagatatatgtcttgatgaaatcgctgatgcttgtaagatttctaaaggacatctttgtcatcgattcaaagaggaattcggtcaaaccatcaacaactatatcattagtttaaaaattgctcaggcaaggcaaaaacttatcttctccccagaaaaatcaatcggggaaattgcaattgagtgtggtttctcaagcgctagctattttgggtataaatttaaaaaagttatgggaatgtcacccaatcaatatcgcttaattaattagatcagcagagagaaaaatacaacgctgtatgaccataattaccttaaaagtaaagctcataagttattaagaatagtaagacgatcattgagttaatatgcatcaattcaattaaaagacgataacaaaatggatcagatattttattttgtttggtcgaataagaatatcttccattcatctggcaattctgatattcgcgattagatttatttacaatttgactggcaacttatcgtataatttaggtagtcacttaattaattacagcagaaaggatcctaaaaatggtcaatcaaatcagcaaccaatttttaaccctggcagacggccacaaaatgccccaagaagggtttggactctacaagatcactgacgaacaagaagccgttaatgccattaaatgggcatatgaagccggctatcgcctgttcgacacagcacagatgtatgaaaacgaagaatttgtcggtgaagggctgcgtcaattagccgcacctcgtgaaagctactttattacgactaaggtttccgaggccaaccaaggctatgaccaggcaaaaaaatccgtagctgactcattgaaaaagctaggtttggactatgtagacctgcttttgatccactggccggttcaccaacacttctttgaaacctggcgagcctttgaagacttgaaggcagaaggattggtacgttcgattggcgtttccaactacggcatggtgcatttggaatatctggcaaccaaagcgcgcgaaatgccggttttagatcaattggaggttcatccatggctaacggaaaaaccaatgcttaagttcaatgccgaacacaacatcattacgcaggcctggagcccacttggccgcggtaagcgtctggatgatccagtgctgcttaaattagctgcggcacacggaaaaacgcctgctcagattatcctgcgctggcatctgcaaaacggcattgccatcattccaaaatccgttcatcaagaccgtatcaaagccaatgccgatatttttgactttaagctatcaccagctgaaatgcagcagattgacggtttaaacaccaatcaccgcatcagtaaggaaccagaaatggtctacgaatttggctaccaatatccatattaatcttcaatcgtcattagacagcgtggtgcagagtttttctgcaccacgctgttttaagatctcttaaatttcgtgttaggctgtcttcaaattagacgtcactgaggcaaaaaggtaaaataaccttacaactgccgtaaaggagggaatcgccatgcgacgcttttttagcaccatcatgctttatgccgttatcctgattggctttagctgggtctatcataataacgacaatgcacgggctgcagtaaatcgaatcgcctatgtcgcgcaggccaactttcagcagctaaagagtcgcgtgactggtcaaaaggcaaccactaccacttcagccaagacgcagcagaccagtagcgattcagattcggtcagtggtcgctggaagaaaacaacggccaccgtctatgtcagctataaaaaccagacgctgcagcaggccgccttggatgcaatcgccaaatggaatgctaccggaagctttaagttcacgcagaccagcagcagaaaaaatgccgatatcgtaatgacaaccatgagcaaagacaacgatgccgctggaatgactcagatgagcgttgattcattaaccggctatttcgttcatggcacggtctacctaaataccgcctacctgcttgatccttcctatggctataccatggaacgaatcgtcaacacggctgagcacgaattgggacatgctattgggctgcagcataccaatgacatctcagtcatgcagccagccggatcgctctataccatccagcagcgtgacattgatgccgtcaacgagctttacagcagccaggccaacaccagcagctcagctagctccagcatcaaaacctcaactcaaaaagtcgctgccaattaaaaaatcgctaagattgatcaaccaatcttagcgattttattttatgccagcacacagcagactgcagccagaactgccggcagcatctgcattgcccaaacctttttgccaaccgtcagaccgccataaaaagcaacgacaataacaaagctcaacaataacagccacactttaatcaaaacagtgccgctaaaaagccaatagctgatgattaaagacagacccagcataccgttatagatgccttgattggcaaatgacacccgtgcttctttttgaccaacgtattcttctgacagtccaaatgccttggcctgtttagcgggactggcaaacatttccaatcccataatccccagatgctcaattccaaccagcatcgttagcaccgttgctaaaatttccatgaatatcccccaatgattaaatgtctagctaattattgcaagaaacctggataagtgcaagcaattaagaatgcaaaacgcgcctgctgccagtagcaaacgagcgcgtttcttatttaagatgtcgatagatgtgaaacagccaaagccaggtgccaagcaaaaaaacacagtagccggcactaagccaggccagccaatgaatgaacggcaagactcgcaaagccgcgatgacataaaagcagattgtcaatacgcaccagatcgccagcctgttttgcacccgttccagttcagcctgcagcttttcttttttcatgatttatttcaccgtcatttgcaaaagcgttgccaataaagccccggctaacggtcccagcatcggtacccaggcatagtcccacattgcccttgatttgttcggtactggaatgatcgtataggccaaacgcggtccccagtcacgagccggattcagcgcaaagccagtcgtcgtccccaagccggccccaattacaaagatcaccagcccaacaacgaccggttttaacccagtcgtaaaatcccctagattataaagcaccagcataaagacaaacgtcgcaatcaactcgctcaaaaagttgaacagattgctgcgaatcccaggaacggttgaaaaaataccgatattgttgtgcttaggatccttggtcgccttaaaatgcggccaaaattggatcatgactaaaacagcacccaaaaacgctcctaagaactgcccaaccagataaggcgccacctgcgaccagggaaaggttccagctacggcaaaagcaatagtgaccgcgggatttagatgtccctgcgcaccaaacgaagccgccacgtagactcccatagttacggcaatcccccaggcaaacgttacatagaaccagtcgctttgaccatgcaccatcgtcttatttagattcaggcctgcaccaacaccgcatcccaaaacgatcagtgtcagcgtacccaaaaattctcccagcatttaaaattctccttaattaaatggtttcaataatttaatatttagtttttaaaactacatccattaaattaaaaaacgtcattcgccagtcccagcgaatgacgcgaaaaattatttttcgttttccttcatttgtgcccgcaattgatcgccaactgcctcaaaaccaggcttgcccaacagaccaaacatgttcgtcttgtaagcctcaacgcccggctggttgaatgggttgatcccgtttaagtagccagaaatgcccatggcaacctcaaagaagtagatcaaactgcccagcgtgtattcatcctcgcgaggaatgtgcaccgtcatgactggcacgccaccggcattgtgcgctgccacgacggcttggtaggccttggtgttgacccagtccatgttcttgccctgcaggtaggccaagccgtccagatcgttttcagctgctggaatcgtaatgtcatggtttggcgtgtccagcttaacgaccgtttccatcagattgcgcataccttcttggatgtattgaccaagcgagtgcaggtcggtcgtaaagttggcgctggatgggtagatgcccttttgatccttgccttcagattcaccagccagctgcttccaccattcggcaaacatcgtcatattcggctcgtagttttccaacagctccgtcgtaaagcccttacggtaaaggatgttgcggtaggcggcgtactgataggcctcgttttgcgtcagatctgggttggtgtacgacttttcagcgtcagcagcccctgccatcaattggtcgatgtcagccccagaaacggcgatcggcagcagaccaacggcactcagaaccgagtagcgaccgcccacgccatcaggaatcacaaacgtttcccagccggcatcgtcagcttcagtctttaaagcgccgcgcttggcatcagtcgtagcgtagatccgctggttggctcctttttcgccatactttttgaccagcagctcacggaagatgcggaaagcaatggctggttccgtggtcgtaccagatttggagaccacgttgacggagaagtcgcggtcgccgatcagctgaaccagatcatgcaggtatgacgagctcaacgagttgccggcaaacagaaccagtgggaacttgcgatcagctggcttttgtgagtagtagaacgagtcgtgcagaaaatcaatggccatccgcgtacccaggtatgagccgccgattccgattacgaccaggacttctgaatctgattgaatcttttgcgccgcttttttgatgcggtcaaattcttcatgatcatattccgttggcagatgcagccagtcgcggaagtcggcaccggcccccgtcccgttgcgcagctcgctgtcggccgcgttgaccatcgcctgcatttcgcccagttcgttttcgtgcacgaacttcttcagtgcactggcgtcaaatgaaatttgcgtcattaaaaaaacacttctttccttaaatctatccaacatatgatttcacaataaaataatagccgattgtggagccggtttcaatgctgatctgggacttgtcactattaatgaaattgttaataagcattatgcttgtaaaacacacggttgcacaaataaatataaaaaaactaatctcaaaaagcgccacccttcaaatggcgacgctttaagcaatcagagtgttgattcagttaagcggattgattattctgacgtgcctgcattagctggagcactgatttcaccggcttgaactttatcttctttctttaagccaaatgcacagatgatcgtaacgactaaaacgattgcccccaaaatatagtaggtgtgctggaagccaaatgcatcgtaccacttacctgctaaagtcgaaaagacaaagaccgaaatttgcttggcaaaattagacgctagcgcataaaccgtcgcatacagtcgcaaatcaaatgaaccggagatgtacttcatgattgaaaccaaaaccagtggcatttcaaaaccagccaacagccgtaaaacaatgacccagacaaccgatggcgacattgcagaaccaataatccgcacacctaggatcaagccatagataatcaggccgttttttgaaccaatcttattgataatgtaaggcattggaatcatcaacagaaattcaagtgccgtctacgtactggtcatgtagctgtatgccagtgtcccttgagccgcagtatggaaaaagctcttgaaaaagataataaattgctgatcaaaaacatcatagattgctgaagttccaatataaaacagcgaaaggtaccagaaattctttaacttaaaaatcgaacccaactgcttcatatttaattgtgaggaagtcttgtcaacaccaacggcagccagattatcaaggtgaatcttatcactaaagaccaagcaacatgtcaggatcactgctgaaaccgtgcaggcccaaaagattgagttggggctccacaaaaacagccgaccaccaatcagagaagcaattgcaccggccagcgagccacccattctggagtgaccatattcaaatttattagtcagactggcccgctgaacgtattgctcaattaccgaaaccccaccatttaagataaagctaagatagatcccggttacaaaaccaaccaatgccgtattcacctttaataatggatgaaagacccattggaaatatggaccgactaaaatcatcccgattgcaatcgtgattaccaggttctttttcattaccaaacggtcggagataaccccaaagattggttggaagattaaagaaacccctgacatcatcgaaaagacgaacccagcttgaacaccattgaaatgggcttcttgttcaagccaaagcgtcaaatagccaaaaacgattgcccaagtaaagaagtaggtaaagtgcgtaattggaaagccccaaaaatccttggttgcatgctttttaggcgttgtttgttcattattcatgataattccacctcaatctaatcgtagttatatggaactggtttgccaaagtttggcgtaccatcgtcattccaatcaaaaggcttgaccaacgtatggcgatttggatcatacagagggtcgcccttgatttcggtatagtcgcggcagtgatataccatcagatcagttttaccgtcttcggcaaccgtaaatgaattgtgtcccggtccatactggtgtgtcgtcaggtcactttgaaagactggttctttagacttgctccagttgtctgcatttaaaagatcagcctcatcagagcaagtcagcatccccattgcatagttttcatcagtcgcactggcagaataggtcataaagaagcggccgttgcggtgaataacggctggtccctcgttaacccaaaagccgcggatctcccaatcatattctggttttgaaatcatgaccggtttagtagccagcgtccagggatttttcattttggcgatgtagagattagaattgccgcgaatggctggatctttttgtgcccagacatagtagtggtcaccttgccaatcaaattcggtagcatctaaagagaaggtgtccttatccgtcttgatctgccctttttcaatccatttttcttcggcacagaccggattttcctgatcgcattcgatgcaaaacatacgatgctggaacatgccattattatcaaattctttggtatgtgaagccgcgaagtagatgtaccatttgccatcaataaaatgaatctctggcgcccagatcagctgactcattggaccgctgccatctggatgcttgcgccaaaccgtccttggtgcagcatgcgcaagtccttccaaagttcttgcccgccgaatctcaatccgatcatatgacggtacagaagccgtaaagtagtagtaaccatcagtgtgcttatagatatatggatccgcacgctgaatgattagtggtgccgtataggccaatttactcattgataattcctcctaaaacatttgtccggttaaccttctataatgtaaccgatttccataaaacttcatataatatttttaatatttatccgcataaattattgataaacaatattttaattggctataatcaatatcgcaggcaatatgcagcgtttgcacaaccttttcattgattgtttttaaggattaatcatctaaggagttttttgtatggaaacatccatttcaaacgactggctaccagtctataaagcattggcaaaccctattagacttcagattattcaactgctggcgagaaaggcccaaagcatttccgcgctggctgctcagctgggcgtcagtgaaacgattactgctaaacaccttaatcagctagctgcaaccggaatcgtctcattctcgcatcaaggacactttaagatcgccaagctgcaggttgaccagatcaatattaagtttcccaatatcatctacccttcttataatgcctatacggttaagattcccgttggtcactataccaatttctcagttgctccctcatgcggtttggcaggaagagacggctatattggccgcgttgatcatccatcatatttcatggatccgcagcgcatctttgccggcatgatctggtggaacaatggttttgttgaataccagtttcctaaccatctgaacagtcatgatcagctgcgaatgattgacattacagccgaactgggctcagaatttccgttttccaacaataactggccttctgacatcactgtttcgcttaatagcgttccattaggctactggaccagcccaggcgacttttcagacgtccatggcaaatacacgccagcctgggttccaagcaatgtcaatcagtatggcttgcaaaaagtctttcgtattaccgatcatggctcctatcttgacggtgagccatggtccaaggtttcgctaagtgatctcccttatcaaaatgatcgtttcactctgcgctttgagattcagaattttgcaacgcataaaggcggctgtacgatttttggcaagggttttggaaactataatcaagacattgaggtgaaggtctattcagccgactgatcaaacaacgtctaaaaagccgcccagcagataagctgagcggctctttagttttagatacacagtaattaagattttgattttgagtggctaggattgttcagagcagaggataagcaaagagttataagaattattcggcatattcaacattgcattcaagcatcttgaacaagtccttgatctgctgtggcttaatggtaaagctcaagatcgtgtggtgaccgccaccggcatgcatccagaattcagctccatcacgtagaccagtcgttggcgtccataattgcttggcaactggcagatgtggcgtttccttttctggcttgtggcagtcaacgctgtaaccgatgatcttgtagccatcacggaagtcggagagcgtaacgtcaatggccttgccttctgaaccggtaaataccagtcgagctgggtcatccttaccaccgatgtccagtgggtgcacctcaacgcgcggtttatcagaggcaatggttggatcaacttccagcatgtgcgagccaaggatagcttcgtgaccatgacgcagatccagcgtgtagtcttccataaaggccgtcttttcattgttggacagaatcttcagcagccgatccattccggccgtcttccagtcaccttctgccccaaagccatagccatcccgcatcagcatttgcgaagccagacctggcaattgctttaagccgtgcagatcttcaaagttggtggtaaaggccgtgtagcccttgtcatccatgaacttcttgatggcaagatattcacgcagctggtagcgaacggattcaacgtacttttcatgatcgttgtcgccttctaccatttcatactgttcttcaagcttcttatattcagcgtcaatgtctttttcatcaacggcatcaacatattcaaccaagtcgccaactggccagtagtcaacggtccagcctaaacgaatctcagcttcaaccttgtcgccttccgtaacggcaacattacgcatcgtatcgccaaaacgaacgatcttgagcttaaagctttcattgtaggcaacggcaaccatttgccaatcagcgatctcttgttgaacgtcttcatcgccccagtagccgtaaacgatcttgttgcccttcttaaggcgtgcgttgatgtaggcatattcacgatcaccatgagccgattgattcaggttcatgtagtcaaagtcgatcgtgtcatatggaatgttgttcagatattgcgtagccaggtgcagcagcggcttttggagcaggcgtgtaccgcgaatccagtttttggctggcgagaaagtgtgcatccaggtaactaccccggcaaccttgtcgttgtagttggcatccttcataaattgcgtaatgccttctgccgtggtcatgacgcccttaaagacgattgggtaaggcaggttgcccgaagcattcaatttatcgacaatgtcttgggcatccttagcaacggattttaattgttcttcaccgtacaggaattgtgagccggcaacgaaccaaaattcataatctgcaatctttaacataagtttgatctccttttacaagaagttttagtctgctaagctgctgaaaacggtttaagcagcttgtgtgataagaatagcttatttgtccgtacaattcaattacttttatcaaaaatcatctgatgaattaccgagtaccgctagtgggccttcttagcttcagatttagccagatgttcccgcaagcctgcttcgatttcttccagcgacttgccacgcgtttcaataaagtacttgtgcgtgaaccagacacagatgaaacagatgatcccataagtaataaaggtatttgacaagcccatggcactaagcatggatgggaaggtcagcgagaccagcatgtcggcaatccagttggtagctgatgccaaggaagtccccaacccacgaatgttcaatgggaagacttcaccgatcagaacccaggtgattggagcccaagtacatgcgtaaaaggcaacataaacggtcaagcagatggcactgacataagcagccgccttgccgccagcattgaagtgcaggattcctgccatgataaacagtgacagtcccatgccggtagcaccgacacacagcatcttcttacggtcaacgtggtccatcatcagcatagcgacaaccgttacgataacgttgatcgtcccgataccaatgtgggcaagcagagcagccgcaacaccccagccaactttggtaaagatagttggtgcataaaagacgactgagttggaaccaataatctgttgaaagattgccgcgcccagaccagtaatcagagcgggacgaaccagtggactgaacagttccttccagccaccagctttttgcttggcctgttcatgaatttcttttaatgagttgtcaacggcagcctggtcgcctttgttggtgttcatcaagacggcccgtgcttcatcttccttaccgatcttaactaagaaacgaggcgattctggcaggaagaatgaaccaataaacagaataaatgcaggtaaggcagcaaagccaagcatccagcgccagccagtgtacatgccttcaaacgtgtagttcaaaatgtaggccaacagaatcccaatcatgaccatcagctggaacatcgtcgctacggcaccatgaatctttttaggcgccaattcgtgcagataagctggaatcaaggctgaggtgaccccaaccccgatccctaagatgatccgcgtcaccagtaaagtccaatactctggtgcaaaaccagatcctaaagccccaatcgcaaagataatcgaagcccagatcagcagtttgcgccggccatacttgtccaaaaacttagacgtacctaaagcacccagcgtcgcaccgatcaaaactgaactgacgacccagccctgctgccaagagttaagatgcagctgcttttgaatgaataggatcgccccagaaaccgaggcaatgtcatacccaaacaacagtccacccaacgccccaaacgtatagatgaagccgtttgatactttcttcataataaatccatctcccaataatggttgttgtcccattacgactatcagctttttgaaaccgtttcccggaaaacgcttacgattactattatatatttttgtccgtataagtcaatacagatatcattttttatacgcaacatttttatagataaataataaatgccgaacaaaaagctgtctgcagtattttgcagacagccgcaatcaattcagccattattagtttaatttacgtactgaatcattaaaaatcagtttggcatcatattcaatcggcttaacctcttcaccatcgatcagactcatgatcatccggccggcatccagtcccattttttctttagggtgctcgattgtcgtcaagcgcggtgagaagtagcgtcccaaaacataatcgtcaaaaccaacaatgctgacgtcttcaggaatctttaggccagctgagcgcaccacgtccattacttgaattgccaaggcatcgttatagcagacgattgccgttggatgatcaggccgttccataatttgcgtcacgcgctgaaaaatccgattcatatcctgacccgactgatacatgacggtctcactcaaatacgagatgtcaggatattccatataggcattgataaaaccttccatccgccgcgttccctgcagatcatcaacctgaaaaatacccaaaattcgcttgtggccttgtttgatcaaatacttagtcatctcgtattcagcttttttatccttgatttccaaataaggcgcctgcagctgcgggtagtgggcattgataaagaccattggcaaatgactctgggcgattttttgataaagatccatattggtattggccagtgcactttgcgtcggttccacgatcagtccagcaatctgcgtatccaaaagtcgctccagactgcgccgttcattttctctttggttgtgcgtattgccgacaatcaaagaatacccatgcgcggaaatgattcggtcaatcccgctgatgatgttgggaaagatatagtcaaccatatgcgtcgtcaccaacccgatcattttattgttggctttaggcggctgttggctgtcctgccaatcatcaacatacatgccgccaccttggattcggtagacgtaatgcgcgttctgcagctcgctgattgcccgtctgaccgtatagcggctgacgccaaacgtttccatcaggtttgattccgtgggcagtttgtcgccgacttgatacttgccggactcgatctctttttgaattgcttttctgataatttcatatttaatctctgccattgaaccagcctcttatgtctttcattgtaatgatgattaattcttattttacgatagttttagtaattttatattatttttaaacaataaaaatcccgccaattcacgttcacggcgtaatcttggcgagaattcattcaatatgcgctattagttttcacgcttggcatggtccttagaatgcgcgttgttttgaccgtagtaggcattggcgccgtgcttgcggtaataatgcttgtccaataaatactgcggcagttccagattttgacgcgtcaattgcatggcatgatagtcttcttcagctacgacttccagcaccttggcattgtagacggccttgtccggcgttggtccccaggcaaatgggccatgctgggaaaccaatgcggctggcgttgcttcatagtccaagccgcgttctttaaacgtccgcacgatcgtcttgcccgtgttgccttcgtagtcttcttcgatttcttctttggtcagagcatcggcggctggcacgtcggtatagaaggtgtccgcgtgtgtcgtgtttaaggctggaacatccatgttggccgccgcaaacgaaacggcccatggcgaatgcgtatggacgatcccgcgaatctttgggaagtggttgtacagataagtgtgcgtcggcgtgtcagaagatgggttcatatcgccttctacgacctcgcctttcaagttgacgacaaccatgtcttctggcttcaattcatcgtatggcactccggatggcttgatgacgtacaggcccttttcacgatcgatccctgaaacgttgccccacgtaaacgaaaccagtcccagcttaggcagctgcatgttggcttcatagacttcttgttttaattcttcaagcatgttgtattcctcctgattaatccagcttcattgactcgccagctgccttttcagccggcattgcctgcttatagttatcgataaacttttcgtagcccttaacgctttccggttctggcgacagcgtagcgatttcctggttataaaagacctcgtcatcaagaaaatcagccaggtctttaccatgattgtcagcagcatataaggccaacactgccatgccccatggtccgccttcaccagcattgctcatgacgctgatcggcgtgttcaaagcatcagctaagacttgctgagctacgactggtgtcttgaacaaaccaccttgtgcaatcaaaacatcggtacgaatatgttcttcacgcagcagaatgtccatgccgatttttaatggcgcaaaagcagaatagagttgtaccttaaacaagttggccaggttaaaccgactatccggcttgcgaaccagcatcggccgaccttcatcgacccgcgtaatattttcaccagacagatagctgaagttgaccaggccaccaccatcttgttcaccgcgcagcgaggcatcaaacagtttttcatacaattcgtttggtgacagcgtaacgccaagcagccgcgcgaattgattgaagactgccgcccaggcgttgatatcagacgagcagttattggtgtgaaccatggcaaccggagccccatccggcgtggtaaccagatcgatatcacggtgaacctggctgagtttttgatccaggacaaccatcgaaaaggcggaagtcccagccgaaatattaccagtacgcttacgaacggcattcgtggcaaccatgccagtcccagcatcaccttcgcttggcgccaaaagcgagcctggctgcagcagaccacttgggtccagttttttagccccagctgccgttagctgaccagccgttttgcctgctaccaagaccttaggcaggatgtccttgatgtcccagtcatattgcttaacttccggcaggttggcaaacttttccagcatcacggcatcgtagtcatgcgtggcttcgtcaattgggaacattcccgaggcgtcgccaattcccgtcgttttttctcccgtcagctgccaggttacatagccatccaaagtcgtgataaaatcaatgtctttaacatgttcttcatgatttaaaatggcttgataaagatgtgcgatgctccagcgttctggaatattgaaatcaaacagttcagtcagcttggcggctgcttgaccggtgatgttgttgcgccaggttctaaacgggaccagcagttgattttccttattaaatggcatataaccgtgcatcatggcactgatgccgatcgcgccgattctggtcagctttagatcatatttttcgctgatttcagcagccatcttggcatagctggtctgaataccttcccagaccttttctattggataggtccagatatgatgatccaattcgttttcccatacgtaatcgccactggcaatcgtctggaaatcattcgtaaccaagaccgctttgatacgagtcgatcctaattcaattcctagtgccgtttgggcattttcgatctttgatttaatttgttcttgatccataaggcaggctcctcctgactgaataatttgttatggattgatcttagataacgattacattttaatatttttgtccgtataaatcaaccggacaattcataaataaaagagccgtcattgggagatgaatcatgacggcccttttgagagagtgtgtaaacgtctggagaaagcgattatttaacagaacggatcatttgaatgaagatgcaggccaaaacagcaaaggcaatcgccactgggaagaccaggttgtagccggccatgccgaccaaagcactggtaacgatcgggccagccgtctgaccaagcgtcgtagcgatgttcaagatcccgaggtccttgccggcttcttccttgtttggcaagacgtcaacgtttaaggcctggtcaacggcaccataaacggcatagcccagcccggcaaaaccggcaaacagaatcatagaaaatgaagtcttcatgacccatggcagcagatagccgattgccaacagcagcgaggcaatgttgaccggaatcttgcgccggcccaatttgtctgagatcgcgcctgaagtcaaagagccaatcaaggcaacgaccatcgtgactaccgacatgatggagatcgtcgccgccgcggccgtcttgctttggccaatgtagctttccagaatgtagagctggtagtttaagatcatgtagtagctgaagatcagcagcgtccgtccggtgaaggccagccaaaagtcacgcgcgttgtgcattggaggacggaatgaggccaagaattccttaaagccgccctcgactggtggcaggtctttggaagactgttcccgcggccagacaacgattgtggcaattccggccaggcccatcagaatgccggccgtcgcaaaaccgggaatctgaatcgtaatgaact

SEQ ID NO: 1972 - DNA, 90344 bp, Unknown
  gut microbiota DNA sequence
ggatggcaccccaaaaaatccagggcgtccggcggccaaaccgggaacgggtccggtcagacaggttcccaaacaataagttggcgaccaaagaggcaatggccgtggccgcgttgacatagccaaagatggtcgttgaggcagcctcgccggcaatgtcgcgcaggtgctggggcagcaaaacggccgaaacgattgccagcccagtcatccaaagaatggcacagacaaagaagccggccgtaaagcggatgcgcccgcttttatctaacttgatttcttctggttttttagcagtatccatagtgattatcctcttttcataatcttgacgtcccatggtgccaattcaacttcttgaccggccgccactgaggtatcagtcagcagctcagtggccgcaaacggcatgatgaatgcttggttctcatctgaataattaaaaataaaatcaatcttttctgcctgttcattaatgccgctcttaatgatcaatgggaattgagtctgatagctgccagccaagcctaatacggcaacgatatgctcaactaagcgcgcaacgacctcttcatttggccagcagcccagataccaggtcatcccttggccaaacttgttttcagtaattgccgcatatgacttccaatggtgatcataagtagctaaaaccttcgcgccatcagattccaaaagctcagcccaattgctgatctgaccatcgacatccttaaagacgccagaactgtcagctaatccttcgccattcgggtcgacaaacatttcgtaatgggcacctatcgctttagtgatgatccctggttgccgagtcgttctaaccttgacgtgttcgttggcaacaccatctttaaacgtgtagaggacatggccaccattttcaacgtagtcattcagtttctgtaagaactcatcagttgccgtgtagagcatcggcacgaccagtagatcatacttagccggatcaatcagcttgggatccaagacgtcagtagcgatgttttgacgatagaatgcatcatacaagcgacggaaaacatcattatatttagtgtcctcgccaatcccaaattccatccatggtccagaagttgccgtcagactggcattatcaacgacaaaagcaaccttagccgtgtgtttgaggttgatcagatcagccgacagctttttaaaggccgccccaacttttttggcttcgttataaaccgggttcggctggaaatcatgactcaaaaggcctttccaataagtctcaaacgaattatgaattgaatgccagtgccagtattcaaccatattggcaccactggcaacatgtgaaaaggccaattggaaaagctgtcccggatatggcgtccaggtcttaaatgcctgagcctgtgtttctaaaaccagatagttctgctgcttgattgaacgagcaatgtcgccagcaaacgagatttcggcgcctgtcaattggcgttgggaaggatggtagacgtcaatccctactacgtctaaaggcttggcagccgcgaaatgatcaacatcaggctggacaccgtatgaatagccacgccattcaaaatcaaagttgtgcgtaatgaattggtcatcatgcgtgtattcacggacaattgccgtctgccatgccagataatcggtcaccagctggcgttgatacttggcaaattcgccagccagactgccattgattgttccattaacgttcggaaagtcttcccaggcattgatgcgatttgaccagtaatccaagccaaattcaacgttcaaggcatccaggtcaccattaaattcttgctttagataatcgacaaagccggcctgcacgttacggctggaagtcccataatgcttggtctcattatcgacttgataaccgatcacgttgtcgtattcacgcgtcaccagcatcatttgacgaatgattcgctcagcataaaaacggaaagtcggattggtaatgtccataatctgacgagcaccatatggcagacgatttccctgccgttcaaccaatacatccggatattctttggccagccaggttgggaaagcataagttggtgtcccaactattactttcataccatttttatccattttgtccagagtataaatcaatttactaaaatcaaattcaccatcatgcggctcataagtgctccaagtactttcaccaatccgaaccacattgatcccagctgccttcatcatttcaatgtcttgatcaatgcgatcgtacgggagatattcgaaatagtaggcaactccgtataacaactgtttcatttttgcatccctttctgctacaatttagtaagcgatttcttaaagctgatgcctatattatgaaagcgctaactgaaataacgaagggcttttaccatggaaaaatgtcccttttccacgaaagatcatttatacggataaattgttcattttcgaggtataaccaatgcaaaaatatcaatcaaaaattctgcaaaatgcaatccgcctgccggccatcaattggaatctttcttttttcggcggccactttcaacacgtcaatactggctggcatgttggcattgaacagcatctagcttttgaggtgattcagattctctcaggccaagaacgcgtcaacctgcatcgcaagtcctatctgctgacagctggcgatattctgattattccgcccaacttggcccacgatattacctgtgtcgaagagatggactatttcaactttcactttgacctggatgacgccggcttcattcgactgttgattgaaaacggtttgatctattatcccaacgctactcagcaaaacatggccctgcagccaagtctgcacgcactaaatcagttggttgacccagctatggactattcgtttgaaagcaagctcttgatccagcgctacctcaccgactttttgctggccttgattcatcagaccaacacgcattcatcagcctataacctaaatcagctgtcctatgcctcatcaattgccagtgaggttaaagaacagctcgaactgcagatccacgtttacctgactgaggggattgatccgcgcgaggttggcagattgacgattgagcaaatcatcagcacgctgcagatcagtcccagctatggctttgaattatttaaaagcgtctatggcgagtcgccgcgagcctatctttctaagctcaaactgcaaaaagcccaacagctgctgttgatgcccaagctctcaatcggcgagatcagtaccgcgctgggttaccaggaagcctcccatttttcccgtcagttcaagcgctggtgtggtcaaacgccaatgcagtatcgccagactgccaagaagcattcccaagaacaagccaaataaaaaaggatcgcgaattttgcgatccttttttattgatatttgattaactaatccagctcatttagtttctgcagcagctcatgaaccgtttcggcatcaatatccgccatcgtcaatgaacgcagggggatattggcaaaaaccggtgccagttcaggtgacatcaacttgtcaaaagtagctgtcagacccatttcagcaataatctgcttgattcgttcatcagcattttccagtaattcgccaacgtaggtctcatcggtaatcttaccaagcggattcgtcccaatcgtcagctcaaatttttgccgcagccgaatgtcacgtgacgagctaccgaccaagatctcatattgaccgttatcggcttcccaagtttcattttctgggttgtaccaggcaaacgcgcgccgcgacagcttaacggtcagatgcttggtctcgccgggctgcagctcaactttaacgaagtcgcgcagttcatcaactggcacaatcgtctgactggcgtggttggccacatagatctgaacgacttccttacctgcctgactgcccgtattttccagatcaaagctgactgccacgtcatcgcgattttcattgatcgtcaggttttgataggcaaacgtcgtatagcttaggccatgaccaaatgggaagcgcacggccagctgcttggcatcatagtagcgatatcccattaagatgccttctcgatagacctcatgccgccgatccttgccaaaggttggataggttggattgtcggctagttgcttagggaaggtttccgaaagcttgccagaaggattgaccttgccagataaaatatcccaggtagcctcaccgactgcctcaccggccagataagtctcaacaatcgctggcgtctttggttcccaaggcatctcaactgccgaaccgttttgaagaaccacgatcacgtgcgggttgaccgtcagcagctgttcaatcaattcattctggttggctggcaaactgatggactgtttgtcaaagccttctgattccatcgcttcagggaaaccagcaaaaaagaccacttgatcgctgtttttggccagctccattgccgctttagtcagctgttcatccgcttgatcgctgtctaaacgatagccctgtgcataaacggcatgagcaggcattgcttcttttggcgttacaacgcgatgagcattgacatgcgagctgccgccaccttcaaaacgcggcttttgggccagctcgccgattactgccagtttggcggaatcactcaatggcagctcctgattttcatttttcagcaagacgatactgtcatcagccagctggcgggcaaactcatgctgagcttccatatcatatgctggcgttggcgtctttggatgaccataacgctcagccatttctaaaacgcgcagtgcagaacggttcagcgttgactcttgaagacggccctctttaacggcttgaatgatttcttcttttgaggcatcccccttgcccggcatttccagatctaagccagccttgatcgcggccgtatgatcaaccacggcaccccagtctgacatgaccagaccttgataaccccattcgtcacgcagaatgttagtcaaaaggcgctggttttgcgatacctgaacgccattaagcttattataagagcacatgatcgtggctgggtgcgcttgcttcacgatgcgctcaaactgtgccagatagatctcacgcagcgttcgttcatcaacatctgatgaattggtaaagcgctgatcttcacggttgttggtggcaaaatgcttaacgctgacgccaaccccagtgctctgaacccccttgacgtaggcagttcccatccggccggccagcagcggatcttcagagaaatattcgaaattacggccggctaatggactgcgcttgatgttgaccccaggccccagcagcacgccgattttttcagcacgggcagccgttcccaactgttcgcccagtttttccagcatctgatcatcaaatgagctggcggtcaatgccgaacaaggaaaacatacggcttcgatactttgatccatagcactgtgcacgttgacctgtttacgcaagccagaaggaccatccgtcatcagcataggatccattcctgaaaccttggccgtaaaccaaaaatccgttcctgaaaccaggtcggcgcgttcttccagcgtcaagccctcaacaaaattcaagtctacttttgtcatactgctacctcattttcaaaaatatttgcaaccgctttctgatgccattataatgtttttcaaaatcttcgcctatctaatcttgctaatcattatcctaaattgcgtttattgaggtggatcatgaccgaatcattaaaatttctccaaaacatgcaggaaatcactcaactggaaatcgatcagctggatgcagccggtcagcttaccgatgtctggaaccggccggcaattgtcaagctgcctgagtcatatctaaaaaaactagctgctgcttcatttacacctggaatttttttgctggcgcccagttccgtgattagaggcgccttactggttgattcaaaacatcggcttttgatctggcaaaacctgcgcagctgcactcagcatcatttggagcaggccggcagcgccatctggttcgggctcaaccagcattggccaaaaattcataaaacatttgaaaacgagctgccattaccagaacatattttagaaaaccataacagctatgaactggaaaaacgaatgctgagcgcggttcgtaacggcgatgactcaagctatcagcattatttccgtcttttaaccagttcaggggcttttggtcaggttgccaaggatcggctgcgcaatcaaaaaaatcttttgatctgccacatcactttactgaccagacaggcaattgaaggcggtcttgcccccaacgaagcgtttgctctttctgatcagctctgccagcaggttgagagcctgcagacgattgagcagctaaacgcgcggctgcaggcaattggtcagatcttcattcagcgcattcaaacaactcggcaggctcagaataacaaaaagggcctgctgacgcaaaaaattgaggctgcccttcgtgatcactgcggccaaaactattctttggatgacctggctcatgatctgcagcgcgacaaatattatctggcccatctttacaagcaggaaaccggccaaacgatcaatcaatacgagaactcatatcgaatcagccgttttaaatccatgctgctctggaccgatcagccaattaccgaaattgctgccgtccttggctttgcaacccccaactatgcctcgcgctgctttaaaaaaatcgtcggtattgcaccgcagcagtatcgccagcgccaccagctgaagcttttacagcaataaaaaataccttgggctaatattttggctcaaggcattttgatttattcagttgctttttccgctgccgcaaccagttcttcaagcgattgactgccgaagatcactggcccgtcattgataatcgtagccggtacgctcataatctgccgttcttttcttaaagctgggaaatgctgcagatcaatcatcgtagccgtgatccgcggattaagcgaagccatccgctgacaggctgctacgacatccgggcagaagtgacacgttaaggagaccccaatcttaatgtcagtcgacggcagctttttgattcgttcagccagtgccggctcaacgctttgacccggaccgcccacattgtagatccctaaaatcagtgacgtcaattcatgaccagttggtacgccggcatagtgcagacctgtatcggtatcatcaacgaccagacgcagctgcggcgtgtagaccaggctgtctggtgcggtggtcttttgaatcttgaggtgatcattaagctttaccagttcaccaataaagctgtccatttcttggctcaatgccgtatcgtcttccaaaagctgcagcgtaacgtctttggtcagccgactaaagacaccctgcatctgagcaaccaggtctggtgtaaaccagtcgccagtatgatgggcaaccggctgttcgctttcaacctgtgaagtctgaccaaccgtagccgctttaggaacttcctttttaacatggattgggatccctaaacgctgcttttgttccgtcacgtatttttctgcactggtagctgctactgctccatcagccgcggcagtgataatctgacgcagctgcttgacgatgacgtcgcctgctgcatagacgccaggcagatcggttgctccgttttgatcaacgtgaatatagccgcgctcatccaggtcaacgatgccctttagctgttcagtagctggctgggtaccaacatagataaaaacgccaaaggtttgatcgccatcatcgagatggtagaccgtttcctcgccagtttggttattgaccatcgtcagcgatttcaagtactgatcaccatcaacgcgcttgacctcagtatggtacaaaacgctgacttttggattgtcgagggcccgcgaagccgttagcggcgcgcacttaaaatgatcaccccgtacgaggaccgtcacgtgcttggcaaaccgcgtcagataatcggcttcttcagcggctgagtagccaccgccaacgacaaatacctgcagcccgctaaacagctcgccatcgcaggttgagcagtaggccacgccgcgtccgcgaaactcttcttcgcctgggaagccaaccttgcgcggactggcgcccattgccaaaatgacgctgcgggtctgatagatgctgccacttttgctcgtcagctttttaacgtcgccatcaagctcaaacttaacgatatcgtctttttgaatcttgacgccaaaatcagcggtctgctgctgcacctgattcatcagcttggtgccgtcaatggccgcattgccgggatagttgtagaccgttgaagtcgtggtaacctgaccgccgaccgtgtccgcctccaaaatcaaggtgtccagcgttgcccggccagcataaatgccagcagtcaaacctgcaggcccggcacccacgataatcagatcataaatatgttctgctgccattttaatcacctgcaatcattaaagcttgccgaccagatccagacttggcttaatcgtatcttgacccggcttccagttagctgggcagacctgatcgccatgctcacgaacgaactgagccgcctgcagcgtccgcagaatttcttcagcggaacgaccaatccccatgttgttgatggtatatgattgaatcttgccgtctgggtcaacaatgaatacgccacggtaagcctgtccctcgtcttcattcaaaacgtcaaacatccgcgccagtttaccggctgggtcggccagcatatgatacttgatcttgccgattttttcagatgcttcagcccatgccttgtgaacgaattcagtgtcttctgaaacagagtagatttccgcgttggcctgcttaaaggcttcatagttatcttgcagtgcttccagttcagttgggcagacaaatgagaagtcagctgggtagaagaagaaaatgctccacttgccaagaacgtcctgcttggttacatccatcgtttcgccatcttgataggcacgcaccttaaagtctgcgatttcttgaccgataaagttcattataatcctctcctttagtttagaatgattatcaactacaactataatttaacacttttaccgcccaatgtaaatcaaatcacttttaattttgcaattgctttactttttttagatttgtttttgaaatcgataaccaaaacgtgctctgcccattaaaatgctatcaagtttattttaacaagttttattttctttggaaagcggatacaatatcataagctaaaagcaggaggaataagcatgcagttttttgaagacggctatctgccaacgatcaacactactttttcattttttggcggccatgccgaaaccgtcgagcctggctggcgctggccaactgaacaccacccagcctttgaaatcatgtatatcatggatggcgcgcaaagaaccgttaccgaatcagcagaaaaaatcattaaagccggcgaaatgatgatcattcccattggcatggaacataccaactactgctggggcaatgaaccaatgaccttttttaccatgcatttcaaccttgacgacccggcaatcaaatatctgctggtgaaaaactttaccaaccaaattattgatcagaccgctccttactataacgaactgcgccaatcgcttgaacagatcatcagcatcattggtactcactattcattaagcgaccggctgacgatcgaactaaacacgatcaacgtgattggaacgctgattcgccatctgcatgccaataaagatcagttgcccaagcaaaatgaaatcgaccattatgctttgtttcagcagatttcgacccgcattaaagatgaactcaacgaacagatctttaatgcgcaggttcctaagacgatctcaattgccgcgatcattgccgagtttcacatcagtcaaagcaccgcgcttcacctttttaagcagtacagccagcagtcgccgcaaaaatatctgcagagtctcaagatgcagattgctaaaaatttactgctgcagcctgatttgagcattaaagaagtagcctacaaattaaactactcatcaccaggtcatttcagccgtgagttcaagcgatttttcggcattacgccaagacagtatattcaatcgcaaaaagcatagcatccgaatttgggtaagtttttaacgaaactgcccattttatttttcttctgcaaccgctaacatatagcttgtaaccgcttcacaaaaagtaaaggaggttccttcgcatggaacaagacaaaatcaaaggggtcaacctgggtggctggctggtccttgaaaagtggatggcaccacatctgttcgatggcaccaatgccgacgatgagtattacctgccccaggaactcagcgaaaaagaatacctggcccgcatcacgcagcaccgcagcaactttattaccgaagccgactttctgcgaattgccagtgccggcttcaatctggttcgcattccggtaccatactttatctttggcgatcgcaagccatttattggcgcaattgatgaactggatcgcgcctttaactgggctgaagcttacggactcaaaatcttaattgatctgcatacggctcctgacagtcaaaacggttttgacaacggcgggatctctggtgtctgcaaatgggcccaggaaccagctgaagtcgagtttgagctttccgttttagaacgcctggccaagcgctaccacgaccgcaccgccctttacggcattgaggtcttaaacgagccggccacggaaaagatgtttaagtccatgacgacccgctacctgccgcgtgatccccaaaaagccgctggcagtgccgccatcgcgtttgagtttttatatgacttttatcagcgggcctatgagattttgcggcccattctgcctaacgacaaggtaatcatgttccacgatggctttgatctcagcaaatggcatgccttctttaccgaaaatgattttgaaaacgtggtcctggatactcaccagtatttgatggtcgctgaaatggaaggcgctgaactgaatccaactgcttatgaaaaagccatgaacaagattggtgatcagattgccgcggttaacgaatacgttccggtctttgtcggcgaatggacgcttttcaattcctacacggccggtatcaacacccaaggcggtatcaatccaactcagcaggaattcaaaggtgccaaacatttggatccagctgaactggccaaggtctaccaaaaactttggcagattcaagttaccaattggaatcgcggcatcggctacgcattttggacctggaagctcaacatcgacacgatcaacgaaccagcttggtatggctgggattcgtgggcagcctcacgagcactggatcgtcactggatcaatccaaaagatatttaataatttgtgaaaggaagccatctcaatgagctatacgattaaaaatccggttattcccggtttggcacccgatccctccattttgcgggtcggcgaagactattacattgccaactccacttttcattggaatcctggcattcagctgtttcactcgcgcgatctggcaaattgggaactgatcgggcaagccttaaaagatgattctacgattgatctgcgcggcaccagcacgccagcgggcatctgggcgccgcatctgtcttatgacccccaaagcggactgttttggatcatcttttcacaaatgatcaacatggatggccgcatgtttgacaccaacaactatgtcatgcacgcgccatcaatgaacggaccgtggtcaactcctgtttatattgggtcaatcggctttgatccatccttgttccatgacgatgatggccgtcactgggtcgtcacactggaatgggagacgcggtttggctatgagcagccagggaccatcgttttagaagaatttgatgccgaaaacgaaaaactgtttggcccaagctaccgactcagcaagggcgggaccgatcgcggctgcgtggaggcaccacacctgtacaagcatgatggccgctactatctgatgacggcagaaggcgggaccggttttggtcatggcgttgttttgcagcgggctgatcagattacgggaccttatgaatctgaccccaacaatccatttatcacctcaacgccttactacttcttccgcaaaaacgatcctgattccaaccgttttgacctctacaaccctgatgccccgatccaaaaagccggccatggctcgctgactgacacgcccaatggtgaatggtacgtagctcatctgatgtcacgaccaatgcctgggcttaagtcaacactgggtcgtgaaaccggtctgcaaaaagtggaatggacaaaagacggctggttaaagatggcggacagctcaacgctggctaaggatacgactcctgggatttctaacgtgacccccgatccgactatgaacgatctgggcatggaagatcagtttgacggcgcagaattagacgtgcatctgctttcgccatatcgtcacgcaaccgaagactgggcctcattaaaggaaaatcctggcaaactgcggctgcatggcggtcaatcattcttcagccggtttgacgtttcgattctggctgctcgagccgacagctttgtctttgacgctgaaactaaacttgacttcaagccaattcacttctcacaatcagccggcttaatgctttattacgacaacaacaactggctgtttttacgcaaatcaattaatgacgagaccggccaaaactttatcgatattctgcaggccaagcaaggcaagcgtaccgatctgcagcgcgttaagctgacgctgcctgccgatcagactgccgttgcctttaaatgccacgtcgatcaccaaacggctcaattcagctatcggctcagtgatgatcagtcctggcaaaatctgggtccggcacttgacattacctttatgtcagatgaggccattgacggctttactgccatgatggtcggtatcggggcctgggacgcctttcgtcatgagtcatatgccgattttgactacttcaaggttgtcagccaagacagccgcggcgaacattttgatggtttgcaataatcatctgaaataacatcgtcgtctgactttccatggcgcagcaatcgtcatggatccagcaattatttttgattatttaccttggaggtaccattatggatactgctaaaaaaccagaagaaatcaaattaagcaaaagcgggcgcatccgctttacggccggcttctttgtctgtgccattctttggatgactgggctggcaatcgtttcggccgtcttgctgccgcagcacctgcgcgacattgccggcgaggctgcctcaacgaccatctttggctacgtcaacgcggccacggccattgcctctttggtcgccaacttattgtttgggaacctgtctgaccggacccgttcccggtttggccgccggacgccctggatcttttggggtgccatcttagccggcgtaaccctgtttttgatcgggatcgtcgacaacgcctggctgattgggatcatctactgtgtttgcatgttcggcttgaacatgatgctggcaccagtcatcgccaccctgtctgaccgggtgccagacgacatgcgggctacgatgtcggcgttcaactcggccgggacgacggtcggctcttcattagggacgctgattggggccaagttcattacgattcagattcccggttttgcgacggccggcattctgatgggcctggccggaattgccacaatcgttgtctggccgcgggaaaaatcttccaaagacctgccaccagtcgagggcggctttaaggaattcttggcctcattccgtcctccaatgcacaacgcgcgtgacttttggctggccttcaccggacggacgctgctgatcttcagctactacatgatcttaaactaccagctctacattctggaaagctacattggccaaagcaagacggccgcggcggcgacgatctccatcatgtcggtagtcacgatggtcgttgccttgattggctctttgacttcaggcgcgatctcagacaaattgggccggcgcaagattccggtcaacattgcctcgctgctgttggcaatcggctacctgctgccatgggtcatgaagacctcgttttccatgattctgtttgccggttttgccgggctgggctatgccgtttatggtgccgttgaccaggccttaaacgttgacgtcttgccaaacaaggaagaagccggcaaggacctcgggatcttgaacattgcaacgacgcttggtcagacggctggcccgatcgttaccagcgctttggtcggcatggccggctacaacctggtcttcccagtggcgattgcctttgccgttttggcctgcatcttcattcaaatgatccgttctgttaaataatttttatacttgatcgttggtttactatctcaactctctaaaattcctaaactcctattgtaaaatcgttaaaattcattaagctcaatgatcaagcaaccaataaaagcgcttcgccattctaaaatgacgaagcgctttttaattaatccgtaagattagctaattttgaattaagcttttagaacacacgctgctcggcttggaacttaaccaaaggaccagccgttaccatggcaccgtcacgatggttgccaaagaagtcagcatcaaagacgattggcgtgccatcaggattttcatagcgttcttctggttcaaatgccatccccagcgtagcagtcgtaatcttggcatcgttgtcttgaggcaggaagtcagccagattggtcttaagatacaggccatcagctcgcttttccaattccaggacgacttgatccttatcatcaacgaattggttctgatctttgctgcatgactgggcaccgttaaagtaggcattgcccgcgctccatactggcaggtggttgtagtagtgatcgctgtttggcgcgtagattccgcaatagccatcaaactggcgattccattcctcaaacgttggatattcttcaaatggctgagtaccgactttaaagttataggtatcccaggcatctggcttgtcatgcatcagttcagccagtttttgcatttccggccgcaactcttgctgaacgaagacgttgttgtagaaacgattgtcaccatgctggaatgtcataaagcccattaccttggtaccgtgatgttcatgatatggcgtaaagcgattggatggcaagttgaccgaattattgtccgtcccaacaccaaccgcggtaaagctgccagcaatcaagttatgcaccatggcaattccctgcgcagcaaaacgaattgaacgctcagaaaggaacaggttgttatcaatcagcgttggaccatgggaaacctctacccacatgtcttcaccaaggccctgcagcacatcgcctacattttcttcgccgacttcaaaatgctcaggtaaggagttgtgatcaaagacgttttgtgtgacccgtgttccttgtgcctgccagtcaagccataagccgcgcgtacagtggtgaatgtggttgtgacggtagatcacgtcaatggcagcatgcatcttgattccgccaatttcggcccccaccagattttgacgaatattgatgttgtagatgtcgttttcttcaattaaggagaagacgccgcctaaatgaccaacaatcccggtttgaccacaatcatgaatgcgattgcgccgtacgatatgcgagccgacgtgttctttatcccagccttcataagacgcttgacagattacgtcacgctccgtctgagtaccatctttgtatttccacttagaccatttattgtcattgtttggctgcaggtacttgccaagcgagataccagaacatttggaatgcgaaatctcacattcttcaatgatccatccttttgaccagtgtggaccaaccatcccttcttggtaagccgttggtggcgcccattgcgtcgccgctttggtaacgccaaatccttttaaggtaatgtagccgattccttcagcctgtgggtaaaaacagctttgacgcacgttgatctccacgttttcctggttgggatcgaaatcatggaagttggcatagataatcgtttcatccgtatcagcatcttgttccgtataccaggtatagatcgtaaaatctgggtcccatgatttttcattgcgaacgggctgttttacctcagccagcgtgttgacctcatacaaggccttgtcgtttaaatagacctcaccggtatgagccaggattcgtgcatcgaaccagtcaccaaaaatcttggtcgtgtatggattgcgctcactaaacatactgttgggaatttttacctgccaaatgccatctgcagttttttcccagcctttaacgacttccgccccagtaataatggcctttaacggctcaaccgactcgtagacgatgcgctgatctgccgtgcccgcatgcttaggattaacgttttcacgataaatgcctggaaaaacgcacaccttatcgcctggcattgcgatatctgcggctgcttgaatcgttttaaatggacgatgcttgcttccatcgccatcaaatggcgcctgcgcatcaacatagattttcatgaactttcatcctttccgttatttctgcattaagacagctacttttcttcagcttggcggcgatcttcaatttcgtgattgattttgtcaacttctgcatcagacaatgggtacttactgatcacccacatgccaacaattgccaaaacaattggcagccagatcattgaaatcgtaatcccattcaaggccgttgctgattgcgtagccttagtaccgtcaaagtggcaagcggcattgatgtagcctggaatgatcccgccaagtgccagcccaatcttgaagaacagtcccatcaaggcgttgatgatcccagcaacccgcttctttgagttccattcaccataagaaacgacttccggaaccagtgaccacatgtagccagtagcggccgtaattccccactgcatgataaagcgaccaatgtagcccagggcaatgctgttcttaaactgtggccatgaccatacccaaagaagcagcgtcccaacgataaacattcccaagaacagttggaagaatccctttttgccgatcttgcgccgaacgattggccataagaaaaccaagaagatccctggaatcgaaccaatcagattgattgaagccatccattctgagtgaccaatgttgtactgaacaaagaatggccaaactgtattgccaaagaacatgaaggtaaagccaaccaggaaaaagcagcctagtacccgtagtggtttgttacgacgcaactcattccaaagatcagaaaacttaacggaatccgtttcttcttccgttggcaacacccgttcatgaacaccaaagtaagtgcaaagcaacagaataaaaccaatcagcatatagattgacataacgtggaagtaggcaccagcagcgtgtggcgaggcatagttacctaaattaagcttgatgccaaacatcccgatgtcttttaaatgcttggcaggggatgccatttgaacgaacaatggcaggaacgtgtagaccaaaagattaccgatattggcttccgtcatccggaccgtcgttaacgtggaaatctcatcattatcccgcgtcagcgaggcattcagcgagccataaggaatgttaacgaatgaatagatcaaggccgttgccagatacatcaagaatgcataggcaacattgccacgaacggctggaattggcaagaacagcatggcacagcagatcgtgagcggaattccgaaataaattaaaaatggcttgtatttgccgccgtgcttaaaatggctcttatcgacaaccgttccgacccagggatcccaaaaaacgttaacccagcgaacgatcagaaaaatcgtggccccaacggctgccgagattccaaaaaccgttgtcagataaaacagcaacattgagccaatcgttccaaaaatcagattttgtgccaagtcaccggcaccataagcgattcgctcaccccaagacagtttggcgaactcatcgacttgcttattttttggcttgtccatagtttttacacctcttgtaaatttgattcaaaccggtgcagcgctgcacgttagtttgtgttttcaaccaacgaccaaaatctaacacggtttttttgaaaacgctaccctaaaaatcaatttttttatcattcctgagttagaattttttatttcgctaaaataatcgagctcttttcttcatatagcgtcaacaaaaaatgaccgctgacaaaaacgcggtcacttagtaataaaatttaaaaatacatatgatttatttttcatactatttttaaaatagatagtcgtaaagattccaatcggcaattttagcggcatcagtacgggcttctttaggcgttatcccggttaaggcatgaaaaacgcgtgagaaatgggcctgatcagaaaaatcatagcgttcagcgagttcagccattgacagattggtaccgatcagatcctcaattgcatgattgatctgaaccaggcgtttaaattggctgatgctgaccccgacctgttttttaaactggctgccaagatagcgactggacaatcccaccgccattgccagctcatcgatactttggtccgtagtcggatcactcatcagctgccaaaagactttgctgacggctgcagtcatcttagcatcaaccatctcacggcagcgtgtggccatatccacatctgctgcctcaattgccgccagcacttcattgtaggacgtcaacgattcgatatgtcgtacgtattgatcattcagcgaatataccagttcataatccagcccaacttgaaacagcgcgcgcagatttacggaaaccgagataataccccagtttttaacgttgcgcagtgcgtcttgattgtctgctaaaatgccgatccgccccgaattgatgtttttagagaatataatcggcaaggcagccagatttccctgcgcaattgcttttttgacttctcgctcatacagatagctaacgtgacctccctcactgctcatccgcagcttcagtaattgggcatcaaggtctcttgaaatacgtgcttgatgaaattcgtcactaatggtttcaaaatcgatcggcagttctaataaccgtcccaacaccaaaatctgctgtaaaaactgtttttcttccagataaaccgtcttcagcagctttggcatatacataacggcatgactgctgatcgcattgttattttgatagcgctgactgacgttgacaatcaccgggccaaaaaagacaactgtttgatcatgccacattaggcagctgtaaagattttgactgtgccgcaaaaactgcagcgttttatgtgggcagcggcgcagtatttttagatagtccatcaataatagcttaccttggcgaaactgcaggctatactggccacgatcgtactcccagattgtagccggtacccctagtgactctagatactcagttaccatttccattctaatccgtcctttattcaaaaaatgattctaatattcaagttactgtgttagcgattacataaaataatagcatgagctagggaaaatcaatatactgctgattttaattcatatcgaatcagtctgtctttaggctgtcaggctgactatttccttagctctctttattaaaatcagccattgactataaaacaccccaattctgtttttccctgctcatactcattgataaatagaatattggttattatcgttttgccgattgtttttaacaatgggcaaaactcatttcacaaattttgctgttaactcggcttagacaagtccgttaacctgtctacgaattcggtttaattatgatcatcttataaggataaatagcttgatcgattggtcgctgtttgtctgctttttcatccactatattaattatgatcatcttataaagacaaatggcttgattcgctgatcgctgtttgtctgcttttttgatcctatataatagtagaaaaaatcaaataccataaaagcgtcatacagaattgccctaatggcagtctgcatggcgctttttaatgatgcaaatgagtttttaagctgttaattgatgaaataagttttaaggattggaccaaccagctagtcttcacgacggaagttcaataaagcatggcacaggtctttggtctgatcatagacttggtggtagattgcgtacagttcatcgtacttggcgacattggccggctttggcaggtactccttgccaaagtgaacgaactccttggcacagtcctgcaaagactcaaaccagcccaggccaactgctgcaatcatggcggcccccaaaccaggcccttgttcattggttaaggcaacgaccttcttattgaagatatcggcctgcatctgaagccaaaagtcgctcttggccccaccgccgattgctacaaccgtgtcaaactcttgaccgttttgatcatagatgttcaagatatcccggaaactaaaggtaattccttccataacggctcggcagaagtcatagcgatcctgcatgctgtcaacgccaatgaagctgccgcgaatatcagcatcagcatatggcgttcgctcaccaaccacgtatggcgtaaagattaagccattcgcacccaatggccgttgagaagctttgtcgaccatcattgagaagtcttcatccgaatcaaacttgtgcttgaaccaattcagcgaatggcccgctgccaaagtaacccccattgagtagtaagtgtcgggaattgcatggcattcatattgaatctgaccatgatagttgacgtcagcattttcttcatatttaagcaccacgccggaagtcccaatcgaagacatcaccatatttggatgcagaatgccggctccaaccgcgccacaggcattgtcaccgccaccaccatagatcttggtagcagtcgaaaggcccgaaaacattgcatagctggcggaaacattgccagcatagtcaactgatttcatcaatggtgggcacatgctcattggaatatcaaaggcatcacagatttcctggctccattggccctgcttaatatccaacagcacggtccctgtagcgtctgaatagtccatgcctaggttaccggtcatacagaagcgaacatagtctttaggcagcaaaaacgtcttcgccttcgcccagatttccggctcattttctttaacccacagcagtttaggcagcgtaaatccttccagcggcttattgccggtgatgtcaacaaaacgatcacccagcttatccatgatttcttggcactgcttggtcgtacgcgtgtcgttccataaaatagccggccgcagaacttgattgtccgcatccaaaagtaccagcccatgcatttgaccagagaatgatatgcccttgatctcttcttttttaattccatcttttaagatcatgcggtcaatgccaattgttgtcccataaagccagtcttgtggattctgctcactgtagcctggcttaggctgactcagtggatagtcatagctttgctgagcggcgatcttgccagaacgatccattgccgaaactttaacggcactcgttcccagatcgaccccgattacgtattcgttcataatatttcctccaagaaaaaaggatccgcagccagctgcggcgatgcgaatcctttctattagtattgttagagtttcaagtgattacttagccagcgtttcaatcataaagtggttgatcgtgtccttaacctgttcaaggtggtcagattgcgtagcagcccgcagttcgctttgtggcgtgtccaaaacggttggttcgatcgacttgaagtcttccttgccttcttcgatggacttgcccagaccttcgtcccatgatgcgtaacgatccttgagtaccttgtccaggtagccgtcttccttaagggcagcagcaacccgcagaccggcagcaaacgtgtccatgccgacaatgtggctgtagaacaggtcttctggcttccaggaagtccgacgtggcttagagtcaaagttcagaccaccacgagggccgatctgacctgcttcaacaacttcgtacatagctgccgtagcttcgtacaggttggatgggaattcgtcgatgtcccagccaatcagcttgtcaccttggttggcatccaatgagcccagcatgccggcttcacgagcaacgcgaatttcatgttggtaagtgtgaccagccaggttagcatgattgccttccaggttcagcttgaagtctttgtccaagccgtattccttcataaagttcagcgtcgttgctgcatcaaagtcgtattggtgcgtcgttggttcctttggcttaggttccagcagcatttgagcatcaaagccgatttcgtttgcgtagtccttagccatgtggaagaacttggcaatgtgtgattgttcgcgcttcatttcagtgttccagagtgattcgtaaccttcacggccgccccagaagacgtagttttcagcaccaacccgcttgccgacttccagactgtgcttcagctgtgcacaagcgtatgcgtagatctttgcagatggagccgttccagcaccagccaagaaacgaggattggtaaacaggttggacgtgttccacaataccttcatgccagtcgtcttttggtattcaacgatcttgtcgatgaccttgtccagattctgattggtttcacgcaacgtgtcgccttctggagccaagtcgcggtcgtggaaacagaagtagtcaacacccagcttgtcatagaattcaaaagcatagtcaacttttgccaaagcattgtccattgggtcagtgtacttgtcatatggacgaaccgccgtgccatcaccaaatgggtcaaccagccgctggtcaaacgtgtgccagtaggcaactgagaaccgcagccaatccttcatcttcttgcccagaatttcttcttctgggttgtagtattggaatgccagacgtgagttcaggcctttgtgtggaccttcatacttaactttatcaataccttgccataaatcactcataatatgggcctcctgaaatttattagtttgaataaacaactaacttacgacttttaatatagaccatgcctgctgttttgtaaaccctttctagcaaaaaaattcaaaatcagttgatcctaagcagcggcttttaaaatatataatgaagaaaaaagtcgctatcgtctgcagcaattttctaaaaaagctgctgcctagttctttactaaaaattcacgcgactattttgcaaattttgcttgcttttatctttgaaagcggttatattatattcgcaggttggttttagtttcgaaccaactaaagcaataggagtgttttatagttaaggagttgtgtaatcatgcgcaaagtatctgcgggctttatttactttttcggggccctcggcggtttgctcttcggttacgatactggtgttatttccggggccattctgtttattcaaaaacagatgcacctgggaacttgggaacaaggctggatcgtttccgcggtactgctgggtgctatcttaggttcattgtttatcgggccatcgtctgataagtacggtcgtcgcaagctgctattattgtcatcagttatcttttttattggcgcactgggctctggattctcacaaggattctggtcactgctctgcttccggatcgttttaggtttagccgttggggcatcatcttcaatggttcctacctacttagccgagctttcgccagccgacaagcggggcatggtttccagtatgttccaattaatggttatgactggtattctggttgcctacatcaccaactggtcgtttgaaaacatgtacactggttggcgctggatgcttggctttgccgctatccctgctgccatcatgttctttggtgccctttacttgccagaatcccctcgttatttggttaagattggtcgtgaagacgacgcacgggctgttttgatgaacatgaaccgcaatgacaaagacgtcgttgataaagacatgacccagattgaacagcaagtccacatgaaaaatggcggcttaaaagaactgtttggtccaatggttcggccagccttaatcgctgcaatcggcctggccgtcttccaacaggtcatgggttgcaataccgtgctctactacgcaccaacgatcttcactgatgttggtttcggtgttaacgctgctttgttggctcacattgggattgggacctttaacgtactggtcaccgcttttgctctttccatcatggataaggttgatcggaagaagatgctgatctatggtggtcttggcatggggatctcattgtttgtcatgagtgccgggatgaaattctctggcggttcaaaggctgcggcggtcatctgtgtcgttgccatgacgatttacattgccttcttctctggtacttggggtcctgttatgtgggtcatgtttggtgaaatgttcccacttaatattcgtggcctgggcaactcatttggttccgtggtcaactggactgccaacctgattgtttcattaaccttcccaaccttgctggacttcttcggtacgggtagtctgtttatcggctatggcgtcctttgcttcttcggtatttggttcgtccatgccaaagtctttgaaacccgtggcaagtctttggaagatattgaacagacgctgcgtgaccacgctggttccaagaactaatctcagtcattattcaaaatcccactcaaatcttaaatctaaatttaatcttacttgctgaatcctaaaccctctcaatatatcgatagtaagtattttgcctggcagttttattgtcgggcttttttattgcgcttaacagcatggtgctgattctggcatcatccagtttcttaaaaaaataaagtgagttttcttattaccattctattttcaaggcacttatttatttcattgattaaacaacgatgattatagattaaaataaaattagagttgactttgcttttctcataatatatactcgattcaacctttaggaaatacttaaattaaggagcagcattatgaaaattacaaacgcacgatttagctattattatcaatcatattaacgctgacacgacataggttgttggcgttagtctaacagtctatgtgattgataatagtttgtaattaccgattacatggcagatgttttgttaaagcactatgtaatcggctccgctccaaccagcatataaatgcaagcgcgaaccctcatggtgttttaacatcatgagggtttttgaattgattaacaagggagcgtttattatgattatcgtattaaaaaatgatcaagcaaaagcagcaattgaagaattaaagcagcatttcggcagtcagcatgaaatttttgtccataacaatcgtgttgccattcaaaatgccgatccaagcgaccttaccccagccgaacaaaccgctgctcaagaaattattaccgatgttccagccgccgttcaagcatcccgcttgttccatcccgaagatacgatcattaaaacgccacactcaacgattggcggaaagaactttaccttaatggctggaccttgctcagtagaatctgccgaacatattttaaaaatggcgcaagtcgttaaaaatgctggtgcaaccgttctgcgcggtggcgccttcaagcctcgcacctcaccatactcattccagggattaggcaaagaaggtctgattgccttgagaaatgcagccgatcgactagaattggatgtggtaacagaagtcatggatgttgagcaggtgccgctggttgaagcctacactgatatttttcagattggtgcccgcaacatgcaaaacttttctcttctaaaggcggttggaaaaacccgtaaaccggtaatgttaaagcgtggaatgtcagcaacggttgatgacgtcttgaacgcaaccgaatacattgctgctggtggaaatcaccaaattatgatcgttgaacgtgggattcgaacgtttgacaacaaatacacgcgcaatacttttgatgttggtgtcatcccggttttacaaaagttgacccactaccccgtaattgctgacccaagccatgctgctggtcatactgaatttgtaacgccgcttgccttggcaggtgttgctgctggtgccaacggattgattgttgaaattcatgatgacccagcccatgcattttctgatggcgcgcaagccttaaaaccaaatgaatttaacgaaatggtagtcaaaacgaatgcggtccgccaagctttgcagtcgattgaataatcaaagaaggaattatcatggaaaaaatcacggtatctttagccaatcaacaatatcaagtcttaattgaaccgggtttgttaaaaacggccggggagcgaatcgccaaaatctggtcagcgcgaaaggtagcactgatcagcgatgacaacgttgcaccactctatcagactgacttggctacccgactgaccgcacacggctttgaggtccactgctatgattttccagccggtgaagcttcaaaatcgctgtcacagctccaaagactaagtgaaaaattggtggcggccaattttaatcgtgatgatgcggtaattgcgcttggcggtggcgtaacaggtgatttagcaggctttttggcagctacttacatgcgagggatttccttgattcaaattccaacatcgctgctggctcaggttgacagttcagttggtggcaagactgccgttgatttaggaacgaccaaaaatattgttggtgccttttacgaacctgatctggtgctgattgatccagaaaccttaaagacattgccgcctcgcgatctagtagaaggctatggcgagatcgttaaagctgccgcaatggttggtggcgatttttggcaattaattgaacaaattgacactcctaaagcaatcttggaacatgcattagggctaatcaaatattccatccaatttaaagctgaagtcgtcatgagcgatgaaaaagaaagtggtcagcgacagttgctcaattttggccatacaatcggtcacgcggtcgaagctttatctgccggtgagttgcgccatggtgaagcggtcagcattggcacggttgcaatttgtcaagcctttgaaaacgaaggcaaaacagcacctggcataacccaaaaagtcaaagaacggctggcagcagttggtctgccaacaacttcaccatggctggcctctgataaggtcttggatctaatcaaacacgataagaaaaatcataatggctacttaaacttagtctacgtcaaaacaatcggcgcgcctgccatcctaaaggcacctgctgatcagattgcggcagtcctacagcttcctcgctgataaaaaacacgtctcactgagctgtcatgctcggagacgtgtttttacttaatattggaaactgatttaggccatttcagcgtcaacgaatagcgatccatatctaaaaaacgatggatggccattgagctggcgcctaaaagcgatgccatttcagaacctttgatcatctgcagcggaacatcgatctgatgagcctgcagccagtcgcgcaaatgctggtataattcaggcatctcatcaaacagtggtgaatcaaagtagaccgcctgcgggccaaaactgacgatcgcatcgtaaaccaacttttgcagatttcccattgcctgggcaatcacacggacgacggtttcatcatgctgccgatacagctcgtatagctgtgctggccgcagattatctaatccttttgcctgggcaatctgagtcagaatcgcatcttcagagcagagcgcctcaactttgatcagctgtccatcctgaccaacgaccagactgcggccgatttcgccagctcgaccatgaaagccgcgatacagctgctgattggcaatgattccggcaccgacgccacgatgaatgctgatcgccaacaagtcgcggtatgattcccgatcgccaaaatcacgctcaaaaatcgcggccaggttggcttcattctctaaaatcgtcgggacgcgaaattcattttcaaaataggcggccaggtcaatgccattcgtactgataaatggcgcgtcaacgatctgattatggtcaacgataccatgaacggaaaagccgattgccaacaagccatggatcgtatcatcgttttgttccatcttctgcagcacttctttgattgtctgcatgattaaaagcatatcgcgtttttccaatgcaatctgctcatagctgatgatctcgccattaatatagctgaacataacccgcagatgaccagtaccgatttcaaagctggccacaaagccatatcgcttgttcaaacagaccagattcggcttgcgtccaccacgattggtcgactcaccctgtcccagttcctcaatgaagccttcatcatttagttcattataaattgctgaaacggttgatttattgatttttaattcacgagcgatgtcaacccgagtcgtggcaggatgattgaacagctgctgtagtaccagctgccgattcgctactcggaccaggctgcgactatcgtttttcatgtcagagtcccctttctaggttagtatgtattttaaactatctctagtttacccgtttttaaatgaattataaactaattattgtataaaaaaagagaaaagcaagcctgcttctctcttatctttatttttgtttaggcaaatgcggttgcaatgctgccgattacgatcaaaacgattccccaaaaggtaaatttcgattcacgtggactcttgtgctcatgcaggatcaagatcccgccaaacgttgcgataatcacgttcaactgggtgaagacaaaggcaaccgtaaccccaatcatccgagccgcgaagatgtaggcaaatgccgcaatcccccatgagataccagccagaatattggtgtactgttctttttgtgtaaaggcctttgcattgcctgaagccagatcatagataatggctcctaataagatccccagtacttctggcaagaagatgccgactgagtcttcatgcgccaggatcggcatcttagggaacgatgagtagatccagtaaccaatcgtcgttgccagcaggaacaaaacatccttggtcgtaacgttttgaccattggaacgatcggtaaacgaggtcatcattgccccaataatcacgattgccaatgcgataaagccaatcgtcagtgcccgtgccgagtgccattcgccgaaaatcagcaccccgatgattgagttaccaaccaattggaagacagttgacagtggcaccgtattggataccccgattcgcttaaatgaaacgaactgaccaacctgagccgttgaccacagtgccccgcaaagcaatgagaacaaaaatgccttcatgcttacttgcggatgcatgatcaaaaaggcaaccaaaccaaccaatgaagctccagcgccaatcccaaaaatctggttggcttctgatccaccaaccttaccagtaatcagtggcataaaaccccagcccaacgctggaattaaagcaataagataagccataatcaaaatctctctctcttaaaaatttcgataaaagtagttaaaaactttacgaaaaataactataccttaatgcaatcgttttcacaagtatttacattcaaaaagttagtaaaactattggtggtatcgatatcctaaaagcgtttaccatcggccttgcaagcgattactcaaaaagttggtctaaaattgaaaaggtttgcaattatattttccaaaacgcaatttaatcatcttcactgtgcggcgtaatggcatgcggggcatattcgcgatcagggaaaaagagcgtaaaagtcgttcccttgcctaattcgctggcaaccttgattgttcccccatgcagctcaactaaatgatggacgatcgccaaaccaagtcctgattcaccatactgcgtgttcattcgtgagcgatcagctttatagaagcgttcccagatctgttccgtctgctctttagtcatcccaatcccgttgtccttaatcgcaaactcagctccttttggcagtcgccgaccggaaatctcaattttgccatttttcgtaaactgaatggcattttggatgatgttaaacataatctggacaaaccggtcataatcggcatagacccgcagaaccttaggcagatccacagccagctcatcattttgcaccttggccttttttcgcagctgagcctggagattattgatcactgccgttgcatcaaagactttgcggtccattgaaatctgattagtccggatcttttcatagtccagcgtgtcgttgaccagacgaatcaagcgccgcgtgtcattttgcatcaattgaatactgtgctttttatcctcttctggaatcgcatcgtaggccaggccttccagtaagccgttgatcgtcgtcaaaggcgtccgcatttcatgagctgcatcagccataaagcgccgccgccgttcttcttgttgacgaatctcttcttgtgatgcctgcagtgcatctgccatctgattgaagtcgcggcccaggtcatcaagttcatcattagattgagtatcaatatgcactttatagttgccgcgtgcgatctggtgcgttgctcggcgcattttactgatccgctgcgtggttgagcgggccaagagataactgaccaccagtgccaccagcattgcgattacaaacgttgccaacagattgttaaggatctggtgccggctttgctcaaccgttgatacaaaagtcccaattgatactaccgcgaccagctttccttgataaaaatatggtcttaaaatatcggtcatgcttggatgcggacctggctttgacttttcttttgttctgtttttatcggaaacgtccaaacgggggtggtcgattttcttttgaatcgtcttcccctgctttagggcctgccattcttttttggtcagtgtcgccgtatagccgttgctggcaaaaattttctgctggtcggcatcataaatcgcaaagtgcacgttttgccgtgctaaaagattcgcattgcttttcagcgatgacgtctttaatcccttaaactggcgcgttgtctgatcatatttaatggagtcttgaatcagactatcggcgtcctgctgcaattctcgccaggtattagtatacaaggttcgattagtaacgttgataaatgagatggttacaatgatcagcagtgtgcagatgacggcaaaaaagctcagcatctgccggtagatcagcttcattgatcttcaacctcgctgtcatcaaatttatagccaacgccccatactgtttgaataacctggggaccagccttttcaatcttttgacgcagctttttgatgtgggcgtcaaccgttcgttcatcaccatagtattcatagttccagaccagctgcagcagctgttctctggtaaatacctgtttcggtttggaagccagcgtctttaacaggtcaaattctttgggcgtcaggttttcgatctgctggtcatccaaaaatgcctcgcgcgtcttggaattcagcttgaaatgcggcgtctgcacgtcaaagtcactggcaatctgctgcgtgctgctgctgagctgattaagctgggtgcggcgatacagagctttaatccgggcaatcagcgcgatcgtactaaatggcttggtaacgtattcgtcagcacccatttcaagccccagtacctgatcactttccgagtcacgtgccgtcagcatgatgatcggtacggttggcgaaattttacgcatttcagctgccacctgcatcccatccatcttgggcagattgaggtccagcaagacaatatcccagcccgttggatcctttttaaacatttccacggctttaacgccatcttgcgcgtagccagcctcccatttttcttttttgaagaacattgccatcatttcgcataaggtttgattgtcctccaccattaagattttcattttcttcaccccgtcagtaattcttgattgattctaaaagtcattatacggcattgatctactacaataggaatattttgtgaccaaagtgcgaaactttaataaattcagcaccgttgtcaaattaatcaggaccttgaaattcttgtcgcgtgcattcagaaatcaaatatgttaagatttattcagtaacggggatgtttatggattcgacgggtatagttcgaattccggctgcgtttcgaaggttgcggcttcgtaaaaacgctcagtttcaaattataactgcaaacaataattcaaactcttacgcatacgctgcctaacaagtaagcatgcgtaaatccggctgggctcgtccatggtgcagtaccgggttttatctaacagtggacttacgcttgctgctccggcttgaagcaacaagaagagaccaatcaagctagttgtgtgggtgagccctgatcagcggcgttccagacaatgaaccttaaatagctgagatatgaacgtagacgccgaaatggcgatatattcggacgcgggttcaaatcccgccatctccatttataacttgttcaagagtgttgataggtatttaaagtaccaatatatcaacacttttttatttccatcagccgctatcagacggtattaaaaaaagaaactgcggacaagctatccagcaagcattctcaatcggggatgcttgttttatttatatcaaaaacctctaagcagctggctgttttccaactgcttagaggtattgctaagcttgcgataacgctattcaattcgcataatcagttgatcttaatcaacgtttttaatcaactttttattgaccgacagattcgccggcaatggctttgatgacatcagcctcaacgtcaccgacattttgccgctttagatcatcctcaaaatcccgttgaatcttaaacagtttatcgcttaaagcgtgatgaatgttgcggccaaccggacaatccagattgacgtgttcgtggaagttaaacagctcatctttgtttttctccactgctacatagacgtcataaaacgtaatctgatccagcggctttaagagcttgatgctgccaggtcctcgtttggtatcaatcagtcccgcccgtttaagatctgacattaaagtccggatgattaccggattactgccaatactgtcggccaacatgctactgttgaccgtttctttatcgctaaagtagtcaattgccaccaacatgtgaattgcaatcgtaaatttagttgaaatctgcatttaaacacttctttattataaatctgcttaaaagtattttattacagagattcaagaattgctaatcagcttaagcctcaacgactgagatccgctgttgaacgtggttgcccttttcaatctcgtcaatcatggcaacagcataatcagcatatgagatcacgctttgctggcgatcgttaagcatgaattcttcgccgcccagcagatacttgccgatcttttgaccatcagcctgaaaatcagcagctggtgaaacataggtccagttaacgtctttagcagcgcgcagaattgccaaagccgagccatgcgttgcactgactggcttgtatgcatctggaaaatcaggctgcagttccaaagttgaggtatgttcaggatttacgtacagtgagcccgcaccgccaaccaccagcagccgcgtatcggttcccttcagcagatcagccaggtaagcagctgccttgggaattacgtaaagattcgtcaattcccaagccccgactgcatctacgaccgcgtcaaaatcctgcagatcagtcttcgtcaggtcaaaaacgtctttttgaacatagctggcagcctgcgtattgttttcatgacgaccaaatgcagtcacgtctaagccacgttcaacggcttcactgataattttttgcgcagcccgaccattagcagcaacaacggcaatcttcttactcattttaaatcactccattttgtaatataataagttacaattaatcgttgtttataatatattatgttacaaactgtttgtcaataatttaattacaaaaaatcagtctccacaccgggaaactgattttaatttcttattttaataattctatggcatccgctgaaagctagttgtcggcaattacgactttggtaccctcaggcaggttttgctccatccatttagcgtctggaaccgacatccgaatacagccatgcgagcctgttgacttgcctagcttggcagcttcccttaggttatatgagccgtctgctttggtaggaaccgagtggaaaagatattcgccatgattgagccaggaaacatagtagttggcgccttcgcccagctcttgattataaaagctgtcgccgcgctcagcttgaacgtaaaaagtaccagttggcgttgtgctcttcatcttgccggtcttggcatctttttgatagaccccgcctgaactgtacatggtgtagatcagcttagagccatcataaagataggtccggttaccttttaagctgaccttgacccaaagatttttaaccttgctcaagtctggatacggaacggtttcagatgatttctgccagtcaattggcgtccgcatattgctttgggatttggaactagaactggttgccttggatttggcagtcgtagcgaccgtcttgttggtggcagccggctgcttaagatgattattatacatatagaagccgcctaaaataattacaaccaaacaaagcagccagtaaatcgtatgttttgatttcaattttctttcttcctatttttatagtaaaattgtagcaaattcgagcgatgggagagtctgaattgcgcaccaatttaaaaattgcctatctttcggcaatcggatttgctactgcagctattattttatcaaattggcactaataatgctcgggggaagtaatattgaccgattttttaaagaaattatggcgattgatcaacacccacaaatggctcaaagatctgctgcgggccgattgtctgtactgtttgatagtcggcagctataatcttttttgcctgtttgttccgcaattgctgcattcagtttcgctttacgttttcggaggatattttctgctgcttaatctttgcctgttggggcggaccatctttttgaagaccgcagctcatcaatactaattcatagctttctaaaccgcatcgtcttgcttatcagcaggcgatttttttattactgtcaatgctaaaccaaacgctaaattttagttttgatcaacgaatcttcaatcttgttgcttaatgttatgataaaatgacgctgatgtaattgtttattatctattaggagcttttcgttaatgaaaaaatttatcgctatttttctaacctgctggctggccttactgagctggctgccaagcgttcatgccgaaacgtttataaacgccaatcagctggatgcagcagcagctttggcaatcgatgccaagactggtcagattctgtattcgcaaaacatcaatcaaaagctgccaattgcttcaatcagcaaactattaacggtaatggtcattgaagatgagatcagccagcagcaattaagctggaacactaaagtcaagatcaaccaaaaagtggctgccattgccgatgaccctgaatactcaaatgtcagtctgacgcaaggccagtcttacaccgtctccgatctggtcaaagccgcactgatcaagtcagctgacggtgcaacggttgctctggccggcgctttaggcgacagtaccgcgcagttcaaccaaaagctgcagaaaaaggcgcggcagatcgggattaaagatgctaccatcgttaacagcgtcggtctgaccaacagccagctaaaggatctggccgttaaaaacattgatgacaacgccgaaaacaagatgtcagccaaagacgtcggtaaaatggctgcctatctggtcaatcattatcccgatctgttaaagattgccggtcagacctcatttcaactggatggatcgaccgtcaacaatatcaacaaaatgctgacggattcccagtatcagaccagcggcgtaacgattgacggcttaaagaccgggacttcagatgctgccggtgcctgtctggtcagcacggcaactttccaaaatcggcgcattgtaacggtggtgctgcatgccaatggcgatagcacggatgcccgttttacggcaacgcaaaagctgtatcagctgattgccaatagcagtctgactccgcaaaaaacagctctgcccaaatcgttttatcaaagaagcgttgtcaagtttctgtttttcaagcatcagatcaagctgcgcccccgttcaatcacgatctgggaaaatgccagtgatgccaaccagtcatcccgcttgaccatctatgaccatttaacggctaaaaccaaccgaagcggacagttaaaagcaccgatcaaaaagggccagtcgctaggatattcctacgtaaaggtaaaaggcgttcaatttatcaataatcacggcttaaggctgccactgatcagtcagacgaccgtgcaatagattataagtcagtgactgccactggcttttttattttctgccattcagattcgattaaaatcagctttgataaattaagtttttaatgaacttttttatccttcatcaacaaaaaacaggcgtataatttatcccaatgtataaatatttattgagagaaggaattcagctatggattcacagtcatccaacaccaagattaagcttggtgcattggtcttgatgattttttcatcaatttttggctttagcaactctttgactgccttttaccaaatgggctatgccagcatcatctggtatatcgtgaccgcagtgctgttctttttaccttccgcattgatgtttgccgaatatggcgcttcatttaaggctgctcgtggcggcatcttctcatggctgcgcggctcgatcggtgaaaaaccagcctttatcggaacttttatctggctggcagcttgggtcatctggctggtatcgtcaccccagttcttcttggtttcggtatcaaccatgatctcggggcatgatcaaacgcagacttggcatttgttcggcctcagcgccaatcagacattaggtattttggaaatcgtctttttatgcatcgttactttaattgcctctcaaggaatcgataaaattgccaagatttcctcgttttgcggcatttttacgctgggcatctcaatcatctttatcctggccagtctgttggtatggatattgggacatggtcagctggctgagccaatgacggctaccagtctgattcactcgccaaataccgcgttcgtctcaccaattgccgtcatctcatttatcgtctacgcgttgtttacctatggcggtctggagacgatggccggcgtgattgactcggttgatcagccagagcggactttcccccgcgccatgatcattgccatgtttttgatgactttcatctacattgccgtaatttttctttgcggagtctgtaccaactggcaggccgttttaagcggtaaaaaagtcgatctggccaacgttgaatatgttttgatcaacaatatgggactggtaacggcacaaaagctggggctctctcatgcagtcggcgtcatgctgggcaaggcctttgctcgctttacggcactgactgacgtcttgggcggattgggagcagcttttgtcatgacctattcgccaatcaagtcgtttattgaaggatgcgatccgcgccttttgccaaaaaaactgaccgctatgaataagtaccagatgccttcatttgccatgtggattcaagtcatcatcgtttcggtcattattttatttgtttcgtttggcggcaatgctgcgggacgcttctataccattctcaccgatatgatgaacgtttcatcatcggcgccatatctgtttttggtaggggcttttccattctttaagatgaaaaagaatctggagcgtccattcgtgttctacaagaatatgacggttacctggatcgtctcgatgatcgtctggctagtactggccgtgggaatcatcttcacctgcattgaaccgattcttgaacacgactacgccactgctttttggacggcaatcggaccattggcattcggcgttgtagcctggatctattattcatgggctgagcataagcatgttttagatgataagccagctgcagaatcaaatgatgattagccaaaaccgatcaaataaaaatcgcactgccactggacagtgcgatttttattatctagagacactacttaagactggccgccatttgaaccaaggtatcgatactgtgggcttccattgtataaaccacgttgccgcgcatccaggtcaaaacctgaggccgctgaccatcgcctacgctgacctcaaaagtccccgtcccacgatcgtctggtgctggcagataaaattgttccaataattcaacaatgtggcgtgcagtcggcactggatcttcaccattcactgctgcggcatgaaccgtcagctgccaatgtccttctttccacgtcagatagcgctgaccagcccccgcatcaatcgtccccgttaagccatgaccaagatcaacggttggcaggccagcagtgctgctgtcatcatagtgtctgatcgcctgggcagccgcagccttgctagcataagtctttttacttaaaatcaggtaaggcgtctgtgagcttaaggttggatcattcaagcgcttggccgtgtagccgacactgtaatagatcgtgtagctattggcatttccagaatagcgaacgtttagatggccattagtcgtagcaagtcctggcgtggtaggcaaaagaacgttccccagctgcgcgcggatcgattgattaaaagctgccagacgctgcgcatcgctgccggctggattgactgcactggtcttggtttgaccggcagctgaattatctgtcgctgattttgccgcagctgatgaagagctggcaactgacgatgttaagccattactggtacttgattgactggctgacgattgcgcggcttgtgatgattggccagctgctgtcgactgggcttttttgcttgtctttttggccgacgaatgctgcttggccgtcttagtactgctggaactggatgaagccttttgactcgatgtcgttgtagaaccgcatccagttagcagcatggctaaaaccactgcactggccattagattgaatttccgtttcatattctttcctcccattaacagacttaagaaagcgttttcgtttaactacattatccatcaagtccgcatcaaaaacaaattcaattcgacaagcacaatcagccgctgtttcaagaacctgcgcggccaataaaaaagccactgggattcttcatcccagcggcaattaatcaggtttggctaaaataccaagcgagcacctaataccaaaacggaaatggcaattacgatgcccacgcattcaacgaaaaggcagctgatgttgattgtcattgctacccagggggccgtttgcggcaggttatcctgcacatcctttaatacgacaaacaaactgcctagacccatgacggcaaaaacaattaatgcgccgaaaagagcggcctggttgagagcagcaacagcaacaaacatagtaaaacttcccttcttcaacttatttgcaaggcttattctaacacaagcaacttttaaatccaccccactacccttgacaagcgatcacgtttatgatcaaaaatgtttgaaaaatgaataaattcgtttttaacccataaatgtcgtttaaaccttgattaaatcggaatttatgcatatttaatttttaaaatatttttttaaaaattttttgtcatttttcggagataccgctttcacaattgatttagttaattctaagcgttttatcattgattttgtcaatttttgttcacaatctcatatgttatttttatcatatttaaataaaaaaataactcctcgtcctgctttccagacgaggagttgttttttgcttaaagaaccgtcaaatgcatctcgccatctcgtaccagcttcatctttttcatgatctggaagccaacgactgagatcaatgctggcagtgccattccgcagacaacgtaggttacaaatgagccagtactctgcccccagaagtagatcggcgcgataaacgagttaaggcccaagccgccaaccgtgtaagtggcacggaaattaaacagaaccgttgccaatggagcacagaccgcggcagcaacaaccggtggaatcagctgcagtggattaacgatcaaattaggaaactgcagcttaggcgtaactacaaattgagcaatattggcgccaaccgtgttctgcttccaagacattgccgtaaagccaacgaattgagccgtcgtgccaatagcagccgctgctgaagagaccggatccagcatcagtgctaccgccaatgccgctgaagaagccggcgtcattaagaacaaggcccagactaccgagatgcagaccgaaccaagcactgggttgactgccatcgacttggcaataaatccactgacggcaatcaaagctggcgttacaaccgcagccaggcccagaccagccagcgtcccgaccatggttgccgcaaatggaaccaataccatatccaaaggcgtcttaccagaaaggtacttgcccagcagtgccgcaatcaatgctgcacagacggccgaaaccggctgccccgtgctaaaaacaccagtccccgcagcttgaacggcggtctgacccgttgccgttacagctgcaacccctttggccgccgtaacaaagtgcaccgcgttggaaccaaccgtcgctgcaatcattgagctgaacattaccagcgtcgtcgttcttaattcgacggccacggcaattcccagggctggggctaaaagatcctgtgccagcgttccggccatatacagcggctggaagtgaacaaaaccggcaatcgtctgcatcaacagtcccatccccagtgtgaccagaatggcgttggcaaccgcggcagaaatattgtaggcatattccttaacggttgttttgtgtacggccctttcacgagcactcatgctaaagttcgcttgtttggtattggctgcttgctccatatgcattacctctttcttctcatctattttcaataaaaacatccactgccgattcaacaagcagtggatgtcaagcgaggatctaaattcatgcttgtccactaccgcgttttcggttttaggcgcgcgtcgtggacagaaatctcaatgctaaaaagctgggattcttgatcgcacggcccgcacgataataatgaccaggactaggataataatggttagggcaattgctgatggtgccattgcgatcaagctcctttcttaaaataaaatgagatttcttaatgcatttataatatcaaatcaaagcgattatgcaagacgttttttatagtttgtctatcattaagttggtttatgttaaagctacaaaaaagagccgttgcaagcgactccattcacaactcatattattttcttaatgaacataacgttaattatcttaacatagtgtcatcttaacgctgtccccgatcgccattgtctttaagccgtggcacgtatttaatcaacgcagccaacaggcaatcaacatcttcaatcgtattgtagataccaaaactaaatcttaacgtctcccagacacgaggactgtcttgaccatacatggctaccaagacatgcgaagggtccaacgagccagacgtgcaggccgatcccgccgcgccgacaatgccatccagatccagattcgtcaaaagagcatcgttggggacacctttaaaccagatactgatgacttgcggcgccattccctcgtttaagcgaccattgaccgcaaagtcaattccattggcttctagtccatcaaccagatgctttttcaaatccagatagcgcgcggcctgcttttctaaatcagccaggtgcagctcaattgctttggcaaaaccagccgctgccggtacgttttcagtccctgcccgccgtttaagctcttggtcgccaccacggacgaacgatgggaaattaatgccccgccgtcgatataaaaagccaatcatcttaggaccgttcagcttatgaccagaaaccgagagcagatcaatcttgtctttttggacgtcgattggcacggttccataagcctgaaccgcatctgtgtggaaccaggcattggttggtgccacgatctcaccgatttcatgaattggcagatgactgccgacttcattattgaccgtcatgatcgagaccagaatcgtatcaggacgaagcgcccgtttcagctctgccagatcaatctgaccgttctcatcaacatcaaggtaggtaacctcatacccttgccgttccagatcttctaaaggccgtagaatcgcctcgtgctcaaaccgcgtcgtaatgatatggcgtccttcactggcgcgggccaatgccgtctgcttgatggcggtattgtcactttccgttccaccactggtaatcacgatctcatcatcataagcagcgttgattgacttggccatcacatgacggctgtcttccaatacctgtttggcaatccggccataatagttggtcgttgaggcattgccaaagacattgctcatcttatcggtcatttcagcaacgacctctggagccattggcgtggtgccggcattatcaatatatactcgcttgtccaaaatattcgctcccattttttgatttggtcaaggttcttgttctagcgcatttcctagtataaacctttgccgtccagacgcaaaataaagccgctcagcttgggggaactgagcggctttgttagtgctttattcaataattgggagtatttttgagaaaaagtaggggatcatcaaatcaatcaccgttgcttgattaatttgattgtcattatcttaccgattaaatgcaattaagctgtggcagatttgtgaagtaattgcgaatattgcttaagaaagcttaatcataacagcatctcagtcaaaatcacctgctgatttttgcccgtcatccagattcaatccgtccaccaacagatccgtgccagctggtggcgctgatttttaaagaagctgttttgcgccgttaccagataaagcgcgtgctcaattgccagtccgttcaacttccattcaaaaagctgtccggctgccagttcgtcttcaaccagcgcctggtacataaagctgatgcccacgccgtctttaagtagctcaataatggcattgggactgccaatctcgattacctgtttaaaatctgtcaaggaactgccatgcccctgcagccatttttccagaatctgtcgtgtcccggatcccggttcgcgaactaaaagcggatagtcaaacaaattttctagattgaccgctgccttaagctggcggctgccaaacagggcaaatttttcctggccaatggtttcccagacaaaatgccgatgatcaaaatctccctcaactagtgccgcatccagttctcctctttgaatctggctgagcagtgtctgcgtattgccaatctgtgtcgtaactggccagtcctgctcgatcattttagccagcacctggggcagtagaaaactgccaattgaaagtgttgaccccagtcttaacggcgcggtttcctttttcagcttcgccagcattttttggttctcattccttagaaacgtcaaataatcaaccaagcgcttggcaccaggagtcaaggctactttctttccctgatgatcaagcagcttgaatcccagctctttttcccaggcgttcagctgctgtgaaacggccggctgcgtaacaaacagcaatttggcggctgccgtcagcgatcccgtttttgaaacggccagcaacgtttcgctgcgatgatcgagcagcggatctggttgcataagcgtcacctcaatttttaataagtaaaactttgaatatctaaaaaatactaatttttatttattaatataacatgataggcttaaatcatcatcaatccgagttaagagaaaggggtttggatatgattaaaacattattctcacggcagtttgtcgtagcatttttgcttacgctgctgtgctctctggcaggctcttttttaggtggtctgccttacctgtccgtaattggtgctttggtaattgccttgattctagggatgctgatgcagtttgctcagcccaccgttgcttacagtcagcctggaatcggtttgatctccaataaatttttacggctgggcattattcttttaggatttaagctgaatctgattgccttggcacaagccggcatcaaaacgatcctgctggcagtcgtgatcgtttcggggacgattctgctggtttattccttggcgcggcgcttcggtgttgatcgtcacctggcaattctggtcgccagcggaactgggatctgcggtgcggcagccgtaatgggaatctcatcacaatttgacaatgccgccagcgaaaccgaagctgagcgtcagcgtgaaaacaaggtcgttgccgttgctatcgttgcgattctgggaactttattcacgcttttggaaattggcatcaagccgcttttacacatgtctgccgttcagtttggcgttatgacgggcggctcgctgcatgagatcgcccatgccgtagctgccggcagtgctggtggtccggtcagtttggacactgcgatcattaccaagctttcaagggtcctgatgctggcaccggctgcgatgattattggctggtggtaccaaaaacaagggattaaagatggctcaatcgttttaacgaacgaccaaaaacgcgtcccgattccttggtttatggtcggctttattctggccagcgtgattggaacctttatgccattaggcgctgcagttattgctggtctggttaagctggcctacctggtcttgggaatggcaatggctgcccttggtatgagcgttaactttaaggtcttgctgacgcgcggccgcaacgcgctgctggctgctgttttaggctcggtggtattattgaccttcgtggctgttatgagcaaattattcttctaaatgccaaaaaagagctgagaaattcctcagctcttttttaattgctcacaaccgtattatattcggcaccgtttggcagcgtgaactcaagattgttgattccatcatagccattttgaacggcatagttgtaaagcctggtttccgtgttagtaacatgttttggcttttcgccgatcgatttgcgaattgccttggagacccggttgatctcagttggcgtgactgcctggaaggatgcgccatcaatcgtggcactgattccctgcagatgatcgatcttgacgttgctcagtgccggactgtatttggtataaagcgtcgtaacggctttaaccggcaaatcagtccgcacgccatcgccagccgcctgcaaaagcttattggcaaccgtgatcgagccattttccttaaacttgttgataacggcctctaaaatctgctgttgacggtattgacggccataatcgcctcttggatcatcatagcgcatccgggaatatttaagcgcttgactgccgtttaaatgctgcttgccctttttaaagtggtgtccttcataggtaaaggcaaacgagttgttgaccgttactccgccaactgcatccactactttttccaagacgcccatattgacggaagcgtagtagtcgatcttaatgccaagcagatcctcaacctgcttcttcgtttccttgacgccgcctagcgagtaggccgcgttcagcttaacgtaggtgtagccgcccttgactttgaccttgattggaatgtcacgggaaatagcagtcatccgtactgttttctttttaggattgacggtaatgacttcaatcgagtctgtgttgccggctccccaattcttgcgccctaaagcaccagaatcgagccccagcgttagaatcgtgatcggcttgccctgccgcagtttcttatcgactttttcgctgttgctgaatacttttgaggctacctgatgaacttgatagtactcatagccgccacctgctgccaaagcgattacgatcagcgccagcagccatttaagccaacgccatttcttctttttgggcgttttggctggttgtgttttttcttccattcttccgttcgcatcaataattaagaaccctgcaaaatcaactttgggcgattctcaatcaataacgcgatccttcccgtcattgatttggcagtcacataaataattgccacgtttagcctgactaattcaatttagcagaaaaaaacagtgataatctgatttcaccgaaaaatttaacaatcaataactttttttaaaaaaatttataaactattttaaaataaaaagcaccgtttcggtaaaacgatgcttcgaattattaaagtctgattttagtaccagccattgctcagccagtgctgcttagcattcgtccaagaaccgtaacgaccagcaacatactgatcagcaacgcgttcttggttggcaggtgagtagtcgccattcaggtaggccgcgctcaattggtacttaccgatgtattgaccattgcgggcgccatagttgttgccagattcatgagcggcgatccaagccttggcatctgcttcagagccgtaagccgtggaagtgtagttggaagtggtttgtgaagtttgagcagcagctgattgcgtagttgcttgagcgactggctgagcagtcgtttgagaatcagttgcctggccatcagtcttaacaaccaattgttgaccaacgtagatcttgttgatgtcttgaatgttgttttgctgagccagcgtttgaaccaagctgttgtcattagcgaacttttgagaaatgctggacagcgtgtcgccggattgaaccgtgtacagcgtgtcagcgttggcaaccgtagccgtagcagcaacgccaaaggcaacggcacccaaagcagcggtaatcttcttaaagttcttcttcataaaaatcaaaaccatcctttatcaattatcaattcgtttttatcatttccttatcaacgtcccttatcatacacgctcaatattactaattgataacaaggcaattgcgttttaagagttttttacggctattttgtaacattctgtaataaagtcataaccattcaaacgaccttttgattataaatgttgttatatcaacatttttcggtttggctaacttttttatattgatatttgaaatattgcaaaaaaaatcgtaaaaagtcacacaaaaaccatttttatgatttcagcggctttttacgaccagattttaagactgaattacgccttatattacattaatgttgcaaaaaaattctccaggtaaacggcaacgccatcctcattattagatttggtcagatgatcggcagcttttttgacgctatccaaaccatttgccattactacgccatcgccagcatcgcgaatcatctcataatcattatcggcatcgccaaacgtcatcaggttggcaaaatcccagccatagtgctccaacagtgcctgcagacccacgctcttgttgaccccgtttggtaaaaattccaataccattggctgcgactgaacaacattgacccgctgccgtaattcatcaggaacggctggcagaacctcttgactcatcttaacagccggaatcgccataatcgccttggcatagacatggtcgccacccggtaggtcattgaagtgtgcgtctttaaattcaatgttttttaaaatcgttttatagatggaacgcggcatgtccatgatttcatagacgcgattaaagtccagaacatccagcgaaaaatcgtgctgcttggcaaaatcaaagactgcctgcagcttgtcttttgagatcccatgttctgacaaagcagcccgtgtttgattattgacgaccaacccgccattaaaagtaatcgtgtagtcgtcagccgtagtcagacctaattgttcaatataaggccagattgcgttgattgggcgacccgtacagagcacgattttgatgccttgttcatgcagccgtttcaagaccgcctcgtttcggggactgatctctttctggctgttgagcagcgtgttatccatatctaatgcaatcattttaatcataagcgtttctcttttctatttgtttttcaagatcgttttaacaatcagccgcgtaaagtacgcattcccctgctcattcatatgaaccttgtcctgcgcaaaccactcggcatgaccattggcagcctgattccagtcaatcacgtgtacgttggcattttgcttagcggcctgcttgatctgatcacaaaccgtctgttcccagtcacgcgtcggcacgtgcggcgtgatccaataaacctgatgatccttgccgattgccgttaagatatcattaatcgtctgcgaatccatcgtgccgttggttcctagatttaaaatcacgtttttttgcagctgccccttggctttaagatctttaataacggctggcgtagcgctcccctgacgcccgacttcagcatcaacataagcatgcggcatgatttcttgaatatcctgagatgcatcggccattaccgaatcaccaattgccgtgacttttagctctgaggctgctttaagctggttcgaggtcagaccatattttttctgcagcgacttgctgttgacgttaactttagccgcctttccctttgcaatctgcttgtttttggcagccgtggcctggcgactcttttcaatgcgggtctgaaccgcactttttttagccggcttgcttggcagcatcagaccgcacagcgcgataaagcagatgatgacgactgggccaactttcagccattggtgccaatcatgcattttaaagtcgatccaatgacgaatgctggccggcagataccgccactgataatgagcaagcggctgttcaaccaatcgataggagaactcgctgatcgctaaaatcaacagacattcaaccaaagcattgattactgggtgccggccaatctcaacgactcgttcataaaagaccataaccggcagctggtagacgtaaatgccgtatgagcgctgaccgatccaggtaaagaaagggttggtcagccagcgattcatatgactgcctggatgaactaccgtcgcaatcaaaatcattccgatcaggctgtaaaaaaacatgccgccgcgataggtccagctgctttggcctggcagcgtaaaaaagcccagcagcgtgatcagcagtgccccaatcccgactccatccaagattctggcagcatgtgccgtcaagctggcgttaaggcgatcaatcggccagcataaggccagccaggaacccaaaagcagcgaaaaggctcgggtatcggttccatagtagactcggttgatattttgcggatcaaacagcagcgccatttcaactgctgaagcaaccgccaggataaagacggtccacttgattttggaacgtttgcgcaaaatcaaaaacagcatgaataaaatcagtggccacaagaagtaaaactgggcttcaacgcctaacgtccacaaatgcgtaaacggcgactcgccattgaaacgatcaaaataagactggccatggccgatttcccaccagttgtagacccatagcagattagtagcgatggtacttttgatattatgcagcagatcgcgagcaaacaatgtaatataggccgtcgtgaccgtcagcataacgatcagcaccggatacagccgccgcagacgcttaaggtaaaacttcgtcagctgaataccgcccgtctgatccatttgccgcaccagctgtaaggtaacgaaatacccagagatcaataagaacagcggcacgcccaaataaccgcctggcaacgttgtcggcaacaggtgatagatgatcacgccaagcacggccaacgttcggacgccatcaattcctgtcacatattgcttggaccgcatagatttccccccaaataaaaaaataacaacttttattataatcacagttgaccaacaagtcccattaaaatgatttttttataaaacaacggtcgtgacagcatttttctgccccgaccgttattagaaatatcagaattacttaatcagccgactcggttttcacgcagaatcgccttgaccagctgatcggcttctggggttcgtttccattcctcccagtgatccatcgactcatcttgcatctgatagtgcgtgttgatgaaatgctcataattgatcacgttttgtgaatgtgggatattcagctttaaaatacgaacttccttaatatagccacgctcagcagccagctcggcacggccgttatgcaccatattgccgatttcataatatttggtgccatcattacgcgtaatttcctctattaaggtaaaaacttcatgctgttcttccattaaataaatcccctttcacatctattgtatcagaaaacaaaaatcatcgccgtggaccgacgatgattggcataagagagaaagagaattgattagaaggtaaatacttaataccttgtgactatatattacaaaatattgtaagcgctgtcaatagttattcagattttttcagctgttaacataaaataaaaagaagaaacggccaaccgcttcttctttttataattactgtaccgtaaccgacttagccaggttacgcggcttgtcaacgtccaagcccttgcccagactcgtgtagtaggcaagcagctgtgcaggaacgacactcaaaagcggggtcagcagttcgtcaacgtccggaatgatgatattgtcgtcttcatgtgccagatgacgtgaaacaatcgttaagacagcagcaccccgtgactgcgtttcttccagattgctgcgcgtaaggcccgctgtccgatcctgggtaataatagcaattaccggcgtttggttttcaatcagcgcgatcgtaccatgcttaagctcaccggatgcaaaaccttccgcttgaacataggagatttccttaagcttcaaggctgcctccaaagaaaccgaccagtcaatgccccggccaatgtaaaaggcgttgcgtggcttagagaggtagcgagaggccagtgcttcaatgtcttcttttgagtcggtaattgactgcatcccgttggcaatcgttcccagctggtgctttaagtcgaagttttgagcagcatcgcgactcagatattcacccaatgccttggccaaaatagcttcaactgcgatctgagccgtgtaggccttagtggaggcaacggcaatctctgggccagcgtacagcagcagggtaaaggtagcctcacgagaaagcgttgacttatcaacattagtaatcgtcaggcttggccagttgtgctcattgacgtgtaccagtacttcgcgactgtctgccgtttcaccactttgcgataggaacaggaagaacggtttttgactaagcagcggctgctcataggcaaattctgatgagatatgaaccgtagttggcacgccacagagcttctcgaacatccgggccccaatcagaccggcatgatagctggtcccggcaccaatgatgtagatatgatcggattcagccattgcctgcaaaagcttttcgctgatctgcggctggtcgtcactgtcaaagtattcttgaacgagcttgcgcattacggcaggctgctcatcaatttcctttagcatatagaatgggtaggtacccttgtcggtagcacttggatccatgtcaaccttaaaggaatcgcgcttcttttccgtaccatcgaattcttcaatcgttacattgtctggcttgacgatcaccaattcatggtcgttgatttccataaattcattggtttcatcaatcatcgacatggcatcagaacctaccatgttatagccttggcacaaaccaaccagcaatgggctcttattcttagccacaaacagcgtatctggctgttcgcgatccatcaaggcaaaggcatatgaagaatcaggactgatcaagcgcagaaccttaagcagcgcgtccttggtatccatcttgtagtcaacgacaaacttgtcaaccaactgaacgataacttccgtgtcggtttgactcttaaattctacacccttaagatattcttctttcagttgctgatagttttcaattaccccattgtgaaccagatagaatcgttcatcattggagtagtgcgggtgcgcgttggtttcacttggtacaccgtgcgttgcccaacgagtgtgaccaatcccagccaaccctttaacttctggcgttaaggcagcttccagattgctgatgcggccggaacgcttaaccaggtagtcatgtcctttttcgtcgttgacgtagatgccggcggagtcgtaaccgcgatattccagacgcttcaacccgtcgatcaaaatggaaacgctgcgatcgtttcctgtaacaccaacaattccacacataatatttcccatccttcaataaaattggtatagataactttaaaatcaagctattatttaataacactattgtatattaataattgccggccccaatgtcaatcgattaacctcgattggtatagagtcggcaattttttaatagttttaaaggcgtcacggcaacgattcagcccctcgctgccagcctaaatattatctaagattatttaacttcaagctcgcggcgggcaacttccgcgattttttcaacataggcatggaccagttctttggttggcgcttcagccatgattcgcaaaagcggttcagtaccagaaggacgaaccaagacgcgcccatcaccgttcatttctttttcaacatcggcaatgacggccttcaaagctggattgtccattgcagcttgcttgtcagccacggtgatattgaccagctcttgtggataggtcttgacatcagatgccagttccttaaggctcttgccactggatttaacgacctgcagcagctgcagtgccgtcagcatcccatcaccagtcgtattgtggtcaaggaagataatgtggcctgactgctcgccacccagattgtagcctgacttcagcatttcttcgacgacataacgatcgccaaccttagtctgcacgctcttcatgccatgagcctccattgccttgtacattcccaggttgctcatcaccgtggtaacgatcgtatcttttttcaagcggccattttcattcagatacttgccgcagatgtacatgatcttgtcgccgtcaaccagattaccctcgttgtcaacggcaatgcagcgatcgccatcaccatcaaatgccagacctagatcagcatggttggcaactacggcttcctgcagactttccggatgcgttgacccacagtcaaggttggtgttgagaccattaggattggcatgaattggcgtaaaatcaacatttaagtctgccaacagattggagacaaagccgctggtagcaccattggcagcatcaacaactacctttaggccagacagatccgttaaaatcgtctgttccaaaaatgacgtgtatttgagcgcgccttcgtggtagtcctcaaccgttcccaaaccagcatcagatggccgtggcaaagtatccgcttcggcatccaacagctgttcgatctcatattccagctcatcggaaagcttgaagccatcactgccaaaatacttgattccattatattggattggattatgactggccgtgatcattacaccagcatcggctccctgtgctctaaccaggtaggcaacgccaggcgtagtgacgacgcctaagcgcagtacctcgatgccgaccgaaagcagaccagcaactaaggcattttccagcatctgaccggaaattcgcgtatcacgggaaaccaagacttggggctgcttgcgttctgagtgccgagtcaagacatagcccccggcacggccaaccttaaaagccagttctggactcaggtcgcgattggccacgccacgaacgccatcagttccaaaatattttaacttcatgtttctcctcgtttctgggctaaaaagctccgttaaaattcactatgtttgattatactactttgtatcattttcgcttgccgaaaccgacgaattatttgactgactgccagatgccgagctggctgaactgtgcttggctgaagaagcgctcgcagactccgctgaactgtcagaattggactgcgttatcgccgagctggtcgtcgcagatgaactggaattcttgtcgccgctgtcagtctgactgattggtacggttacggagaccgtatttggcatgatcaccacgttcattgtctgaccgctttcattgattgcctgcagcgttaccgtccgatgcagcgtactttgcgcgtttttaggcacgttgacataagcaattactttggcaacctgttgaacctcacttttggccccggtaatctggaccttttccaatgcggctttaggcgttccaacctgatagctgccatttaaggttttagagcttaagcgcacttctaccggcaccgtcgcggtattgcgcgattgaatgttgaccttgatcttggccggcgtgatcgtataactcaattccttattcaatcccgatgccttcagacgcacctcatgcttgccggttcccagcttggtcagatccgcatagaccttaaaattttgcgtattagccgtggtcgttaccaaggcagagggtccggtaatcttgattttgacatattgcggaaagccggtgacaacgtatttttccgaattcgactcaacctctagcggtattttgagcgtctgcgtcttattggccatcagcgcagtattttgaccgttttgtgatgactgacgcgtatcgctgcttttgctgccagtaacgtatataaacaataggattgccaataccaaggaaacgattcgcaatacccagacatggtcgaacaggcccatcttgtcatttttcatgctgatcgcctccctgcttacgaaaacgccgcattaaattggtaagaaaattctcgggacttggatgctgaggagtttcagtataaagctgcgcccgcaaaaacttcagatagtctttgcgtgacatgccacgcatcagctcgttgtttttggtgatcgagacttcacccgtttcttctgagactacaatcgtcagcgcgtcggtaacctcgctgatcccgactgccgcgcggtgccgcgtgccaagatctttaggaatcagcttcgagtcagaaagcggcagataagcagcggcgacagcgatgcgattatttttgatgatcacggctccatcatgcagcggcgtatttggaataaacgtattgatcaaaagggcaccagtaacttcggcatctaatggtatccccgtttcaatgtattcttccaggccggtttccatctcaatacagatcaaggccccaatccgtcgtttagaaagatattgaatcgcctggtccaattgccgaatcaagtcctcttcctcttcgttggctttaggcgtacgggcaaacagcgcgccacggcctaaatgctccagccctcgccgaatctctggctggaagatcacaacaatggcgatgaccccccagttgatgacctgatccatcacccaagaaaccgtgctgagtccgatataccaactgatcagcttaaccaggatgataatcagaatccctttgaacagctgcacggccttagtcccgcgaaccagcatcaacaactcatagatcaaaaaccagatgactaaaatgtcaattagattgaccagattatgccagttgaggagtgatgcaagaaactgcaatatatatctctcccttctgccttaaaataaaattcttaaatatgattatatcattaaaaatgttcgttatttaaccagtcaagccgattgtctgttatgctaggcataagttttttaaagaggtggttttttgcctaaactgtcttatcaatggaaattaagactttattttttgattctgctggcaacgctgcagctacttttgaagtcgccatttaattttatggtcttgaacgtttttctagcctatctgccaatcgaatttggtttttgggtccagcattttgccgatcgacgctcactggctttttggtcgctgctgtttttatggctgattttttatcccaatgctccctacgtcatgaccgatctcttccatctttcatggctgcatccccataccagtactactggcatcctgcgtactgatcctaagatgtggctgatttttgcgctgatggttctgtcggcattcagctgtgcaatttttggcacggttgagatggcccgcctcagtcgactgttagaaaaaatgctgacgcctaaattttcccatagtcatttaatctgggttggctgcttctcttttctagccggtattggcatctatattggccgttttttacgcctgcactcaatctacctttttataacgccatcttggttctttagacagctgttaagcatctggagctggccaatgcttgaattcgtcttgatcatgaccatattgcagctgctgctttactggtgtctgcacttgatcaaacaaaccgatttgatgtaattgaggattctcgtcgctaactgggacgagaattttttataccaaaataaaaaccaggattatcagtgacaatcccagttaaattcatgaaacttttattcagtttcccggccgataatacggacctcagtttccaagctgacgccgaatttttctttaacggttgcttgaacatgatgaattacgtttagataatccgttgccgtaccatggtcaacattaacgataaaaccggcatgcttggttgaaacctgcgcgccgcctgaggtatatccctgcagaccggcatcatggatcagcttgccggcaaagtagccttctggacgcttaaagactgaaccgcaagatggcaattccaacggctgcttagcggctcgccgggcgttaagatcatccatcaatgcggtaatctcagcttgatcacctggcttcagatcaaacacggcttccagaacgatgccgtgattatcctgaaccgcgctgtgccgatagccaaaatcaagctcttcattgtcataatgcttgatcgttccatctggcagcattgcagtgacttcactggcaacgtttttagtttcaccgccataggcaccggcattcataaaaattgcgccgccaacgctgccgggaatgccagcagcaaactcaaggccagtaagcgaatgatcgcgagctgccttggttgtttcaatgtatgaggccccagcctgagcaatgacgcggttgccttcaacttgaatcccattcatctgagtcaggatcatggtcagaccttcaataccgccatcacgcacgatcagattgctggcgttgccgattaccgtcagtggcatggcattggcatcagcaaactgaaccagcttttgaacttccgcaacgtctttagggaatgccaaccagtctgctgggccaccagttttagtattggtatactttgaaagtggctcgtcctttaagatttgaatatcaggaaattcttgcatcagattatttgccataaattcgttctctcgctttctcaacaaaaattcgtcaatcttttcttattgtagcattcttttggaaattgacgatccgaacctctacaatagtaccagataatttatttgcgaggttgactgcaatgaccaaatttatttcttggaacgtcaatggattaagggccgcaatcaagcatggctttttacaggttttcaatgaaatggacgcagattttttctgcatccaagaaaccaaactagcgcccggccaattggatcttgatttgcccgactatcatcaatactggaactatgccgaaaagaaaggctattcgggtacggccatctttgccaaacagccaccgcttagcgttcaatatggcatcaatgtaccggagttcgatcatgaaggccgtgtcatcactttagagtatcctgatttctatctgatcaatacctatgtgcccaactccggtgctgaactgaagcgcttggattttcgacatggctttaatgaggctttttatgaatacgttaatcagcttagtcagcaaaaaagcatcgtttggtgtggcgatctcaacgtggctcaccaagaaatcgacttgaaaaatccgcagagcaatcatcatcatccgggatttaccgatgaagagcgctttgacttctctaagctgctaaaaagcgggtttactgatacgttccgttatttttatcctgaccaagagcacagctattcttggtggagctatcgtttccacgctcggcagcgcaatgctggctggcggattgattatttcgttgcctcagccgatcttgactcacagctggttgatgccaagattcatgatcagattcttggcagtgatcactgtcccgtcgaattagacattcagttataggaggaaattaacatgaactttgttgcgatggactttgaaactgccagtggcaaacgttggtcggcctgctcgctttctttggtcgtcgttcggcaaaatcaaatcgttgatgagttctacaccttgatcaatccacagacgccttttttctggcgcaacgttcagatccatggcattcatgaaaaagacgttgccaatgccccagtctttcctgaagtctgggagcatattcagccattttttgatgccaacaagctggtgattgcccataacgcctcctttgacaacagcgttctcaaaaatacgctgactcattatgaattatcggttcccaatttcttatcattggacacgttaaagaccagtcgccagttctggccgcagctgcctaatcacaagctcaatacgatctgcgatgcattgaatattcagctgcatcatcatcataacgcgcttgatgatgctcaagcctgcgccaatatcctgctgacgcaaaatcgccagttcggcccggaaatgatcaagccgtttatcgttaatgtctaattatcgattcagcaaaaaagcaccgtcaaaactgacggtgcttttttggaccggctgactgccgatcaagagagttttaatgtcttagaaagcctattgatccatgccgcgttttaaaatctcaacgtcccacggttccagtttggctttcggagcggctccggtcaagatatccacaaagccggcctgttgcagatcagttggcagcaggcgcgactcattgcgcagattaagcacaaagtagagttcctgcccattcttaacacgccgcgtgatttccagatcggttgtttggctggttaggccggcaagcccagtctgatcaatgacgcgctcaattactttgccaagtccctgatcatctaaacgcgtgccaacgtaccacgccagccccttgccaaatatattttcaactacagctggcgtgccggcataaaattcactggcataatgagccaatgcccgagtttttgatcccgtcagatgaatctgatcacacagcagccgcccttcatattgctgcgctgactgatcaaaagctactttgacggtttgtcctggtaccgtcgcatcagtttcttcaacccagatgcccaataccctgcttaaaggacctggatagccgcccaggtagacattgtcggattcatcaaccatccccgatgcataggtggtcagcagatgcccgccattttgcacgtaatcactgatcttttcgcccagtccctttttgaccatgtacaatactggcgcgacgatcagatcatattgtgaaaagtcatcgtcaacgccaatcacgtcaactgggatctggtgctgataaaactggcggtagtagtccaagatcagtggcacgtactgcagatcctgcgtaatcccggccacgtactcaaaggcccagaagttgctccagtcaaaaacaatggctgccttagctggagtcgcggcatctttaaaatctgcgcccgtttttttcaaatcgtgtcccaggcgtgctacttcttgaaatgcgcgcgtatcggtccgctgcgaatgactgattacggcaccatgaaatttttcggatccccctacggcctgcttcaactgaaaatactgaacggtgtcagcaccatgagccaccgcctgcagttccgtggcccgcatttgattagggcgcttcaacggactgtatggctgccagttgacctgcgaaggcgttgattccatcagcatgaacggctggtgtttcaatccccgcattaagtcatagcgaaacgcggctacataggctggatcgtcataggctgggtagctgtcataggcaatgatatcttgatccttggcccaggcatgatagtcaatccacttattaggcgtgccatggaaattggtcagaatcggtgtctgcttgtcatatttttcaatcgtctgtttttcaagattgtataacgaaagcattgcatccgactgaaaacgcagatagtcaaccgacagcccagccacgatcgtatgcgtgccttctgctccccaggcatcacccagctcgttgggaacttgaatctcatcccagtcatagatcgtatggctccagacattgttgtcccaagcctgatttagattatccagcgtttgatagcgctgcttgagccattcttgaaaagcccggcgacagttttcacaatagcagttgccgccatactcattattaacatgccaagcaacgatatgcgaattgccagcatagcgccgggccaattgatcaaccaatcgacctgctaatcggcgatagttgggtgaactcgggcagaaattatgtcgttgaccaaagacatgccgccgcccttgataatcaactctggcgacatccggatattttttaaacatccaggcaggcatcgcggccgtggaagttgccataacaatcttaaagtcagcttgactcagctttgcaacgatatgatccagtttttcaaaatcatattcgccttcacgcggttctaaaagggcccatgaaaagacgttgatcgttgccgaattgatatcggcctgcttaaagaccttgatatcgtcatcccaatctgtttctggccattgatctggattatagtcgccgccatatagaacggtcggcagtccctgcttcatatttctccctccaagcctttattttttatattctgctttggcaattggctgaccatgctcaaccttgtccccaagccgaagctcttgcaactgaactttttgcggctgtgttaaaaagtctacaacgatatcatcataaccgctttgtaaaatcagatcacggttgaattccatcaacagctcaccggcatgcacggtctgtccttcttggaaatgaatattaaagccggcgccacgcatattgaccgtaccgataccaacatgaactaccaggccaatcccggcagctgattcaatctcaaaggcatgctgcgttgagaaggcaaacttgatcgtgccgtcaaatggtgcatagatgcgaccatcagctggctcaatcgcaaagcccttgccagggaatccttttgtgccgtcttcattggttacggaagcaagatcaacgacttttccatcgactggagccaaaagcgttaatgtcgtttgagcggcagagacatcctcaaccgcttccgcaccattgccggcagccaattcattctttaattcttcaacgacttgagcatgcttcttttcgctcagtgtaaccttgcttaagaaaatgacgattgacagcagcgccaaaaccattggaatgtaaaaggccatgccatcaaacgtacgaatgctcttggcagtcatgtcagctgccgtagcactgccggtcatgccacaggctaaggcaatccagccaaccaaaccatttgagattgcacccgtcagcttatcgatcatcggccgcactgctaaaacaacggcttcgtttcgctgaccagacttaagctgaccatattcaatcgcatccgtcagcgtcaaaaccgttaccagctgagcacagttgacgttgaacaaaaccaaccccagatccattacatagatgttgctgcggccaaagataaaaatcaagtaggccgctaccatacagcattgaccaatcgtaaacagccatttccgtggtacgtatttgttgaaaatcgggaacagtgggctgacaaagaaaccaacaatcgtcgcaattaccccaacgacccagaaatgaccgggctcgccgataacaaacttgtacaggtagaatagaaccccattggtaacaacataggcacaagaatacatcaggtatgccagtgccggccacatgatctggtcgttatggaaaattgctgaaaagacgtccttgatcgatgtcttttgcttggctgactgccgaatgatgttgtcgttttccttagttcccaaacaaaccgccaaggcactcagcaacgccagcagcgtaacgattgccgcaaaagcaaaccagccggctggaccctcagtacgatggccggttgccagataggtaaacgttgtaacgattggaaccacgataatcgtcaaaccgttccagccaatcgtaccggcaaaggctcccagtgaggtatagatgctgcgttcatgcgagtcctcgctcaacgctggtaccataccccaataggaaacatcagaaaaagaatagaaaatatcaaacgtaatgaagatcacgacaaacaaaatcgcaaacaggacccagttgacctttgccaagccaaaaattccagtaaacaggactaaaagcagggcaccgctgacgatattgccccataagatccaaggcttaaacttcccccaacgcgtgtgcgtattgtcgacgatattgcccagcagcggatcgataaccagctcaataatccgtaccccgacaatcaagccagtaatcagtccgattaaacggttggcaactgatttgcttaatccagcaaacatgccgctggtaacaaaaataataaaataattgctcataacgccataaaaagcggagtggccaacattcccaaaacagaatgccgaacgagaaatccactgctgcttgcttaaatgctgccgtggcgctgcagttttggtggtagtatccacgataatgcctcccttaatttaccctcactcaaatccatctcgtaatcgatcgtttcgttctaaatgcatttatctgaaatcgcttacagataatattgtacgcatttaacgagtaaagtaaataatttatcataaaaaataaatcatttaccatatttagtaaatgatttattcaatccagccattatcacagatatatctttcattttatttcagtttaaaactttcacgcataattaaattggtatcaaccaatgcatgaacgtgcggccgctccggattagcgattgcatcccgcagaatattcagcgccatgcgggaaatcaccttttgattgatgttatacgttgaaagcggcggcgatacgtattcggcaatatcgctgttgttaatgctgatgatgctggtatcacgcggcacgatcaccccagcatcgttaaacgcctggagtaccccaacgcttaaggtatccgaggcaatcaaaaagccttccggcagctgatcgccgtattgcttgatggctgcttctcccagctgacgaccgtttaaaacgctgaacgagccgttggaaaagatatccgcctgcttgaattccagttcctcagccacgactctaaaggccgtttcccgtgagtctctttgtcttggccgcttcccgatctgcggaccgataccgccaataaaggcaatccgctggtagccagcatcagcaaactgttccagggcatctcgcaccgtcatcgacagattgggctgcactgaatcaaacagatgcggcaatggatcagtgtcaacaaacacccccgctggcaacagccgatgcagccgcttaaaaacgttcagctcaacgttatcgtcaccaacgcataaaaagccttgaaattcttctgcctgatcaatcagctcctcggcatattgaaagaccttgacttgcatgccggcatcttcaatcgttttcagcagggcatccttaagactggcaaaatacgagtcctgcagctgttcttggttgttcatccgaaacagcagcgcgatcgtgggtgcaactgctggtttcttgcggtctttccaataccccagctggttggcaacctttaaaatcttgttgcgcgtcgtttgggtaaccgaaagcgtctgatcgttattgagcaggcgcgaaaccgtggctggcgaatagccagagcgctgggcaatctctttgatggtaaccatttgctcacctcttctgcttagttgcgtggtttaattataccttatttagtaaatctaaataaataataagtaaaaaaagcgcgaaacagcaggctgccattccgcgttacttgattagtcatgatcagctgcagcgggctgaaactccattagaactgctgcgcgctgctggccttgttgatcagtcaccttagcctcaccggtcttgacaaagccatatttttgataaagcttgatggctggcacgttatcatcaaaaacgtccaataccagcttttgcagggtactgtagtttgcaaaccagtacgtagcctcatcaactaaaagactgccaatcccgtttcgccaaaagtcctttaagacagccacgcccaactcgcctacctgtggccgatcagccagttccatgatcgtaacgataccaatgggatgatttcgatactgagccagtaagatcaatgaatcagtactgtcgttaatatcatagagactgtacgcttcttgttcgaccgtcagcgtatccagatgcggcaccaagatggccgagctctcttgagaaagctgtttgagcagattcaggattgcctgtgcatcatctggcgtggccagcttgattccaaccgtttcagtcatgatctgccaccaatcgttttaccaatgattcaaagtgccgtccatgcggttcaaaactcagctcacgggtctgttcatcatcagtccgcttaaaattgattgccaaaaattcggtcggcaattcgtcttcaataaattctgcccattcaaccacactgatgccatcgccatcaaaatattcttccagtcctaagtcttcggccccgccattctcaagtcgatagatatccatatggtaaagcggcaggcgtcctgattgatattcacgaataatcgtaaaagtcgggctcttgatcacgtctgaaatacccagaccagctgccagtcctttggtaaaagtggtcttgccagctcccagatcgccatttaatacgattacgtcgccagcctgcaaaaatggggccattttctttcctaccgccatcgttgcttctcgattgtgtaaagttagttgagtcattatcattatcctttgctggaattgaccattttgatcaaattaacgatcatggtcttcgatagttcctattttatcgtatcctgaccgtaaatcaaaaaggtcgcttgacttttgccaaacgacctttgagtttacagtgcctgagccgccgtaatcaaagcaaccttataaacgtcttcttcattgcatccccgtgacagatcggcaattggtgcattcaatccctgcagaaccggaccgatagcttcaaatccacctaagcgctgagcaatcttgtagccaatgttgccggcttccagacttgggaagacaaagacattggcatgacctgcaaccttggatccaggagccttcaattctgcaacggctggaacgattgccgcgtcaaactgcagctcgccatcgacagccagttctgaatcagctgcctgggccagtttagtcgcttcggcaaccttggtaaccatttcgccttttgctgatcccttggttgaaaagctcagcatggcaacgcggggatcaataccaaacagtttggccgtcttggcgctttcaacggcaacctcagccattgttggcgcatccagttcaatgttgatcgcacagtcagcaaagatatagcgctgatcgcctttttgcatcaagaatgccccactgatccgcttgatgccaggcttggtcttaacgatctgcaacgctggccggaccgtatcgccggttgagtgaatcgcgccagaaaccattccgtcaaccttgcccatgtaaaccagcatcgtagcaaaatagctgacgtcttttaacatcgcgtcgacctgttctggtgtattcttaccgtgacgccgttctaaaagtgcggcatgcattgcttgatagtcggctgccggataggtctgcggatccatgatttcaacccctgtcagatcaatgccatcctgcttggcagctgctttgatcttggcttcatttcccagcagaatcggcgtcagcagaccatcatgcgctaaccgagctgctgcgccaaagatccgttcatcctcaccctctggaaaaacgatccgcttgtcttgtgatgaaagctgtgactttaagtgttcaaatacatccattattcataacctcatttccattgtgcgtcaatatcaacatgttcgggcagacgccagtcaatcggtgtctcacccattgccaccagagcctcattggttttagaaaaaggctttgagccaaagaagccacggttggcagaaaaaggactggggtgcggtgattgcagaacaatgttggtctgcgtgttgatcaaaggaatttttgattgggctgccttgccccaaagaataaacaccactggtcgcggccgttcagacaacgcatgaatcgctgcatccgtaagctgctcccaaccatgaccgcggtgcgagaacgcctgaccagcccggacggtgagcacggaatttaacaacagcacgccttgatcggcccacttctttaaatagccatgctcaacgggcggatagccaagatcgtcttgcagctctttatagatgttttgcaaagaaggcggaatcttgacgcctggcaaaactgaaaaactgcagccgtgtgcctggtgcggtccatgataaggatcctgtcctaagattaccacttttacctttgaaaagggagtccattcaaaggcttcaaaaatatgatgcatctctggatagatcgtctgatgggcatactcatcagctaaaaaagcgtgcagctgagcataataggcagattcaaactggggttcaagcacgccccaccaatcgttatggataagttgtttcaaagtcagcacctcgtgaatattttaacatgattattataaatacgatacctattttgatcgcgttaattgactgtttttattgccgacagctgttaaaatggtagttagatatttaggaaaagtggtgatttctgtcatgcggcaattgtacatccgcgaccgttcgaccgacttgaacagcgctaccgtcattcacgacgcaagcggccattcatgctacctgttagccggtaaatgggggattcgctatgatgcactttcattatatacgatgagcggtgaattgttagctgaagccaagcaattaacgctcggtcttacgccaaaattcgctctttatttaaatcggcgtcaagttggcacgatcggcaaatcactgggactttttcatgaactgatctatatccacggtctcaactggattgtcgtcggctcattggtaagtggacgcttcaaggtcttttgcggcagccgcttgatctttgcagttgagccggtaccgaatactggtggcttttgcagctgtttaagcgtcaccaatcaagccgatgagccattggcaatcttaacggccaccatcatcaaccgctgggccagacatcatgatcgccagccgctgcgagaacgattgcgtcagctgaatccgatgtcatcaactgaccagggcgatctaagcatgggattcgtacctaaaacagtgcttaatgatcaaagcctcagtagacacgttcatcagccagaataaaaacggggtgcatttttttagaatgcacgcccgttttattttgcacgaaatctgatttttagtaatgtttcaaaacacgttcgatctggcgctcctgctcacgcttcttgatcgactcgcgcttatcgtattcatgctttcccttagccaggcccagcagtactttggcatagccatgcttgatatacattttcagcggaatcagcgtaatccccttggtcgacagctcaccggcaatctttttaatctcttttttatgcagcagcagcttacgattgcgcaggggatcatgattaaagaaggtgccgttgtcatattgactgatatgcacgttcatcagccataattcaccgttatgaagctgagcaaagccatctttaagattgacgcgccgagctcggacggatttgatctcagtcccagtcaaagcaatcccagcttcataagtctctaaaactgaataatcgtgacgcgcttttttgttctgcgcgattagattatcatctttttcgtgatgggatttttttgccatctttttccctcccgtcatagcttaacgcgagcggcgatcaccattgttgcggccgcgctgggaacgcttgccgccatcatgccgacgtgaaggcccgcgatcaaacagatgattgctgcgccgaccattaccgttgccattgctgcggtaggaacgcttaccatcttttttgtcccgctcgccatggccgaatctgctgtgcttgtcgtcacgactgccacgtcctcgaccattaaagcgaccatcatttttacgcggcacccgcagcttggttgttggggcttcctcagggttaaccagttcaaagtcaacctcgcgctgatccttgtctactcgaatcagtttaaccttgactggctgaccaatttggaagatatgatgatggcggcggccaaccaatgccatgttggattccagatactcgtagaagtcatcgttcatgacactgatatggatcaggccttcaacggtattttccaaggctacgaacaagccaaacttcatgacggaactaacaacggcatcaaaggtctcgccaacatgatcttccatgtattctgccttcttcatgctgtcaacgtcgcgttccgtatcaataccccgccgttcggtaaccgaggtgtgctcagctacttctggcagccagtcgcgatatttagccttggctttttctgtcgtgccgttttcagcataccagctaatcaagcggtgcaccatttcatcaggataacgacgaattggcgaggtaaagtgcgtatagtattgggcacccaaaccaaagtgaccgacttcttcatcagcatacttagcctgctgcatactgcgcagcatcatcacctggaccatctgttcttctggcttgccagccacgctctttaagacgtcttggagcatcttgggcttaacgtttttcaagtcacccttcatttcaatgccaaagacgctgagcagctcagcaaagctcttgattcgatcggcatccggcgtttcatgaatccggtataaaaacggtacgtgcagcttatagtagtgttccgccacggtttcattggctgccagcataaaggattcaatcattcgttcagaagtcccccgctcgcgcagctgaatgtcggttgggtgaccctcctcatcaacaatgatcttggcttctggcgcatcaaagtcaatggcgccgcgatcatgccgatgctttaaaagaatctggtgcagctcgcccatcgtctcaaacattggcaccagttcttcgtattctttgataacctgtggatcatgatcttctaaaattgcgttgacggctttataggtcatccgagcatgagaacgcattacactaggaaagatctcgtgcttgacaatgttgccctggggatcaatctccatctcacagctcattgccaaccgttcttcattcggattcaaggaacagatgccgtttgaaagtcgctttggcagcattggaatcacacgatccgttaagtagactgaagttcctcgtttaaaggcctctttgtccagtgcagagcccggcttaacatagtgcgtaacgtcagcaatatgaacccccagatgatagttgccgttgtcaagcttccaagccacgacggcatcatcaaggtctttggactcaatactgtcgatcgtaaccagtggctgagcggtaatgtctttacgacccttcttttcttctggcagcacgtgatcaggaatggcgttggcctcatccatgaccgcttgtgggaaaacatgcggaacgtcatgggcatagacaacggagagaatatcaatccccggctgatccttgtcgccaataacctcagtgaccatccctgtcatgatctgcggtgaatcatcgcttggatatgatgcaatcgtggcgttgacgatttcgttgtcttctgggtgcaaaccatcatcagtgacaaaaaagcggaaattgctgagctttttgtcttttaaaatgatctcaccaataaagttgcccatcgtaatgtttttaaactcgccaaccacatgctcataatgacgcgtgagaatttccgttacctgtccttctggtccctggtcgctgccgggttcaggagcacgcaggatcttgacttcaacctcgtcaccgctcattgcatgcatggtgtgatcagggttgacataaacgtctggctgctccggatcataagctacaaagccaaagccctttgcattgccacgaaagatcccgctgatcgttttaggcttgataaccgccttaaattcaccctgatcggttaccatgacttttttatcccgttccaattgtgccagtgcctgaacgatcggcgtaaattgatctgctctgttcattcccagctgctgggcgattttttcagccgaaaagctgagttcttgatgatcgagtaaacgcttgagtatttcaagttgtaattgtgtcatccatatacctctttaaaataaataaaaagccccctgatattggcaggaggcacttaaactagtgtgaagaaacatagaccagcgccagtgccaggataaaaaacagggcaccaaagatggtcgtagcaatctgcataaccgcttcaaaaccgcgagccttgcgccgactgaacaggtcgccagctcccccggtcaaagcggacatggcatcgttgtcattcttggctggctgcatcattacgcaagcaatcaaaatgacgcagacaatcaagaagagggtcataatcgtattatacaaaaaaatttcctcctatttcacccgctatatccgttaaataataccatatttccagtcatttggctaatcatgcgctgattgtcgggctgccagattgatccgcgcctggttggcaatgtgatttttgccgcgcaactggatgaccagcgtatcgcccgctttcagtcgcgtatcaccatgcggaatcagctgattttcgccacgatagatacaggtgatcagagcaccgactggccaagcaaaatccttgatcagacagccatccagcctggagccgacaaaaattggcgtagtcatctgtgtcagccccagcagttctttttgcggctgtttatgcatcatattggcaaacatagccgcgtataccggtgtcccgcccatcagatcaacgaccagccaagctacgattgaaacgattgccagcggcataagatgcgtcatcgtgccgaccatttcggtaatcaaaagaatagcagtaaacggcgccttgctgatgcaggcaaagtagccggccatggcatagatcacgtaattaggcagatatctggctggaattaatccccaatgcatcatgattacgcaatatagagcaccaataatgccacccagcgtcagaatcggtaaaaagatcccccctggcagctcagtcgcgtagctgatcatcgaaaagacaaagcgcaaaaccaataagcccagcattaccttaagctcagccggcatcttaggcagcgcaacgaccagattgtttcctccacccagcgttaccggccaccaccaggcgattggaatgaccagcagaaatgggatgattggataacagactggtttgagaaattttatctggcgcatccatttaggcagccgtaagataacgacctgatatagcctgcccagcaagcccagtaaaatccccaacaagatcagatgccaatactgtgaagctggaaacagcacctcatgcggcacgttcagatcaggttccaggccaaagaacgccatcgaaaccagattagccgacagtgagctgataaataccgatagccagaccagtggcgagaaattatgataaacctcttccaaaataaacatcgtgctggcaattggcgcgttaaaggctgccgaaagcccggctgccgcgccgctggcaatgccaactcgtctttcaatttcagttctggcatttttttcggcaattccctgaccaacagcagctcccagctggatcgagggtccttcacggcctaaaaacagccccgaaccaatgctgataatgccaccaaagaatttacgccaaagaaccggccaccattcttcatcaaactgtcccgtcagctgaccttcaacttgtggaatccctgagcctttaatatccggatttttttgaaccagattgcctaaaagcagtgcaatgaaaatactcatgccaatccaaggcagcagccagaccggatgcccatgaaaataggcaaatgctttgataaccacacccaatagattttgaattgcccagcgaaagagactgacaaccaagcctgccgccaagccaattaaaacggcgcggcctgcctggcgcagatttgaataactgagtcctgcaattctagttgttttcactttcttctcacacctaaaaaattttgttacctaatcagtctagcacaaatcaaagcaatcaaaaaaagcgtttggaaaaatccaaacgcttttaaaatcattaatttagatattaacggttttcgatgtcttgacgagcttgttcgctcaagttgtagaaggagtgaatccccttgtattgagcaacgtcgcccaggttgtcttcgatccgcatcagctggttgtacttagcaagacggtcagtccggctcatggaaccagtcttgatttggccggcgttggtagcaacaaccaggtcagcaatcgtcgtgtcttcagtttcaccagaacggtgagaaacgattgccgtgtagccagcttccttagccatttcgatcgcttcaaccgtttccgtcaaggtaccgatttggttcagcttgatcaggatcgagttggcagcacccatcttgatacccttgcgcaggtagtcagtgttcgtaacgaagaagtcgtcaccaacaagttgaaccttcttgcccagcttgttggtaatcgttacccagtcatcccagttgttttcgtcgattgggtcttctacggatacgattgggtacttttcaatgatgcccgtcaggtattcgatccattcttcagtagtgtattcttcaccagtggaccaacgcagcttgtacttcttgtcttcgtcgttccaaagttcagaagcagcaacgtcgcaggcaatagcaatgtccttacctggcttgtagccggcatcctcaattgccttgatcaagtattggaatggttcttcattgttggcaaagtcaggagcaaaaccaccttcgtcaccaactgaggtaaccttaccagcagcttccagttccttcttcagggcgtggaaagtttcggcaccccaacgaattgcttcacgaacagttggtgcaccaactggcatgatcatgaattcttggaagtcaaccttgttgtcggagtgggcaccaccattgatgacgttcatcattggcgttggcagcagatgagcattgaaaccgccaaggtagttgtacagtggcacttgcagctcatcagcagcagcccgtgcagcagccaaggaaacggccaggatagcgttggcacccagcttgcccttgttaggcgtaccgtcaagcttgatcatagccttgtcgatggcaacttggtcagtaacttccatgccaacgatttccttagcgattacgttgttaacgttggcaacggccttcaaaacacccttgccgccgaaacggttcttgtcgccatcgcgaagttcaactgcttcgtgttcaccagtagaagcaccagatggcacgatgccgcggccaacgccaccggcttcagtgtagacttctgcttcaacagttgggttaccacgtgagtccaagacttcacgagcataaatatcagtaatgagtgacattgatgaatctctcctctgtcattttaaaattggaaagttcttccgctttccattgtattattcagaacaatttaaaacaagctttatcttaagagtttacaagctttaagaaacgatcaggatccaggctggcaccgccaaccaaaacaccatcgatatcatcataggccatcaaggctttgatattggtttcattgacgctgccgccgtaaagaattcggacggcgttgccaatgtcttcaccatacatatcacgaatcgtctggcgaatcagatagcagccttcagcagcctgttcaggatcagcactttggccagtaccgattgcccagcttggttcaaaagccatcgtaaccttggtaacatcagctggtgacagtcccttaagatctgccagaatgcggctgactacccaacgaacctttttaccggcaattcgtcgtcccatcgtatcatcacagcagacgatcggacacaagccattgcgcaaggcaacctggactttttgattgatcagctcatcagtttcattaaataaacgacgccgttcagaatgtcccagaatgacatgatgaatgccagccaaagacaatgagcgtggactggtttcgccggtgtacgcacctgcaatccggcaatagcagttttcagcagcgatttttaacggcgtatctttcgcggcttgtaccatcgacgtcaatgaaagcgtcggtgcagccaggacgatttctcgttcactggggtctggcaattcatttttaatatagttgacaaactcaactgcttcagaaaccgttttgttcatcttccaattgccggcgatgattggtactcgcatgcaaaagcccccctttttaatttttccgctgctttaattttagcaaaaaaagcgactgaatcgctactatgctaatcaatcgcttatctagctttacttttcagaaattgctgcgatccctggcagttctttaccttccaagtaagtcaatgaggcaccgccaccagttgagatgtggctcaaacggtcagcaattcccaattgcttggctgcagccgtggagtccccgccaccaacaatcgtcgtagcaccagtcaacgtgcccaggaacttgccgatttccagcgtacccttggcaaagttgctcatttcaaagacacccattgggccgttccatacaaccgtcttggcatcagccaaaacgctcttgtacagttcaatcgtcttaggaccaatgtccaaagccatccagccatcagcaatgtcgccttcaactactttagtgttggcgtcattcttaaaggcatcagcaactacattgtcaattggcagaaccagcttgtcgccggctttgtccataatttgcttggcaacatcgatcttgtctttttcaaccagtgagttaccagtcttaatgcccttggcagcgtagaacgtgtaggccatcccaccaccgatgatgatcttgtcggccttgtccagcaggtggtcgataacgccaatcttgtcagataccttggcaccacccaagatggcaacaaaaggacgaactggattgtcaacagcgtcacccaagaacttgatttctttttccatcaagaagccaacgcctgacttgccagcgccgattgcttgggcaataccaacgttggaagcatgggcacggtgtgcagtaccaaaggcgtcgtttacaaaaacatcgcccaatgatgcccagtacttgcccaattcagggtcattgcctgattcacgcttaacgtattcaccgtctttaacgtcttcgtaacgcgtgttttgaaccagcagcacgtcaccattgttcatttggctgatggcgtcttccaactgcttgccttcagttactggaacaaaagtaactggcttgttcagcaggttggagagacgttcagcaactggacgcagcgacagacctggcttgtcttcttctttcttgatccgacccaggtgagagaacaggattgctcgaccaccatgatcgataacgtagttgatcgttggcagagcagccacgattcggttgtcgtcgccaacgacgccatccttgattggcacgttaaagtcaacgcgcatcaaaacttttttgccttccaatggaagatcttcaacagtcattttagccataattgaccaattcctccttaatctgcaaagaaggcgggcggagtttcctcctcccgcctttcaattgatactattcagttcgccttacagggtagcgaagtgaagcagcgtacggatcatgttgcaagtgaagccgtattcgttgtcgtaccaagcaaccgtcttaaccagttgtgcgccatcttcgccttccatgatttcagtttgggatgggtcaaagacggaaccaaaagtagagccgataatgtcggaagatacgattgggtcttcagtgtaaccaaaggcttcgttgccttcagttgccttcttcatagcattgtttacgtcgtcaaccgtaaccttcttgtccagaatggaaacaagttcagtcagggagccatcaacaacaccaacacgttgtgcgtgaccggacagcttaccgttcagttctggaataaccaggccgatagccttggcagcaccagaagagtgaggaatcgtgttcgtgcttgcagtacggttgttacgcatcttcttgccacgagggccatccaggatggcttgcgtagaagtaaatgcgtggatcgtagtcatggtaccaaccttaacgccgaattccttgttcaggaagtaagccattggagccaggcagctggtcgtgcaagaaccagcagaaacgatcttgtcgtcagccttcagcgtgtccaggttaacgcctggaacaacagttgggatgttaccagcaggtgcagaaatcagcacacgctttgcgccagcgtccaggtgtgcttgtgacttttctgcagaagtgtagaaaccagtacattccagaacgaagtcaacaccatcgttcttaacccaaggaatgtcccgtgcatcgcgttcagcgtatacagggtattccttaccgtctacaacgatgcccttgtcagtagaagaaacttcgccagggaacttgccgtgagtagagtcgtacttcagcaggtaagccagcattgaaggagtagtcaagtcgttgattgctaccacttcgatgtccttggagcccagttcgtggatccgacggaatgccaaacgaccaatacggccaaagccattaataccaatttttacagtcatactgcaatttcctcctttaggaaaataattcaatgttcttgtttagtttaacatacatttttatccaaaattgacatttttaaggaaaaaattcggaattttggctgttagctaaacaatcgcactaacctacgttttttataatactcaaaaccgactaacttgtccatggaaatgtgttcagttttagataaaccagcttcatccaatttttttgtaaaaatattcattttttgcttgcattttatcgtcactggggatattataataaacgttcgtgttaattcagcgggcttaaaattatttcgcgcccttagtgtaatggatcgcacgtgagattccggttctcgagatccgggttcgactcccggggggcgcacttaaatataaaaaagcactgatcaatctgatcagtgcttttttattaccacgaagtcaaaactacatcacaacatattaaaagacctcatccataatcctggatgaggtcttcttaaacggaaaagcaaattacttttcttcagctggcttttgcttagcccacttgcgaattgcttcgattttcttttccttcttagcccgcgtgtaacggtctgcgactgggcgacggccttgtacgccgtatggatgtgctttacgcattgcaatatgcctcctttatatctaacgtaaataatcaacattccaattataaaggtcaggttattaaaaatcaacaactattattgcaaccaactgatcagcaataaatttaaaaaaatttttggacggtcgaattgaattttggacatcttgctcactttttatctttttcaacacaaaggctattcagcatcaaatttggaaacggtagcactattttcacaaatgaaaattgataaacgttttccgtcaatttgaactataccaatttgattattaaaacactaaatcgccttaaactggcacttgtcaataataccaatttggtgtatagtcttagacatcacagaggttaacaattaattcattcacaatttcaactaaacggggagatgagacttatgtttaaaaagaacatgcacgaactaaacgaacttaaaaaaatgatcgaaaacgatgatcgcgcaatgctggatgccgaaatcgccaaccaagaactgagcatgatctcagctgatttgaaataactatacctatattgtctaccagcattaaggcactgctgctaacgatatcagcatcgttagcagcagtgtttttttctgacaaaacatttgaccttttctgacctatcgagtatagtattcacataagttagcaatcgatgctgactactgctaattaagagggaggccaaagcatgaacctagttccaacggtcattgaacagtcatcgcgtggcgaacgcgcctatgacatctactcacgtctgttgaaggaccgcatcattatgctatccggtccaattgaagacgacatggcaaactcaatcgttgcgcaactgttattcttggatgcgcaagattctaccaaagatatttacctttacattaactcacctggtggcgtcgtaacctcagggatggccatctacgatacgatgaacttcatcaaggctgatgtccagacgatcgtaatcggcatggccgcatcaatggccagcgtgctggtatcatccggtgccaaaggcaaacgtttcggtttgccacactcaacggttatgattcaccagccttctggcggcgcacaaggtcagcaaactgaaattcagattgcggccgaagaaatcttgaagacgcgcaagatgatcaatggtattctggctgaaaattctggccagccaattgagcaaatcgaacgtgatacggaacgcgatcactacttaacggcccaagaagccgttgattatggtctgcttgacggaatcatggaaaacagtgccaaactaaagtaattgtttgacctaaatagctaaaaaaaccacgactgcatccagtcgtggttttttagttgctcttagcctgtcgcagttcttcggcataagcatttagcttgcgcagccgatgattaacccctgattttgagatcgggccacctggtaccaaaacgccaagctcctttaagctgacctcttgatgtgcgagcctggtttcagcaattgcccgcagtttttctggcaagctgtccaaaccgaccattgaatcgatcaaacgaatattttcaatctgacgattagaggcattggctaccttatccatattggcattttcacagttaaccaagcgattgacggaattacgcatatcacgaacgattcggatattttcaaacttgagcatgccgttagtggcaccgatcagctgaagaaactccgcaattttttccgcttcctttaagtagacgatatagccgctgcgacgagccgtagttctggcattcaggtggtagcgattgatcatctgggcaatcatctcattatgttcttcatatagtgaatagatttccagatgatagcgcgaggtttctgggttattgaccgagccgcccgccaaaaaagccccgcgcaggtatgaacgaatcattaaatcatctttaagcagcgccatcgggactttttctttgatctgaaacccctctaaaatccccagatcgctgagaatctcttgcgcatggtagcgaagccttacaacgtattgattgttctttttcagcttcatttttcgccggacgacgatctcactttcgacttgataaaactgctttaaaagcgaatagattcttctggcaatggcgggactttctgtttggacgttaagaatcatgttgcgattagcaattcctaaagatccattcatccgaatcagcgccatcagttcggccttggcattatccaagtgcacctgcagccccgtcagctctttttttacctcgctggcatatgacatgcgcgatcctcctcttatttaatagtgtacgccatgcagacgattcagcagttcggctaccaccttgtcgcgatcatgaaaggcaccgttatctcttaagtgcaggaaattactggagattacccgacaccccatatcccgcaatccttgaaaatcatgcttgactggctgggaaatctcattccattccttaaaatcaatgtagtctttaggtaccggctggatatttaccaaaacggtatcaataaagttctgtttcaaatgcgaattaagcacgcgtacatgatcggcatcagagaaattatcggtttcacctttttgagtcataatgttgcagatatagacgacttctgctttggtttcacaaacggccttgccgacgttttcaatcatcaggttgggcaagatactggtaaacagactcccaggtcccaagacaatctgatcggcgtccataatggcatcaataacctgcttaacggccgccgcttgatgatggtcattgttattggacggcgtaatccagacacgctgaattcgtttatgagcagccgtaatctctgactcgccgcttagagtcgagccatctgtaaattcagcgtttaaggttaatggctcgtcggtaacgggatagatatgtcctctgattttcatcagcgatgacagttcctggaccgccgcaaaaatatcgccgcctttcatctcagccagcgccgaaatgatcaggttgccaattgcatggccagctaaaaactggtcggtactgttaaaacgatactgaaaaatctctagttccagttcagaaagctctgataaggcaaccaatgcattacggatatcaccaggtggcaccacgttgacatagttacgcaaaattcctgaggagccgccatcatcagctaccgtcacgattgccgttacatcaacgtctttatccctaaggccatgcagaatctcaggaagtcccgtcccgccgccaatcattacgattttaggtttatggatcattcaaatacctccttattttgccttatcaacatcgcgatgatgcagattaaccgtatagccgtctttgcgcagatcttgatttaattggttggcaatcgtcaccgaacgatgctgcccacccgtacagccaatcgcgatcgttaagctgctcttgccctcttggatatagcctggcaaagcaaccttcagcaaagcctttaagtgtgagtagaaatctttagccagctgactttgcatgacataatcctgtactggctgatcattgccggttagatgcttaagctcgggcaagtagaacgggttgggcagaaagcgggcatccataacgatatcagcatccaatggcaagccatacttaaagccaaatgacatcacctcaacaaaaaaactgctggtctggccatcgccaaagtaatcatcaattcttaagcttagattgcgcggcgtcagctcggtcgtatcaatcacgacatcggcctgactctttaaatcactcaatagcgctcgttctttttggatcccttctaagacaccgccttgccgcgataatggatgtaagcggcgcgtctctttgtagcgcgaaaccagctcaacatcgctggcatccaaaaataaaatctcaacctgcagatcagtacgactctttaagcgctgaatgcagggcagaatctgatcataaaattcctgtgagcgcgaatccattaccattgccattttgtcaaattcagcagcgttttggatcacgtcggcaaatttttccgccagattcggcagcatgttatcaattacaaagtagccaagatcctcaaagctttgaacggcaaccgtcttaccggcaccgctcatcccagtaatgatcacgacttgcagtggttttgccacggagctgtcacctctattcaaaatacgctttccattgtatcatacccgggcgtgtcttttaattttgaagtctttttcatctaaataaaaggcactcttgaagcgaccaatggcttccagaatgcctaatgaattaaattcttagattggctaaggcctgccttaaatcagcaatgctcagctgaccaggcgctgaagccgtaccaaccgtgccaaatgtcaacgccgatccaaaaaccgcaccggcaatccgcgttaccttgcccaaatctcccattgccatggtaattaaaggcaggcccagtttttcattggcctggtgagtggccgacagcagcgtcaaaacatcagcaggattttgaggcatcacagcaatcttggcgacatcagctcccagatcagccattttatgaagtcgatagtagatttcacagtcagttggcgtctgcttaaagtcatgactgctcatgattaccttgatgccatgatcatgagccaacttaatgattcgcataacgccttcttttggatgaaataactcaacatcaatggccgtcgtcagttcattttcaactaccaggcgtacaatttgaaaatacgtctcatcatcaacggctagattgccgccttccttagccgtgcgaaacgtagtcaaaagcggcgtctcacccaacgtttgtcttaggtcgagagcagccgtctttagtttttctggatctaaaacactagccaaaaaatcaatccgccattcgatgacatccggctgagcggctaaaaccgtttttgcctgctcaatgattgccgcttgttccgtggccacaatcggaacggcaatcttgggacttccatcgcccaaaacaacgttattcagctttacttttttcatctagtcttcctctttaaaaagcagattgcgaatgtattcaaccggcatatcttggccagtccaaagcttaaaggctgctgccccctgttccagcatcattcccagcccattaaagacgtgatcgacgccggcctgcttggcaacctgcattaatttggtctcacgcggcgcatagaccgtatcataaacgatcatatcttggtggaaccacgttggatcctcaaccaaagtcatgtcttccaatggcttcatgcccactcctgttgcatctacatagatatcacagctggccagttcttttttaaagtcggcctggtcttcgagatgatgcagcgtggcatgcgcacccgttttttcgttgatgatcttaacattgcgaacggcattttcccatttgtcgtcatcaatgttgaataaggcgatttctttaactccctcaatagctgcctgcatggcaatcggcgttccggccccgccagcacccgtcagcaccatcttttgaccggtaatgtccaatccttcatcctttaatgactgcataaagccgatcccatccgtcgtgtacccggttaaaatgccgtgatcattgacaatggtattaacggcttggcagagttcagctgactcatccaagcgatcaaggtaagagattactttttgtttattgggcattgagatatttgagccgcgcatatccagcgttctgatagcatcaatggctttaggcagcttttgattgtcgatttcaaaacagaggtaggcataattaagccccagcttggcaaaagcattattgtgcatggttggtgacattgaatgacgaatcgggtccgccattaagccaatcaaaatcgtatgaccattcagtgagatattttttcctgtatgaatgttgttcagatccatctgcaagacctccgctttaacttccctttaatgaaattataatgttttaatcttaatataatggcattgcaatttcaatcataaacatagaaaaagcttagcgcacctttatgcagctaagcttaatccctttatattttaaagttcatttatttttcctgctgagcctttctttgtcgatcccgctcgagcattggcttcaagtactgtcctgtgtagctttcaggtactgcagcaatcgtttctggcgttccggctgctacgacaaaaccgccagcctcgccaccctctggacccagatcaatcagccaatccgctgatttcactacgtctagatcatgctcaatcaccaaaaccgtattcccggcatcaaccaagcgctgcaagacgcccaacagccgcttgatatctgccatatgcagaccagttgtcggctcatcaaggatatagaaactcttgccattcgattggcgatgcagctcactggccagtttcatccgctgggcttccccaccagaaagcgttgttgccggctgccccagctgtacgtagcccagaccaacgtcctcaatcgtctgcagcttgcgccgaatcttaggaattgcactgaaaaattccaaagcttctgaaaccgtcattttcaaaacttcagcaatgtttttgcccttatactcaacttccagcgtttcagaattatagcgcgtaccgtgacagacctcgcatggtacataaacatccggcaagaagttcatttcaatctttaaaatcccgtcgcctcggcaggcctcacagcgaccgcccttaacgttaaagctaaagcgtcccttggtgtagccgcgcagtttagcctcattggtctgagcaaacaggtcacgaatatcatcaaaaacaccggtataggttgccggattgctgcgtggcgttctgccaattggcgattgatcaatatcgattaccttttcaacgttttccagaccgctgattgactgatagcttcccggctttgccgatgcaccattgagtttttgtgccaggattcgttttaagatcaggttgaccagtgtcgacttgccggagccagaaaccccggtaacgcatataaattcgcccaatggaaacttaacgtcgatgtttttgagattattggcgcgcgcacccttaagctcaataaaattgccattacccgttcgccgcttttctggtaccggaatctgctgtttgccagaaagatactgtccagtcagtgatttacgtgagcgcataatctgcttaggcgttcccgctgccatgacctgaccgccgttttcacccgcgccaggaccaatatcaataatatagtcggcagcccgcatcgtgtcctcatcatgctcaacgacaatcagcgtattgccaagatctcgcatttttttgagcgaggcaatcaatcgatcgttatcgcgctgatgaagcccgattgacggctcgtccaagacatacattaccccagaaagattcgaaccgatctgggtagccagccgaatccgctgcgcctcgccaccggaaagcgtccgtgcggctcgactcagggtcagatattcaacgccaacattggccataaaagtcagccgatccagaatttcttttaagatcggctgagcaatcttggccttggctggtgaaagctcaaccgattcaaaaaacggaattgccttgctgattggcagctctgagacctcaccaatgttttggcccatgatcttaaccgccagtgccttttgatttaagcgatagccatggcaggccggacaaggaagctcagtcatgtatttgcgcatctgttcgcgcgtaaagtcagaattggtttcccgatagcgacgcttaacgttattgatcacgccttcaaatggaacgtcaacatcccgcacgccgccaaagtcgttttcataatggaaatggaaagtggtttcgccattgccataaagcacttgtttttgctgtttggcagacagtttctcaaatggaacatccatgtcaatccctgctgagtcacaaaactgttccagcattttgggataatactgtgaagaaatgggattccaaggcagcatcgccccttcacgcagcgtttttttccgatccggcacgaccagctcctcatcgacctccaatttgctgcccagcccctcgcattccggacaggcccccagtggcgcgttaaatgaaaacaaccgcggttccagctcgccaaccgtaaagccacagattggacaggcatactgttcagaaaacatcaacggttcgccgccaatcacatcggccgtggcatagccgtcactcaagcgcagggcagcttcaaatgaatcaaataggcgtgaacggatgccttgtttgataatgatccggtcaaccacgacgttaacggtgtgcttcttatttttgtccagtgctggaacctcttctagatcataggtttgaccatcaacctgaacccgtacgaacccagcttttttgattttttcaaaaacgcttttttgagttcctttcttatcacggacaatcggcgccaacacttgcagccgtgttcgctctggcagttccatgacccgatcaaccatctgatcaacggactggctggcaatcacgctgccatcattaggacagattggcgttcctacacgagcccataacagccgtaaaaagtcattgatttcggtcaccgtcccaaccgttgagcgcggattatgagaagtcgttttttgatcgatcgagatcgccggtgacagtccatcaattgaatcaacatccggcttatccatctgtcctaagaactgccgcgcataggccgacaagctctccacatagcgccgctgcccctctgcatacagggtatcaaaggccagcgagctttttccagatccggaaagcccggtaattacgaccagcttatttttaggaatcgtcacgtcaatgttttttaggttgtgggcacgtgcgccatgcaccacaattttatcgttggccattgccaaatccccctagcttcaatgtttagcttgtttgttttttttattcttgactgtcgcattaagctccataattgtgtcgcgcagcgtggcggcctgttcaaagtcaagtcgtttagcggctgaacgcatctgctcagtcagctcagccagcagattctgctgctcgtcttttgccaaagccttgaaatctttaaccgtaaactcagtatcatgctcgatctcaccagcatcctcagccggcttaactgcagtaattgcttcttgaatcggcttgataatagtcttaggtacgatatggtgggcttgattataggcttcttgaatctcacgccgccgtttcgtctcatcaatagcggcctgcatcgaggcagtaatcgtatcggcatacatgatgacctgaccgttggcattgcgggcagcccgcccaatagtttgaatcaaggagcgttcattacgcaagaagccttccttatccgcatccaaaattgcgaccagcgaaacttccggaatgtccaggccttcccgcagcaggttgattccgaccaacacatcaaatttacccaaccggagttcacgaatgatctgcgttctttccaaggtcttgatgtcactatgcagatacttgacttttaagccgagatcttttagataatccgttaagtcttctgacattttcttggtcagagtagtaatcaagacccgctcatttttttcgatccgctgattgatttcgccaaccagatcatcaatctgtcccataaccgggcgaacctcaactttaggatccaaaagtccagttggccgaatgatctgctgaacaacgtgatcagtctgttcctgctcatatggtccaggagtggctgacatgtagataacctgattgacccgttcctcaaactcgctcagcttaagcggtcggttatccaatgcactcggcagtcggaaaccatagtcgatcagctgctgcttgcgggctcgatcgccattatacatcccccgcacctgtggcatggtctggtgcgattcatcaacgatcaatagaaaatccttagggaagaaatccaaaagcgtaaacggcggctcgcctggcttgcggccgtccatgtagcgcgagtagttttcaatgccgttggtgtagcccatttcacgcatcatttcgatgtcataggtcgttcgctgctgaattcgctcggcttccagcggtttgccttcctgggtaaattttgcgacctgttctttcatttcagcctcgatttgcggcaaagcggtatccataatgtcatcactggttaaaaagtgtgtagctgggaagattgagacctgctcacgatcgccgataatctcgccagtcaaggcatcaacctcacgaatccggtcaatctcatcgccaaaaaactcgacgcgcagtgcccgctcatcgcgtgaagccgggaaaatctcaacgacatcgccatgcacgcgaaaacggcctcgctgaaaatcaatatcattgcgatcaaactgaatctcgaccagatctcttaacagctgattacgctcaatttcttggccgacatgcagcgacagaacgtgatcgcgatattcgcgcggatcacccaagccaaagatactagaaaccgaggcaacgacaattacgtcattgcgttccaaaagcgcactggttgccgcgtgtcgcagcttgtcgatctcatcgttgattgaggcatccttttcaatataagtatcactggatggtacataggcttcgggctgatagtagtcgtaatatgaaacgaaatactcaactgcattattagggaaaaattttttcatttcaccatacaactgaccagccagcgttttgttatgcgacaaaatcagcgttggcttattggctttggcaataacgtttgaaatcgtaaacgtcttgcctgttcccgtggctcccagcaaaatctgagcgtgctcgcctttttttagcccttgcgtcagttgcgcgatggcttcgggctgatcgccggttggctggtagtcagaaatcaattcaaatggtcgatctggctgacgataaatcaaagtttttcccccttgcagacggttgatggctgttaccttaataaaatcggtacaagtctatcacacgaacgtttattcgtctaatgatttgcactatcattttcagatcatttcaaaataaaaagctgcctttgttctggcagcttatcttgcttagtttgactggcgtccagcacgttcttccatatctggcgccacgcgtgcgatatagtccggcaatttctccagagtcggcaaagccttgttatgcttgtacatccgcgagttggccattgcctgacgattgatccagacattatgccaggaacgatccgcagccggcttaatgtcttgccaatagtcgctgccaatgtgagcatgcgcttgatggtcaaaatcaagtttttcagcaactcgctcaaacaaggcagcttgcggctggtaggactgacctgtacccccaaagttggaaatacaactttgg

SEQ ID NO: 1973 - DNA, 759 bp, Unknown
  gut microbiota DNA sequence
acctgactgaccattttgagcggcttgaccagtcgttgattgaccaccattagaagcattgccgccttggtctgctgccttgccagaatcaagcttcttgtaggtgatattgatcgtcatgtcttggtcatttggcgtaaccgtaatttctggaacagatgcggatggcacgtatccaggaatgtttggtacgtcaacgctttccaaaatgacattctttgaccatggtccataagttacttcaccggtaacctcatcaaccgttgcactccgcgtaaattcagccttctgcgtgatcgtctgcgtcttgccatctggcgtcgtgatgttgatcgtccgcgtaaccgtcttgttcagatcatccttggcaacgccgcttgggtaattcttaccagggttgtctggcaatacatcagctggcgtctttggattgtctggcgtaacggttgtcgtagcgtgcgtgaagtagtacttgaagtattggtgaacttcggaattcttgtcgtaggtcgtgccggcagcaaagacattgttattagcattgtccttgtcaaagacgtaaccctgcttttcgagttccttaacaacttcatttggatccttggtaaagctgatcgtttcatcagtcttgccagttgctaattcacgcgtgttgctgatttccttgcccgttgtttcatcatagaagatggcttgagcttcttgaggatcaccaacataaacgaccgtcttgacaatgtcttttgaatctggcgtaac

SEQ ID NO: 1974 - DNA, 449 bp, Unknown
  gut microbiota DNA sequence
attcaacatttgtcatactcctaacttcaataagtttcttttgcataaatttcaacctctattcttggcttgtccgagtaatacttgtcgatttcttcgtgaacaatcattgcgtcatctttccataaaacgccgtttaaggcatcttcgaatgatttaaggtaattagacaagtcggcttttacaatcggtctatgcgctcctgatgcccgtctatcgtgttcttttttcgatatgctcttttgaatctttcgataaaaggctaccttgatatagatttcgccctcgactggtgcatcgtgatacatctctgttgccaatgctcgcaactgtttcttaaacgtggcagttttaggcgggtcatacagccgaattcccttgccgaaccttcttgctcgtggcctagcctgtgccaccggttcaatcggcaagatcagtttaatcatgga

SEQ ID NO: 1975 - DNA, 265 bp, Unknown
  gut microbiota DNA sequence
aacaaattacgcattactttacccccttaggattaattgccgctactgagccttgtgctggtttaatatcattgcctggtacaaccgttggcgtcagtgaactctgttcataagcagattgcaccgcattttctgctgccgcttgattaacttcaaacccattgctttgcattgcttgctgaacattcttaactgccaagttaaacttatccttgccagtcatattctgactaaccaacgctgcaactgaagtgtcagctacttg

SEQ ID NO: 1976 - DNA, 1286 bp, Unknown
  gut microbiota DNA sequence
gctaaccaggtttgaaatagtcgtgccgaatttattcgcgattgctgataacgtatcgcctgcttgaacatagtacgttgattcttggctagctgcaccagtaactttcaacacttgccccggccagatctggttaggatcgccaatgccattgattgctgctaaaatctggtacgtcgtgccatacttatttgcaatcgccgataaagtatcgcctggctgaaccgtataagtgccagtagctgggtgaccaacatgttctactggttgtggtgctggaattgatacttctggcactgtgcccgaatttgaagcgccaatcgtaaaggcgccgtcaaaatcatatgacgtgtcgacgttcatacctaatccgttgtcagtccattgccatgcagcagcgttatcaacacccaagtcagtaataccataaccggcttcccaaatcttagcgtcgccaaaaccatggctattaagcgtaccacctgtgaagaacgacttcatcgagtacaaaccaacgttagcatagcccaatgccttaacttcattcaaaaaggctgcggttgcggaattgtagtctgctgccgaatgcacttcagcatcatcaatcatcagcgtatcgcttgtcataccgtactgcttagcaatcttaacgaagaatcgtgcttcattctgcgcatccgcatcactcgtataacgcgcaaagtggtaacagctaacccgcaatcctactgcgagtgaattacgaatctgcgctgcagcacgtggattaacataagccgagccatcttctgaaccttcggtcagcttaacaacgacccccataactccttggtccttagcgcgttggaagtactcaacactgtcttcttgatagctagaaacatcaatgaacaaattacgcattactttacccccttaggattaattgccgctactgagccttgtgctggtttaatatcattgcctggtacaaccgttggcgtcagtgaactctgttcataagcagattgcaccgcattttctgctgccgcttgattaacttcaaacccattgctttgcattgcttgctgaacattcttaactgccaagttaaacttatccttgccagtcatattctgactaaccaacgctgcaactgaagtgtcagctacttgctctagcaacccccaagctactttagcctgctcggtttgtgcgtgggtctgcttagcatctagccacggcttaacatatttccaggcaaaagaaaagagcgcaacgagcgctcccgactggatcaaccattc

SEQ ID NO: 1977 - DNA, 579 bp, Unknown
  gut microbiota DNA sequence
caggcagattcgaattgcccggtagcccaagaacgggttcatctcttcgggcagcggcaggtagttcaacggcttgtcgccaccaatgtccaacgtccgcacgacaaccggcttgccctgcatgcccacaactgcttttttgtaggcttcaaactgctcgtcttcggttggcaggtgatcgctgctcatgtacaggaattcggaccggaacagaccgactccatcggccccctgcttgacggcatcagccacgtcatcgggcgtgccgatattggccgcaatctcaaagtgctggccgtccttggaaacagatggcgcgtccaccagttgggcccattcagcccgctctttttcaaatgagtccgccttggcttgatactcatcgatctgagcctggcttggatcaacgatgatgtcgccgtgcagcccatctacgatgaccatatcgccgctcttgatcgtgctcgtaacgtcttcggcaccgaccacggctgggatccgcaatgtccgcgccatgattgccgcgtggctggtccggccgcccagatcggttgccagccccttgacgaacttggcatc

SEQ ID NO: 1978 - DNA, 237 bp, Unknown
  gut microbiota DNA sequence
atgtcataacggaatggtgaagtcgtgcggttggtaaaagttaaagtttgtgcttgcgtcatatgtgataacttcctttcgaaaatgcttgtttggcaggacttctcaggaaattaaaaatccctgggaaaagcacatcctgcactttctcccagggacgttgactgcttattcaacgtgttaccaccctgattcagctagacctcacaatctagcccttactgagtactctaaaaa

SEQ ID NO: 1979 - DNA, 200 bp, Unknown
  gut microbiota DNA sequence
cgctagctggcaagtcgggaattggtgctatttggcaagacgcttataccagtgacacaattacggacagtaacgctctgcaggcagctttaaaaagctcgctgcatgattatccagatgttcaatattcaatgagttgggtaacgtttgcagataatagtcagatcaaaaataatattgaaatcggtaatactggctgg

SEQ ID NO: 1980 - DNA, 5249 bp, Unknown
  gut microbiota DNA sequence
gtccggatttggcttgtccggatttggcttatccggatcagctggctcagatgccgtcttcgtccgcgcatccagtcctccgctcactcctgatgcctctgtattccgtccttccttcactctcacatagaaatgatagtccgtgtccggaagcagtcccgcaaacactgcagaatcctgccattccccgtctccaaggcgatattcaaagccgcataactctggaatctgagttccatccgtaaatgttgtcggcggatttaaagtgatcgtattggctccaatccctgcagctgtcggagtatccggtgttttcattgccgcttttttgatcgtaagtatcagcgtgatcggggcacactcataatccgtattatcgtcgctgatctttaccgtgcatttgtaggttcctgcgtctgccggtgccactttgctgttataatcggttccgttaataccgctgtatatcacttcatactgattccgcagatcctcagaaatatcgtactcgccccatgacgcccgaacgtcctcatcgattcggtgctgatttccatcataggtaaattctttgtctgtcccctcgattttagcttttttcttcgccccaaagatcacattcgtcacaatgtcacatgtcggcatcgtgagagatgcagtccagcttccatccgcctgctgtttaaatctcggcgggaacaggacaacatgtaagccgccttcataggtaaataccgcattttctgtcggattgtcttttaaccactgaacgccagcttctgtcagagtcgctgtgatcgtatcgccagctattgctgttgttttatccaacgtataatatctactgttttccgctttctgtacaatgttgtatgacgcgttcagatcattcttcacttcaatatttacggagatcattccaggtccgtcaagatatacatacagaatcgggttgccattggaatcattccggacataatactgtccattttctttcagcgattctttatttggtacctccttcggagtgatcgtaactcccttatatttcgatatacttttgacatcaaaaacttcaaactgtttgccgttgataatattcgtaacttccagtgatccgatatggttctcatttgcccagctcgtagttgtatatgtcgctgtcgttccccatgtactccagtcctgtccgacaaaccaggtatactggtaaggtgtaatatctgtcgcatattttactttaacctcagcattgctgcacggcatcgtgaaatagccgataatcggatcgatattgcacaactccgcttcaaatgtttttccgtccccatctgttacctcgatgtggtttactacatcttctgcattaaggttcttaaatttcagatatacctcagaacccgcccgagcccggaatgtgatttgggaatccgctgttcctttaccagattccaccaggtatgtacccgaagtaccttccgcatcctctttgctccggtatacttcgatctcggcatctggagaattagtagtattttcacgaacaatattgactatatgctcactattatctacagtgatctcgctgtccgcctgtttactttcgtcaaactggctgactgcagtaactgtataggtactagccgcagcatctttgtggaccgccaccgttccatcatctgtcacatgaaccgctgccagatcactgctgacccattttacatctcttgatgctccattcttactctcaaccgttgctgtaagcttcagacttcccttcggatagatcgttgcctgctgctggtccaggctgacactgataactttcggatccatgtctaaggagagcgttggaatcatggattctttctgtccttttaataccgggaacttgtaaccgctctctgcggatggcatagtccacacgttttcaaagtcccacccgagtgtgctctgatagaacttctgagatctcagctgatccgctgacgcatccgcaccgtatatctgatccggaccaatattactttcttccggtgtcaaaacttttccagtgctgttccgggctgtcgttcccacaaagccatagtttccggaaagcgttccaccctggctgattctattcacagatgtcatttcagggaagatgctgatgctgtttgtgatcgttccgttatttgcaattcctgatacagtaccgcctgcccattttcctgtcagagacttacctgctgcataactattcgaaatttcagcattatttcctgcacctaccaggccgcctgcataattgatatagtcaacgtccatatccacaacagcataactgttattgatctcggctgttccatctatgtacccgatcagtccacctgcaaagccattgcccgctgttccggtaatccttacatctgcagaacacaactcaattttcacgttcgcagattgacgcacgtgcccaatcagaccacctgcaaaatacgcatttccacttccaataatggaaccgctaatatgacagttttctattgtgactgtttccgatggtgcagacatcagaattcctatttctgtttcactccattctgatgcaggtttcactcttgcatccttaatcgtcaggtcttttatcagacaagcaccggaaacattactgaacaatcctgcgtacacgccattattgaccgccttcaatccatggatcgtatgaccgcatccgtcaaattccgccacactgttggaaatcggaacaaaatcatggtatccaagatcaatatcgcacactagttttgctttgccgattgcatgtgtgccgccctggaaccaggcaagctccgctcctgtgctaattagataatacctattatcatccctctttggttttgtttttgtacttccatcccacacatcatgctcccacatcgcagtgaaggttacatttctgcgcggcatcttatatgctgaaccagctgaatatacttttccgtcgctgtccttccagccgctaaacatcttttcgtacacagtaaacggattctctggaagtgtaaccgtggttccttccatcttgctttcccatgtcggagctgttccactggctgtctcgctgccggatttaaatgtcactgtgaatttcggcagaattgtgagatcgacggtaaggttctccgtctcgtctaccacgccctctttacgcaacgttaaagtaatcgttccggtaattccgccattgccgcccggttcaataccgtcgttcgctttcgtgagtgtaaatccactttcctctgaccaggcagccgaaatactgtcgttcgtaattacacacgtaactgcttgaaggatttcagcagccgtcgttccattcgttacgctcattttcttcagcgtattttctgccgctgttttcacgtccgccaggctctgcgcggtaaagttatatgccgcacttttcactccagcgctggtctcatagttttcatttccgatggcttttactttaaatgtataggatcccgtttctttgatctcagaagtaaaatcatagcttgtctgtccggaaaccgttttttcggatccaagtaccacagaatctttatacagctgcacctgatatccgtccgcattttctacctcgtcccagacagcttttccatttacagtctcatcccatcttacatttgccgggtctgaaagctgtattttagctcctccaagatataccggcagctgtccatccgtaagatctaccaccggactgattcctgatgtctttaagatcgggaactgttcatctgcaatcccccagtttgcatcatttccccatccgatcgtattattccagaaatcagctttaaggcagtcttctctggatacatcctctccatttacagcctcatatgccgcgaatgtaccatttgcgcctccgctcataccggcatatgcatagttcttctctccgttaacataattgccaccatatccaaatattctgcctacatatgctgaatttcctgacgttttaacggtttcctgcagcgcggcgcagcgattgatcgtgaccgtcttatactgtccaccaacaagaccgccgcatccacgtcctatgtccgtctcgacagttcccagtgtgatgcattgttcgatcctgattgttgtgccaaactccggaatatttccaatcagaccgccagccagcgatttattgttaatatcaccactgtttataatttttgcatcaacaacacagttttttatttcaacacttgttgtccctccagatacatctccaacaagaccgccgacagcataacttgtgttcgacagcttccccctcacatagcagttttgtatattaacagttttagacgttttaccggcgatcgctccaactggtgttccagcgtttgtttcctcaatcgaaacacctgaaataaccaggttcttcacggttccatttacagtttcaaaaagaggctgtccgattccgctgatcttatgcccacgtccatcaaatgtctttccattcaggttctccgcatcccaggtctcaccactcagatctatatctgaactcagagcaatatgtccctgcagatttccatatctgttgtatgtttggttttcctttgacatcacagccttccagtcatcggcatctgcaatcagatacgggtcacttacggttcctgtcccttcaattattccgcctgcaaacagcgcgatctgctccttctgtgctgtttttgtctccgggaccaccgattcctccggtgcttttcccgcatccgcatcactcgccacattccgcgctctcgaatcttccgcgttggaatcactcgctttcaaagcctcttccgtctgcccggtgcccaccgtctctgcatagaccggcgctgtcatcccaaaagaactccacgtcatcacaaacgccattcccgctgccaggagctgtcttgtctttttcctcatatatattctctcccctctgtttccaaaaattcacagaattgtcgtctatatttctgtctttattttatcaatttcggcttgtcattcaagattccctgcacaagatgtcatttttcgacacaagatgtaaaaaatgatatcgattcctgatatctaccgccgttttatcctatctcaccttttttacattcttccacacatttatcttaaaacatggtaaaatagctataacaaccagcatcggaggcaggacagaaatgaacattgcgatcgttgatgat

SEQ ID NO: 1981 - DNA, 18253 bp, Unknown
  gut microbiota DNA sequence
gactttttcaacaaaatcgagctttttggcttgtgcaaaacgccaattgacgtttttagcaaaaaccgtcgacatctgcttgaaaacgattttgttttgtgttagtatgaatctatatatttttttattgagaagaaaaagacaggagtccattatgcctaaaataaacctgaaaaccctggcgtacaatacgatccgttccaagatcgtcacttgtcaatatgcgccgggtacttttttgaatgaagaacagcttaccactgaattatctctaagccgtaccccggtacgggacgcgcttggacgccttgaacaggaaggtctcctcgagatccggccgaaatgcggaattctcgtccgtccgctgacattgaacgacatcgatatgatttttgaggtccgtatgatgtatgagccatacgtgctgatccactacggctcgaatctcccgacctccgctttaaaggaattctatgatatcttccagaaatgggatccgagcaaggagctttaccgggataaggattcattctatgacctcgactaccggttccatgcactgatcatgtccgcatgcccgaacgaatttctgaacagaagctacgatgcgatccagacgcagaatgagcgattccgctatatgacaggaaatgtttccaatttccgtctggaagcaaccttcaaggagcatatggcgatcgtagaaccgtgcctgaagggtgactgggaaaaagccgccgagcagctccgctaccatctggagcgctccaaagcttccgcgttccagctcgtagcaaatacagctgccgagtccggaagtatggcgcagcagttttcattgtaagaaaccggcaatttaatcgatgtatttttttcaaaagtgtgcacaaaaagcagatctgttttcaggtctgttttttatacctcacagcattatctccgacgtaaaatccccctaaacagactcagtttatttgctgtgtctgcttagggggaatatcattccagattcaactttttctattcttaatttttacaatctcattttttaatataaccggactttacagagtcatttctcactctataagcgtttcccaatgagttccgtcagttcctcaaacgttgcaaccgcattgatatcatttctcagcgccgcggaattcggatatccagccgtataccaggcgacatgtttccgcatctcgcgcattccggcaagctctcccttaaattccagcatcatctgtccatggcgcaggatcatggctttcagctcttcgactgatggtctcgggagaagctccccggtatcgaggtagtgggtgatctgcttaaagatccacggatttcccttcgctccgcgcgcaaccatgatcccgtcacagccggtctcctcgacaagccgcttcgcatcctgcggagtaaatacatcgccgtttccaatcaccgggatcttcactgcgtttttgacctcgcggataatgttccagtcagcttttccggagtaatactgctctctcgttcttccatggacggcaactgccgccactccggcgctctccgcgatctttgcgatctcgactgcattgatgcaggtatcgtcaaaacctttgcggaatttcaccgtcaccggcttttttacagcttttacaagctttgtgaggatctcctccaccagtttcggattcttcatgagcgctgaaccttcaccattctttacgatcttcggcaccggacagcccatgttgatatcaaagatatcgtacggtccatcctcaagacttgctgcgatgtccgccacgatatcggggtctgagccaaagagctgcagggagaccgggcgttcccggtcatcaacctttaaaagttcctgcgtattcttatttttatagaggattgccttcgcgctcaccatctccatgcacaccagtccggcgccctgctctctgcagaggatccggtacggcatgtccgtgacgcccgccatcggggcaaggatcacattgttttccagttccacatttccgatctttaacttcattgaattaaaactccctctgcgtttacgtaccgtgcatccggtgtataagcattcgtcagcatgtccccgtttggtttctggaagtaataccagtttccctgggtattgacccatccgtatgccatcgttccgtccgtattcaggaaataatattttccttctttcaaaagccagcctgtctgcatggctcctttgctgtttaaatagtaccagttttcattgacattctgccagcccgtctgcatgatcccgtacatgtcgagcagatacgttttaccatcgacataggcccactgactggagacaggatttccgtccggcttgtacagcgcccattttccatcggcccgctgacgccagctgccgccccggtaggtgttgtgaatgtaagtcgtgctgttttccgtcttcgcgtactgattcgcagcctcatttcccgggcccttggaataggcatagtccttttcactgtcgatcccgccgccaggattggaacccgttcctccgggaccgatgtttgaggtccatccgttgttgtaggcaggattgttttccggctgttcctggtagatctgaatattataattttccatgccggggcctagattaaaagcataggatctcacgccggtcgtgcaaaaagccgctgctgtgacaaaggcgaagacggctgccgccgccatttttctcattctctttgccactgcatgtttcttctcgccatccggtctgtccgtgtttaattcgaaaaacatactttccggtctgctgccgtgccaattttttcttctcataccgtgtcctccgatacgggtattatttgttgctgtccaccccttaacaaccgcattttatgatatcgaaacagccattttcgtagaaaaatatcattttattgcagtcagcgcaacagatgcgcaggtctgtccgagttgcagtacacggtcactcttcctttcccagctcatcctcaagcttgtcgcctaaaaataccacgcggtagaataattccagggattccagaagttccttcttctccctctgatactggcggatcttcagaccgctgccgatctcatcgaagagataatcctggtcctccgcctccacgcggaactcgagatttccttccggagtaaactccaggaaaaggatccctcctacatcctcggtaaagagaacgcacatgatctgcagctcttttttgatgttctccgggagaagtttgaacttctcattgaaataatatttctgctggtaagagtttgcgccgcagaggatgatgttttcctgggcgttctgtttctgattattttctgccatggtctgtcattactccatttctgttttatactgtgacgatctgttttccctgtatcatcataagtttttctgctttgataatatcctgttctgcgctctgcacacataagtcccatccactgcttattactttacataataggagcaggggacttccctgatcttattaaacttatgtacctgcccacgatcctgaaaagcattataaatactttaaaatatctgagatgtgatcgatatgataatccgccttgctctggtcaaacccgaagcggtcatccttcagccccgcgatggacatcccggcgcggtacgccgcctcgatccccacggtcgaatcctccaccacaaagcactcgtcctcccggactccgagaatattcgccgtgtagtgatagatctccgggtttggtttgctctgcttgaactgttttccgctaacgatgaggtcaaattccgggcgcatgccaacctcttcaacgatcctggagatcagctttggtccggtcgacgatacaagtgcgacgatatatcccctgcgttttaattcctgcaccgttgtcttcatctccgggcgaaagatcttccggtaatcgatctggctgtagatatcccggtccgcccactctctgatcagcgtttcccagttttccccgttattgacggcctgctccatgacagtccagctgtcctgtctgctccgtcccaccatcgggttgatatcttccattttcaccgccggattcttctccttcgcgaattccagcagatacttcatatatacaaattcactgtctaccatgacaccgtccatatcaaaaaggacggcgcggatcgggcgtgtgatcttcatttattgttcctctcctgttacattccacaaatcggattttccaattcgaaagctccgtatcaaacaattccgcctgtggatcctgcttttttcaaatgtctgctcttttctcatttccggagcagtttttcaaccgtttatctccaacgcatgattacctgcagaacccgccaccggcagttccctgcagatacatggcacagaaaagaaaaaggcggcctacgatcaagccgcctatattctatcgtatttccctctattttgcaataagtccgcgcattttcagatagtcgatcacgcactccaccatctcatcgtaggaaagttttgtggtattgatcatcagatcatagttttccagattctcccagctctttccggtataataacggtagtaatcacggcgttcccggtcgatccgtttgatattctttaagatatcttcctccgggaaatatcccttttcacggaccttgttgatcctctcctcgatctctgcgtacacgaagatccggacaagattttccgtcccgtcgagaacatagtcggcgcaccggccgataataatgcaggattcctcctgcgccagtttccggatgaccgatgactgaaaccggaacaggttatcggaagagatcaggtcagaacccaatgacggggttccattctccgggatcagggaatggatgatccggtataacagcttatttccggccttttcatccgccaggtggaaataactctcgcggattccgctctcctcggaagtcatctttaagatctccttatcgtaaacatggagcccaagacgctcaccgagacgcttcgccatctccgctccgccgcttccgtactgtcttccgaccgtgatcacaaattttttattctcagccatagatgcctccttcttccccttctgcctttcggcagttgtacctgaaaaaacgtgggaatactttttattctatctgtattttaacatatctccgcaggaattttaagtcttttttgcgatattttcagtgtttttcaagttttaacaagtaatgtcggatatcccagctttcgaagctcctgctcctgccgcacagcgttttccatgttccggaatgcccctgcgcggacatagtaaaatccatccttaaaagtcatgaacgcagggaagccctgagctttcagccgttccacctcccgttccgcgttggtccgcacccggtagatcccggtctgcaccatatagaatcccggctcctccacatctgacgtctgcttttcctgctccgcaaacgtccgcacgattccatccgcgatcgcatctgcggtctgtctcatatttgcatcgaagaaatcattgtcgttctcattatcgataaatccaacctccacgagaaccgccggaagcgccgtgtccctgaggactacgagatttggccgctcgctgatccccaagtctttccagcctgtctttgcaagttccttattgatattcctcgcaaacgtctctgcatcgccgcccctcccgaagatcagactcatcgtcccggaacctgttcccggcaccggcatggcattccggtgaatggataaaaacaaatctgccgcagacctgttcccgatttccgccttctcatatggactgttgtatatatcaccgatcctcgtgtactccacccggattccgcgctgttccagagcatttccgatatcataggccaatgccagcgtatcgtctttctcccgtctgttcccatataccgctcccggatcacttccgccatgtcccggatcaataatgacactgttctgctttgccaaaattattctccctttttcatacatttatgatatcatattcataaattaccagacctgcgccatccatgtcttaaaactttttctggcaatctcacgaaaggatctcattactatgctaatcgtattcaaccagatgataagtctctttctcttaatgctcaccggttatctcgccaatcgcttcggcgtgatcgataagacctttgagtcgaaggtctcccgttttatcgtcaatatctccttgccggcaacgatcttaaacgcggttaccggatcagacatgccccatgatcaggagatgctgccgatctttattgcagcggtctccatcttcctggtggcccatgtggtctgccatttcatccagaagatcatccgctggaatccgacctatgagctcatgctgaactacagcaacctcggcttcatgggaatcccgatcatctccacactctacggtggggaatatgtgcttcatgtatcgatcttcatgatgaccttcaatctgagcctgttcagctacggggtatatctgttatcaagagatgcctccgaaaacagatccatttctgccgctgcagcttcaggaaaagtactctcgcagagtccagattccgcttcagaatccggtcaaaaaacatccggtttcagcgtcaaaaagctgctctcccctggaatcctctctgcatttctcgcgatcggcatctatcttctggatatccgcctcccgcagcatgcagtcagcctcttttccaccgtcggcgccacaacgacaccgctcgcgatgatcgtcatcggttccacgctggcaggagtaaagttttccacggtatttaccgacaaggaattataccttttttccttcctgaaactcctggtccttccgctgatcacgttctttgtcctgagattcttcatcaaggaccgcacgctcttagagatttccacgattctctccggctgcccgatcgccggaaatgtgtcaatgctctgtatggaatacaaccgggatgtgactcttgtttcaaaaggaatctgcatctccactctgctttccatgatctcgatccctgtcgtggcagcgctggtcgcagtcctgtaacgtacgacagccaaaaagacatccgaatgagaaatacacatggtatctcccatccggatgtcttttttattctttagtatgtattctattcctgaatctgcacgcctctcggacctacatgggtggcaaatacgacctgagtgctggtcttgccgaacttctgaagctgtccgaggaaggtatcgagctgcatcgtgctctcgaacgcgactttcatgatcacggagaactccccggtcacgctgctgcattctaagatattcgggatcccttccgcatagtgatagaatttctgcttatcctccggaagcacattgaggttgatgaacgcaaggatgtgatatccgagtttcatcgggtcgatctgtgcctggtaggacgtgatgatcccatctttctccagtttttcaattcgcgccgaaaccgcaggggaagaaagaaacgtcttctccgcgatcattttcagggatgctctcgcattgtgctgcaggatctgcagaatttcgcgatcaatatgatccataattctctcctttgtcccggttttcaggtttttgtattgtgtcacatgtccggaacttcttctctatatacagataaccgcccagtggctccgcgttgctgcggtatatgaccaccggtcaattactgggttcgtattttatccgcgcttaccgtgcgcgtctttgcaggcacgagtgtactcagatctctccgtgaaatacttccgctgccggtcctgccataaataccgtgtctttttctctgtcccagcggatcagaagatcgccgccgagcagagtcacgcggacttcgtcatcggtaagaccatttaagatgcacgcaaccacagtcgcacatgcacctgttccgcatgccagagtctctccggagccgcgctcccagacacgcatattgacatgtccgcggtccacaacctccacaaattctgtattggtgcggtccgggaatctctcatgactctcaaaggacggaccgatcttttcgatctccagatccttgatcccgtccataaatactaccgcatgcggatttcccatggaaactccggtaaagcggtactcttttccgtcgaccgtgatcggttctccgatttcagacgtcggaaccggacgtcccatatccaccgtcacaagttccacctttccatcctttactttcatggacaggtgcttgatcccggacggagtctccacgtcgatctccggtttatctacgatcccgtgatcataggcatattttcctacacagcggatcccgtttccgcacatggcaccacgggatccgtccagattatacatatccatctggcagtccgctacatctgacggtttgatcaggatcagaccatctgaaccgatcccgaagtgacggtcgctgaccatctttgccgtctcacagggatcttccactgtctcttcaaaacagtttacatatacataatcatttccgatgccctgcatctttgtgaatttcatatcttattctcctatgtgctccataccctgcgcgaggatcgtctggatgtgaccgtccgcaagagagtagagaacactctttccttccctgcggaacttgacaaggcgcatctgtttcaggatccgaagctggtgggagatcgcggactgtcccattccgagaagacttgcgatgtcacacacacataactccgactggctgagcgcatacaggatcctgatcctcgtggaatctccgaagatccggaaaaattccgcaagattctggagttcctcgccttccggcatcacgtccatcacctgttttaccaccttgtcgtggacatgaataaactcacagtgcggggcgatcttttcgtcctctctgatactcatgttcctgctcctttactgctgccgcccgcatcccgcagccggcagtcatctcccgcagtgatcagcgcacgagaagtttgctcacctcgtactgctcctccgggatgtctttcttcatatttaacgcttcctggatatcgaaatctacaaattttccgtctttgtaggcaacgatccggttgctctttccttccgagagaagctccgccgcgcgggctcccatgatcgatgcgtacacacggtccttacaggtcggggttccgcctctctggatatgtccgatgatcgtagctctcgtctcaatcccagttgccgcttcgatccttctcgccatggaagtggagtgtccgattccctcagcgttgatgataatgtggtgttttttgccgcgctttctgttctcgatgatccggttgatcaggtactgctcgtttccgtcatagcgctccggaagaagaatatcctccgcaccgtttgcaataccgcaccagagagcgatatatccggcatttcttcccataacctcgatgatactgcatcgttcatgggatgtggatgtatcacggactttatcgatcgcttccatcgccgtattcaccgcggtgtcgaaaccgatcgtatagtcggtacaggcaatatcgaggtcgatcgttcccggaagaccgatggtgttgatcccgagggcggaaagctttccggcaccgcggaaggaaccgtctcctccgatcacgacgatcccgtcaattccatgttttctgcagacttcggcgccgcgcttctgaccttccccggtcgtgaattcctcacagcgggccgtgtagaggattgtaccgccgcggttgatcgtatccgcaacgctcacactgtccatatctacgatttcttcctgaaggagtccggcgtaaccacgcatgatcccctttaccttcagtcctttattgatagcggttcttacaaccgcacgaattgccgcgttcattccaggggcatcgccgccgctggtcaatactccgatcgttctgacttctttctttgccatactggttttcctccaaaaaagattctgtcgatcattcgccgtatacgtacatattttaatacactttccccttcttttcaatgaccttttgcacaaccttgacatttttttcaccaaggatccggtacagacgcccgaggagatccggccctgcaagaactgcccagttttcagaaagtctccgcattttccgctcttcctttaaatacatgacaacccggtcttttccatcggaatcccggagtgccgccatgacatcatcgatatggctctcatagaatgcctggttctcaaactgcagccagagttcattcgggatgtccgtaaacgggatcacttcctcgcagatgagctttccgaccggatcgtcgccgatggatgcccggccgcggacaaataccttgttttcctcggtaaatgccggacggttcttctcgtagatcttcgggaacacgaggacttccactgtgcccacaagatcctcgatcgtgatgaatgccatgagctggtttgtctttgtagtctttacctttttcgacgtgatcattccgccgatgaccacattggaattatcctccacaacggtctttccgtcctcgtcaacgacaaagtcggaggtttttgccgtcacatttttctcccagagttcccggtactcttccatcggatgaccgctaacgtagatgccgatcgtctctttttcgaaggctaacagcgtctgcttgtcgtactcacccacgttcgggaacgtgatctggaaattgtccttttcttcctccggggcgagatcaaaaaagctaagctggccttccatgaccgtctttttctccctggctttgctctccagcaggtctccggagacgatgagcttctgttttctcgttcccggaagcgtgtccagggcacccgattttatgaagctctcaagtgttctcttattgacttccttgttcgacattctcgacacaaaatcgtcaagactcttaaagagtccgccgttctcacgctcagcaatgatcacgtccacaacggcacgccccacactcttgatcgcggagagtccgtagcggatgccgttccccgatacggagaacccgctgtatccctcgttgatatccggcggcaggatcggaattcccatgttccggcaagcaaggatatactcggaaaccttcgtcgtgttgtccatcacggaggtcatgagcgctgccataaattccttcggatagtagaatttcaaaaatgccgtctgataagcgaccaccgcgtaagctgctgcatgggacttattgaaggcgtatttcgcgaagtccgtcatgtcatcgtagatctggttcgctgtcttctcatcgatgccgttcgcgatacagccctttacgccctcctcggcgtttccgtagacgaagttctggcgctccttcgccatgactgccgcttttttcttcgacatggcacggcgcacaaggtcacttcgaccgagcgtatatccggccaggtctcttacgatctgcataacctgctcctggtagacgatacagccgtaggtcggctttaagatcggctccagctgcgggcaggtgtaggtgatggatgccgggtcattttttccctttaaatacttcgggatgaaatccattggacccggacggtagagggagattccggcgatgatatcttccagtgttgtcggcttcagttccttcatgaaggtcttgaagccgccgctttccagctggaacacgccctcgttctttccggtcccgagagaatccatgacttttttatcatcataatcgatgtgttccagatcaagtttcacaccatagtctttctcgatcatcttcacagcatcctggatcacggtgagcgtgcgcagtcccaggaagtccatctttaaaagtcccagttcttccagcgtcgtcattgtaaactgggtcacgatcgttccgtcggcgcctcgcgataacgggacgtactcatcgatggaggtccttgagatcacgacgccagccgcgtgcatcgaggtgtggcgcgggagtccttccagcctcttactcatatcgatgagctttttcacctgctcatccgactcatagagcgccttcagctccggattcttctgcagcgccagatcgagtgtgatgttgagttctgccggcaccatcttcgacacctggtcacacaggctgtacggaaggtccatgacacggcccacatcgcggatcacaccgcgggccgccagggtaccgaaggtcacgatctgagccacctggtcttttccgtacttttccacgacatagtcgatgacttcctgacggcgctcgtagcagaagtccacgtcgatatcaggcatggagactcgttccgggtttaagaaacgctcaaaaagtagctggtagcggatcggatcgatatccgtgatctttaagcagtatgccacgatacttcccgccgcggaacctcgtcctggtcccaccgcgatcccgtgggatttcgcgaagttgatgaagtcccacacgatcaggaagtagtccacatatcccatgctcttgatggttccgagttcatagtcgaggcgcgcgcggagtgtcccgtcatcatccgggtagcgcagtgcaaatccttcatcgcagaggtggtttaaatagccccaggaatcgtatccatccggcacatcaaaccgcggcagttttgtgacgccgaactcgatctccacgttgcagcgttccgcgatcttatgggtgttctcgatcgcttccggggcatacgggaagagctgccgcatctcctcctcggattttacatagtactgtccgccctcgtagcgcatacggttctcatcggagactttctttcccgtctggatgcagagcaggatgtcgtgggcctcccagtcatcggcgttgatatagtggcagtcgtttgtcgccactaacgggatgttcagttcttttgagaggcgcatgatcccctggttgacctggcgctgcagcgggataccgtggtcctggagttccaggaaatagtttccctcaccgaagatctccaggtgacgttttgccgcctcctttgcctcctcgtaaagtcctttttccagatatctcggaacttcaccggccaggcaggcgctcagcgcgatgatcccttcgtgatactcccgcatgacctcctcatcaatccgcggtttgtagtagaagccgtccacaaagcctttggagacgatcttcatcaggttctggtaaccggtattgttttccgcgagaaggaccagatggtaataccggtcctcaccgtgaacggtctcccggtcaaatctcgatccgggggagacgtacacctcgcagccgatgatcggtttgatccccgccgcgcgggccgcacggtaaaaatcgatcacaccgtacatgacaccgtgatcggtgatcgccatgctgtccatgccgagttccttcgcccgggccgccagctctccgattttactggatccgtccagaagactgtactctgtatggacgtgcaagtgtgtaaatgccatctgtctcctccgtttctttctcatttatcagaaaaagaccgccgccccgaaaggcggcagtcccgttgtttgaatatatctcttcgcggacatgcatcttcttgtccgcccttcaggcgtacaagaagcacggacgtcgtccgtataccgatttacagtaaaaaacgcttatgcaagcaagcttgcaacacgctttttactgtaaaccggtgcatgtcctgacttattccttagttattactcagatatttttcaatatcgtttactgctttttcttcgtccactccgtccgctgtcacgatcacctgctcgccgaccggaagatcaagggtcatcatgcccataatgctcttcgcattgatctttttgttatcgctctggacgtagatcgtgctctcgtagctgctcgcaagctgtactaacattgcgatcggacgagcctccagaccagaagcaagttcaatggtcaccgtacgttttgtcataataatcctcctcaattgcacaaaagaatggaagtaaccaatttccattcagctatctgtcccctggtcccgcaatttttccgccatctcaccaagctttctcaggcggtgattgacaccggattttccaaccggcggttccaggtcttcgcccagttccttcagtgtcgcctcaggtttcagaagtcttgcccgcgcgatctgcgcaagaccatccgggagactttcaaatcccaccgtgtcgcggataaattcgatatcctcgatctgtttcacggcagcagacactgtcttgttaatatttgccgtctcgcagttgacctggcggtttacatttccgcgcatttcttttaaaatgcggatgttctccagctccatcagtgacagatgggcttccatcacattcaggatatctacgatctggcttccctctttaatatataccacatagtagcgtttgcggatgacaatttttgcatcgatatcaaacgtcgccataatggactggatctggcgcgctttgggctctgtcgcgcagacgatctcaaaatggtaaaacttctccggatcactgatcgatcctgatgcgagaaaagcgccgcgcaaaaatgccctgcggcagcaggggttctggacgaccacatttcccaccacagaaagattctccccaatctccccgtcttccgatagaagttttgtggctttcaatacacggagcgcgtcctcatgctgtttgacacagactgaatagatcctgtttttcccaagatgcgcgttcctccgtatagaaatgtcagtttctatattaaatgtttttctcaataatgtaaagcactttctggcaaccgtcacattttctgtatggatcttgatgctgtaatgatcgtctccggagatctggatccgaccgcaaagacttaagatcgctgcgatctcagcgatctggcagtgccttgctgcgctcatatgcctggaaagttcttccttgatcctggaagagaaagacatgactactttcctccatccttccccgcgtctctgtgttccagccggatctcataccgcccggactccgtcagacgcttaaatacttctcctgcgatcgtcaccgaacgatgacgtccgccggtgcacccgatcgcgatcacaagctgcgtttttccttcctgttcatacttcgggatcacaaattccagaaggtcattcagtttcttcaggaattcttccccggtgccgccctgcatcacatagtcctgcaccgctttttctgttcccgtgtgaaaccgcagttcttccacatagtaaggattcgggaggaaccgcacatcaaacacgaggtccgcgtccgccgggatcccgtatttgaagccgaagctcaggaccgtgataaacatgctgctgtgtccgtcgtttccccggtaaagattctccagctcatggcgcagctcctttgtcagaagtctgctggtgtcgatgacctggtcggcctcttttttcaggaaagcgagtttttcccgctccagctcgatccctttttccacacgccccgtccttgagagcggatggctccgtctcgtctccttaaaacgcttgatcaggacttcatcggaggagtccagaaacaggatcgagaacggatatttgttctctctccatttccggatgatcgtctcaagatacggcagttcctcaccgctgcgcacgtctacccctagggcgatatcctgtttttcgctctgtccgttcatgaccagctccgcaaatttttcgatcagaaggaccggcaggttgtcggcacagtaaaatcccatgtcttccagtgtttttaatgccgttgtctttccggctcccgacattccggtcacgattacaagtctcaacgagatcttcctccctgtattcttagaaagctgctgtacacagaatctgcgaacgcaactatatcccgcaggattttccattcggaaaactcctgcccgtaaactctcctagaaatcccctaataattttacttccatctccagatccacgccggaattttccttcacccgtcgtttcacctcattgcagagttccaggatatccgccgccgttccatgatccttattgatcacgaaacctgcgtgtttttcggaaactgctgcgcctccgacagaaaatcccttcaatccggcatcctcgatcagctttccggcaaaatatccctccggccgcttaaaggtgcttccggcgctcggatactctaacggctgtttttcttttcgctttgccgcgagttcttccatcttttcccggatcgcgcccagatcacccgttgtcaggctaaacgctgcgcgcactgcgaagagaccacggcgctccagcgcactcgttctgtatccgagctccagctcttcattcttcagccgctttaccgtcccgtaccggtccatcacgtccgcccacaggagcacgttcttcatctcggaaccatatgcacccgcgttcatcatgactgcgccgccgacggtcccgggaatgcccgccgcaaattccagaccggtaagcttctctctcgccgccgtgttcgcaagctttgagagcatcacaccggctccggcgatgatactgttttcgtttttataaacctccagctccgtaagccgctccgtgctgatgatcgtgcctcgaaagcctttatctcccacgaggagattgctcccgtttccgaccatgtaccacggctttccggacgctttacagtccagaactgcctcgcggagttctccctctgattccggaatcatgaaccggtctgccgggccgccgacgcggaacgatgtgtgccgcgccatcggctcatttgttctgatttccatgaatgtttctccttcttatataattccacctgcacttttatccagagcaggctgtgcgatcattcgctgcgtttcgcgatgttcgcctgcacgcggttgtagagttcctgggccgcattgtatcccatctttttctgacggtaattgaccgccgcagactctacgatgactgccaggttacgtcccggacggaccggaatgttgtggcagatcactttatttccaaggaattccgtgtactggtcttcaagaccgaggcggtcatattccttattcttatcccactcttcgagtttgatgaccatgtcgatggactgggtgtccttgacgctctcgacgccaaacagggtctttacatcgatgatgccgatcccgcgcacctcgatcagatatcttgtgatatccggggcagagccgacaagtgtttcatcgctgaccttgcggatctccaccacgtcgtcgctgacgagacggtgacctcgtttgatcagctccagggccgcctcactcttaccgatcccgctctcacctgtgatcaggacgccttcgccgaatacatcgacaagaactccgtggatactgatgcacggagcaagctttgcctttaaccagcggatgacctccgccatcgtgtcggatgtcggtttcgaggagagaagacatggaacaccgtagtggttgcagagttctgtaacctccggctccggaatctgatttctgcagaatacgaggcacgggatcttgctggagatcagcttgtcatacatcgcaatcctgcgctctctggaaagtccggagagatatgcgatctccacatttccgatcatctgcacgcgctcgttgtcaaaatgcgcgtaaaatccggtgagctgaagcgccggacgattgacatccgggtgggaaacgacgatcttttcggaatccagctccggtgtcaggtttttgaaatccattttttctattaattcggctatggtaactccgtacataatgaagttctcctttctgtatctgtctgctgacatacataacctacgattgttctttttgttcctgtttcaactcccaaccggcagtcccgcagagtctgacggcttcgcatcgtgctgactttgaacacttctcttcagtctttttctctctgcgcacagttatcttcatcctatcatatcacgggcagaatgtcacgaaattgttacttctcacgagtaggaattttctgaactgaaaattccgtatgatacagttttggggggcacgaaattttcatctactctgagatctgaggcatacggtctttttcacggaaatacgtatacacactc
